United States Patent Application Publication US 2026/0058010 A1 - sequence listing, part 54

SEQ ID NO: 604 - DNA, 109513 bp, Homo sapiens
  source 1..109513: mol_type = genomic DNA
taattcagatgtaactaacttggattgttctaattaacccaaattacaaaaatgttctgtacttaatattctaaatgattattgaaattattattcttactattgggtgaaaatatggagatttttatgtcaagttttctgattggcatactatgattatctattaccccaaacctcaaagggtgttagatcagtgaacaatgtttggtatgctgctaaattaaaaagtaataataataaccgtaagcttcacatgtagttgtttttgttataccattatgaaaccaaggggtgatgcaaggtttccaaataggagtggttttctaagttttgaggcatgtcattcccagagagcctacaatccgtggaggtactcagtcagtcattgtccagctattttggcaatgatctgatggctaatggaattaactagcatgccaccctctgcagttatttataaaaccagagcaatgaataaggtttttgctctcccaaaccaacctccatttccagtgaatggctgtggtggttggcaacctgagcccaccaaatcaaaccctgatgaaatgggtcagtgagcaaccagtgtaactgtccaccaggaaacagtctggagtaggggcaagagcaagaggtttcaagtcctggctctgctgcttcccagccacttaagaatgggcaggtcacaaagtttatcttttacttcttcatttgcaaaacaatacttcctggcctgtccacctttcatggttattgtgaggctccagtgagataatatatgaaagttcttgtaaatggcatagtcctagcctctttattagtctaagttgtcagttggtgcatgacaactcaaaaccactctccccatgctgcagtgatgcattcaaggaggatagtacatacttattgttcaatataccaagcaaaatccagaggcactctcacctcaatcccttaagatatgtcttctttcctgattgtccaagtgcctcgtggtactgctgaatgacagtgctaattgcacagaccctaaggtcagattgccagctccccacttggtcaaatatttaacattttatgagctcgttactggatctataaaatgaggattcaaatgttacctatctcacagaattgtgggaggataagataatcacgtaaaacacatgatgtagtatcaggtggcacacagtaacaatgacaattactattagcctcacacaggtttctgcagctaatatgaaggcaaaaatcccattagagtcagaagatctggtttcaagtcctcgttccctctgtgacaggctggataatgctacaaatttcattcaatctctctggaatgcagttactacttataaaaggatgctaatattcacttcatggggcctatataaaaatcacatagagtaatatatatataacttctatactcactgtaatgcacgatgaaaatgcacaaggctgttatttgatttttctgtatgaacaaacatgcagaaaacaattgcaaagattttatttagcggctttctgtgcttggcacttagaaacagagttccgtgcataagggcaaatttttgtacaccttttcttcatacatattttacatacccttttattgccccctttttcatattcataatattggattccccactaggcacataaatacatttatctacaacacctcaaaaccagaaactttaataatatctgtattattttacttggtattatttgcatttccacaccatttaaaaattttagcttgcaccaagcttcacttgctttcttaccattaaaagatttgaagggaaagggaaagatgaaggacaaaacccaaaacttcaaaatgcaatgtactatttgataaaaatggagatctaagggcaggtagaagggtatagaagacccatctgcaattccctgggacatgaggggatatttcctgccacagggatagcgggcaggcattctaggtcaggtgtctggatccggcacctggaggccaggcctctatttgttgcctctgctcttggtatcatcttccgagattataaaactattccttcttcacacccttttattttccttcccctaccaggctgcatgctgtggaatcagcacttcccacgtagtgcacctctcttctggatcacagtggtcaaagctgtgggctcaggatgcattccttgctctgtccctctgaccaatgccctgaccatgctcagtgtgccagagaggtttactcctcagtaatgccatgattctttccataacctgtagtggggcgggcggggtttggggggacaaaccaaaaacacgtctccttggtgaattaaaattctcatcattgctcacactttctctgtcagtcttgctctccacctcgttcctgttctctattctttctgtttgtctttctcctgttcagcttctctttctccctctttccacgggcaccactgggaatatcaatgatagcatacaagtgaagagagccaaagttcaaaagcaatctttttccggaagccaagtccagttgtactgatgtctttccactctcatccattgggagggtctccaggatacatggttcattccagaagcagaggaagctgcaggggagaaagactggcagctactgctggcccactccatctagagttgtacacagacaaattcttggtgaaagcacccattctgggcctccctccacagagttcacccagttcagagtcagtgtgcatgtatgattgcatgtgtatgaattgtgtatgaatatgtatgtgtgtgtgcacgtatgtataggtaggtctgtctgtatgtgggtgtgtatgtgtaacttttcatggctgccacacactagcatctcccttaacattatgacgaagtgattattcagtctcttcaaaggccactctggaacagacaatgctttataaaactaaggtctgggaaggcagaagaatggccactgagttgcggatgattctatcgcaagtatccttcactggcttaaaggtatctcttgttcttgggtatatgtcttcggccagaaaaaaaaaaaaaaaaaaaacacggttcctgtttttcaaagacactggactcccaaagaggaggatctgaccacggagactctggggccttgattgccaaatgctccgtggtgtttggactggcctttaaaccatgtgcacggacatctgggaggaggagcctggaactgccccatactgccggccatcacaagtgttggttgcctgttggttattgggtgaagggctaatcatgtgcatgctgtgctccatccctgacggcaggtactgcctctctccaaaggccccgttggaaggagaagaacagagtaaagtgctttgagaggcgctcagtttttccgggcttgcagctagcctaggggaagtggggaaattgtatccatacaggttgtaagggttgtgaagggagaaggcattgtaggagctctgctgcatgtggctgcccccgaacatgtgtggtgatgaggagctggaggcagcattgcctgcctgcatgacatactgaaactgggaagtgggaaaggaccccagctggccaccgtaggcttccatcttgctgttgccaggcaacgagggaggagttggtattcctgagatcagggatggagtcctctgaggcatgaaggtttcagagggctgagtggctgaagtggtgccactctgaagcctgttgtagccactgtcactcagccctgggtagctctgcaaggcagccatgttgcttcgggcacatggtggataatcagagaggtttagattacacagctggctttctcggcagcccacattgaaagtgttgggggccagatgaaaagttggaggagaacaggatggagataaaagatgagaagaagccgaaggggatggtgtcccagtgctggaggtggttggggaagtgcctgtgctgcctcctgaaaaataaaacgtgaatactattgagacagagtcttttaagatgagtctgcctaagtcacatgcaagccatacaggaggtgccttcaaatgtccaagatagggctgatttttacagaaccatttttcctcttaactcagcagacctatgctaagcgattccacctgtggacatatacacagtcatacagtctctcacacacacacacacacacactccagaaggatcaaaaacaacactaaactcttttgtttgttttctctgtaagagccttagtaagtcctttgtataaaaataacaataaaccttccaagattcacgttgccatttctcaccatcaaattcactttctaataagacctctgatgtcagcattaaaatccactagctcagcttttcccattcttaatggaaatgcattaaatatgtattttattcaaaggctgttgcctactttgccatttttagtcttccagccaaacatgcaggacaccaacgcgggaccctaatcacagaggaaatggggtaatggaagacagtgccaagtcaaaattgaggcctgggggtgcagagcagtggagcctggggtatgagattgaagttgcatcacataaaagacattgggaacacaattataagagctagattagaataaagcagggctaacccaaaacaaaatcattatgaaccagaggctctgctgatctccttttataggatcatgtccattctcagagactggaataaagactgtaaatggagcctttggagttttaatatttatcagaacaagaagctaaaaaggccttaaagtgacctgagagtcaggagatctgggtctgctcacaactctgccacactaactgcccaggtaaccttaggcacatcacttaccctctgcaggttacagtttcttcatctagagatgaggaattaacttagatcagcggttctcaggcatagaggacctggcagcttttaaaagaaatgctgacgttccaggatcctacctcggatgaactaaaggaaagtttctgggcatggaacctccacatcagtattgttttaaaagctcccccagatgtgtagtgtggcttaagaaccaatcatacaacccaaattcctcatttctaagtactcagaatagtctttcctaaacttgagtgtgtatgagaatcagctagatggcttgttaaagcatagattgctgactccatccctagagtctctgattctgtaagtctggggtggggcctaagaatttgcatttccaacaagttctcaggtgatggtccagagaccacactttgggttagaggaactccagattcctttcatttccaaaagtccctaaatctgtatttgaacgagttgatcttatgatgtgtgaatgttagagctagacaggtggatgatgcaccgacagactgaggaccagttcaatccaacctccttcagtgtgttctcagataatttaagaaggccaaaaatgacctttacgagcctcctctttcccaaagtcaggaagcagcagtgcagcatctgcctcctgtctcatccaatggaagttaaagacatgggtgagtgctagggctgcggggccctttatttgaattctggaaagagcagctgctttgtcttccatagggaatcttccgtgatgtaacttcctccttcacagcaaggttaggagtttcccagcattgtcaagagctgtgattcccccaaggaatgtaatatcctttagatcacctacccactcattttgggactcttagaagctgagcattataaaagggtaaagggcactttaggtataaaagagcaggaataaggtttttctcagtgaagaaaatgttataaaaactagcaggggttgggcacactggctcatgcctgtaatcctagcactttgggaggccaaggcaggtggatcacttgaggtcaggagttcaaaaccagcctggcctacatggtgaaaccccgtctctactaaaaatacaaaaattagctgagtgtggtggtgggcgcctgtaataccagctacttgggaggctgaggcaggagaatctcttgagcccaggaggcggaggctgcagtgagccaagatagtgccattgcacgctggcctgggcaacaagagcaaaactctcaaaaaaaaaaaaaaaagcaggattccagagacactggaatacaaagaaaccatccacagtgtgctaaggacacaggggtcccagatgtgtcaattaagagacagatgccctcaaagaggaaccgaaagttaatttttagcaggaaaaaaaaaagcgttcatcttacatccatgggcataggtagtagtgctggctatagaagtacaaatttggctgttgttattataatagtttcttcagaggtaaattttgacaaagcctaactaataacgaaagaatttcaaaagaattccccccaatgaaccttcaaggaagaattgtatttagatataaatagctgctgattttagagacatttcaaaacttctccttcctcctttctaatactcaacttaaaatcctttaagaaaagtaaaatgatttttattccacaatttgagacaaggctaacattgtaaataccactgagagaaggaagacagcagctggccatgtcggaaagagccctgagcctgattctaggcctattaacctctgtccagctcatgaccactagcaatgcaggccacctcttcattctcattagctgtgaaatcaggggcttgaaccagtgggcctcagtttctgtccttctcagcatatctgtaactgaggtttcaaataatataaagtgtgaatcgccaacaacaagtactttccatggaattattttgatataatgaaggatctctggcaggagaagattctagaaggaggaggcagaacatctcatctgtcttgtttctatacagctgaatggccaggccttctgtgccttgcagaaatctcaaggattcatttcaagcgtgtggttcctctttgaggcatcctacacattttccttattttccactccaaatgctatgagcttctctgaaattaaggctatggcacaaatggagaaacctgactccagctgtaaagagatttgttttatgggatagttatctggtcacttctctttgaaagttcattcttgctctccctgatctggtgtttatgtggtccctgaggagaccacctgttcagcatgtcatactgtcctgtcacaggtatgttctatcaggcactggtcctagccctgcagcaggaagtgcaagatggagcagatgacttcctacaactctaaatggttttctctgatggcccaagatggaaggaatggtactgatttaaggcctcaactggtttcactacaaaaagaaaaaaaaaaaaaggtggggggtggaactattaacaagttacagggatttctgctgaccagatgagaggcaaatgttaaaaagtttgtagtcagcttgcttgggcttttaaatgacattcactggaaatgagacttggtggcctgctgagcttgagtgggtgaagcctccatatgaactagtgtttgaaggaggcaggggcaaggctgtccaagaaaaggtcaccttgcttccatgcactttgaagaaatgctcttgtgaacataaagtactcaatacagataacagcaatttttcaaagttcccatagaaagagaagactatggtattcattttgcagagaacaaaccgagatactgacaagtctttctcctcctatgatctaacagcttgtcgaatgttaaacaagattggaatttccagccaagtgcaaaatgagcacaaagagggagcccatcctctttgatcatttacaacacttggctgactagagattctcatcacagaaaagctagggcagggtgggacaccagtccaggccaggccatactgatacaggagggtcagagctgcctctcaaagcaaagcatgactctcttccctgtgccctcctcccctctgtacctgccaggtcccgagtgctctgagcatcttgacagaaattttatttaatggatgagtgtgttctatagggtccaaaaaacccagttccaatcccagatgtcttactgattaaggacagaaccttagcaagttagcaactccaagccttttacattttaaggaattgccaatatctattttgtagagatgttttgagaaataggtaagatataatagtatacattacaaagtgctcataactgtatctggcacataggcattaatttaaaaaaaaaaaatttagtagagatagggtctcactatgttgctcaggctggtcttaaactcctgggctcaagaaatcctcctgtctcagcctcaaagcattgggattacaggcgtgagccactgcacctagcccagcacaaaagcattaactattctcttctatgagagaagagtgaaggaaggagaaaggaacttgggttctaatgagaatggctctgcggtgttggcctctgtctgtggagctaagcatcttggcctctccccaccctgatgagcattatgtcacaacagctacatgtttgttgtacatgctagaggaacctccatcactgtgaatgatggagcactaggccaggtagcagctaaggccctacctgtgccatattcccaaaggctaacctaactctggttcctctctgaattatctgtccctcctccctcacttccagttcaggacaagaatggctgcccgtgtctccatctttcctcaaatgaagcaaagtgggattgacagaacacaaatagctagactggtgtttttcccactatccttagaggtcttaattcacttctgagaagtgattaaaatataatgccctaagtagcttaaaactttcaggagttctgtagcatctgtaggatctgtaggatcaatctcctacagcaccagctcccttcatcctattttacccatgggccaatatgaggtgacacacatgaaaattcatatatgacattaaattgctccaatatccaaggctaatggccaaaataaccaaaaaggatacgtttagcagtaattccgtatgaggacaataacctagaatatacttgtttttaccataaagacaagttaaacgtgaccatgaaaatcctgaatactaaacctgctgacttttgcatctctaaattgatcatttccagattgtaatataagggctttcacatacagtttctttttcaatttattttgctgtgcttttctccctcctcccccaaaattgaaaaacagtaaggcaaaaccccatctaggctagtaaagaataaatttccatgtaattacttcgttccatgagccagactcttctctcgtataattcaatggcatctgtctctgaggagtgctgattcactgtgtatccttgagaagtcttctttgaggctttcaaacaggtaaaaggtaaaatatcagcaccctatagactgatcccagagaataaacccagagatcgtaaagtttaatgagcacagcactgttcatctcaacaaaagaattacttagttgagatgagtaccatcctcataatgcaaacatgaacattagagtgctaataggaattgcgtggtttcaatcttagaaagactcctagtgaatcattctccataaaagttaaaggtatgcacagacctaaactccttctctttaaaattgctttgaatatattcatccaattctcattttgcacattggtactctgtgctctgagtgtctccgcttcttagatggtcctattttgtatctaccacattccttaggtggactgcagcatttcttcactttccattaacttaattgttttctcccctacttgttttactgccttccttgctgcagcatgcatctgttatcttcatttagaattcatctgcttctttctggcaacagtatctagttttcccactattacacactttctcccactctcactgccttagccctaccttcagggaaggcatgtgactcaggcctggacaatcaaagcatcatattcccccctaccacagtaattaaaatggagatgactcaattaaagacaattatactcaatgagattttggtagaaatcttaggagaaaggtacatgccttttcccatcagatttaaacctcaaaatatgtagggccaggggttctggtaagcatgtttataccatggggaaactgagaataaagtcaggatgatagagagcaaagttgagaaatggagttgatgatcttttatgggtgcctacattaagctttgcctaaaactgcctatttgagtcatttcagtttcatgacccaatgagtttcttttttgctttgccatttgggttttattttatttacaacagtaagaatcctaattgatatacatccctaattctataggtaattccactatgaatctgaaggggtaggaatattaagataaagctggaagagagagaaataaaaatgagaatggtaggactagactatgaaccactttgtcaaatggaagctatggatgattccttcctaagacatgataaattacctatgagtaggaacaagggatttcagctacgtaaatagacatctagctctgtaaaaaaaatatctaataagatagtgactttactttagaaaaatacataatctcttaaatggttgctggcctcattctgatcaataagaacaggctaaacaatgaagtaaaaatgctggaaacttttcaagatgattttttcatattagtgtccctggcaaattggcaaataaggaagataatgtacagaatagaaaaacaacagctgctgttttctttttttaagttttctaaaagttcagtagaaagaaatgcacaaatctaaacaaaaaggtaatttcaaaaaccaattacaaccccacaaatggtaagaagataaaagaggagtgtctaaagacatcaaagtcaaagtggccattctctgataggtttgtgaaatgcagttagataagacataaaaggaagaatatataaataaaagcaggaaaaacaatggtgtgatcttgtgggaataacattaggatgcccagaattaagtgaagtttgtagtcttctctaacagtaatactcatgttttttctcctactgggtttatttctttcaaagtgtatcactttaatttactattcttgtcattatttctgtcccaagaagacttaacattacccacgacagcatgagaaatgctaatgttaattgactgcatgagtgaacaagtgactcttacttcttaatgttaaagcttcaaggtcattttactcactcctcatattatacgcactgacatatggattcctgagaccataaataattgttcccaacttactatgttgttatcttcacttaagaattttgggggccaggtgtggtgactcatgcctgtaatcccagcactttgggaggccaaagtgggcaaatcacttcaggtcaggagtttgagaccagtttcagcatggccagcatggtgaaaccacgtctctacaaaaaatacaaaaattagccaggcatggtggtgtgcacctgtagtcccagctactcaggaggctgaggcaggagaattgtttgaacccaggaggcagaggttacagtgagccgagatggtaccactgcactccagcctgggtgacagggcaaaactctgttgaaaagaaagaaagaaaggaagaaagaaaggaagaaggaaggaaggaaggaaggaaggaaggaaggaaggaaggaaggaaagaaagaaagaagaaagaaggaaggaaggaaggaaggaaggaaagaaagaaagaaagaaagaaagaaagaaagaaagaaagaaagaaagaaaggaagaaggaaagaaagatggaaggaaggaaggaaggaaagaaggaaggaaggaaagaaaggaaggaaggaaggaaggaaagaaagaaagaaagaaagaaagaaagaaagaaagaaagaaggaaagaaagatggaaggaaggaaggaaggaaagaaggaaggaaggaaagaaagaaaggaaggaaggaaggaaagaaagaaagaaagagagagagaaagaaaaagaaagaaagaaagggagggagggaaggaaggaaaataaaagaattttgagtactttcttcactatcctttacaaaacttattttcttcttttttcttttctaatcatcatgcccttcaaattttatcctaaagttgtctctggttaatgtttgccaaacacattgacattagtccctatgatacagaacctagcagagtttattcacttattcaatcactatttgagtactaaatatacactcaaccaacagggagtgtttggatccagggatttaatcatgcgggaaaaaaatagtgagaaaaatgtggataagagacattaatgaaagaatgacacaaataaacaagagctcaccttaaggatacttggcctactctggatggcagggaatttccccaaggaagtcatatttaagctgtgatctcaaagacagatagcactaagcactaagaaggcaagtgggtagcaaggagccttccagagaaagagaacaacgtggcaggaaagagcacaccatgtttgagaaagggaagtaagatgagtgatgctgaaacaacagagagaacgaggggaggtgatataggctgaagctagagtagtaataatagcaataatgaggatgatcatagagaacatttttgaacactcagtaaatcctaggctctttcctaagcactttacattcattaatcctcattgttgttatccctattttagaggtgaggcagcaaaagccagaacatgcaaggtctagcgacaatgttaaggaatatgtctttcataggtgaaagtaaactgtggccattgagcagctttaagcagactggagatagaaggttgaggtgcaaagatgtgtgttttgaaaaaaatgattctcatttctacatgaggaatggcttggaagaaaatgtagaaactatggaagacattaaggtcatgcagtgagaggtgacgtcagtgcagagtggcatggtaacaaggaaggttagagatgtggacagatttaagaacttagtaatggttgagcatgggggtagggcagggagggaaacttccgggatatcaagtgttctccttccccatggagagggcaccaggctgtgaggtagatgataactcagttttggacatgctgagcataaggaacttcggggacaaaacaaaatatgtaatcaattactgtttgttttaatggattgaattgagatgctccctaccccctatcaggagctcttcatgattatagtgcagaattaggatattgctctcctatagctaaaaagggagtgctttaaaaaaaattctatgtgataagccatacgtatgggcattattcctcacctcagtgataaatgagatctgtataaatcagctatgtttttatcattacagtgacgtcatagttcaatggctcatgtccactaaattgtccttctttcccagtatcttacttgtatgacttgatcggtagctgatccctctcactaaccaacctcaactaatacaagtcaaactgatgaaaattcaatcatcaacagagaccctcataatcctaactctttaactgcctgacaaacactgaaacacccaatggtactgaactcggtagtgatgtccaccaactctcttggggaatggagagcttttgtaaatggtggatcccctcatgtccacagatggaaagttggcagttctggtgtcattggtccagaatgattccttttagaacaacagttatcaaatagcttgaagtcactgctgataaagctctcggttttggccactcaaatagctccattatatacatgaggaagttgaggcacagattttattcaagtatatccatcagaacaacaacaggattgcattgtatttagttataactgacctggactcttatttccttttccttctatgtttatatttcctcagtcactttctccaagcataacttgcctggttagttcatttgctccttgtcactagcagtgttcaggcaaaagccattcctgaggtagaatcttcatctccagaacctccagcctctctggactctccaaacacataaacacccttgagtctaactgaagacatctgaagaccatatacttgacttataaaaaaaaaattgacctattgagagttaatgctcaagttgttgaacaataaaaaccatcaataggaagagcaaactaaaatctttgtggaaaattaaagctgtagtaagaaagaataagaaaaataatgtaacctggtggaaaggaaactgtcctgtcaaataagagatctgcgttggtactctgaacttagctctgccaccacttaactacagatatgatactagaccagacttgtccaacccatggcccaagggctgcatgcagccaagaatagctttgaatgcagctcaacacaaatttgtaaactttcttaaaacattatgagattttttgtagtttttttagctcctcggctatcattagttttagtatatttcatgtgtggcccaagacgatttttcttcttccaatgtggtgcaaggaagccaaaacactggacacccctgtactagactgtgtcatgcctcagtttcttttttgtgtcaaaggcagaagataatgaatctcatgcattcttctccttaaacaactatttacaatactccattcaatgtgattttaaaaataaaaagacttaaatttttgcaaaactgtggagaatttacctaagtgctttcttcaaagttttatcagcagatgagtcttaatgacaagagaaataaaagatggcagccaaggcaggatgaaaaaagcattcttaacctcatctatgcagaaagacagatccaccctcaccagtagcagcacaaaactgtctaggactgctatgtgacatgacagatactcatatgctgaaacaatgaggtaatatggacaattggataagtcagtcactatttggcaccaatcttaggtttggtgcaaacactgccaatactcacctcattaaaagggaattgctgtaaaaaatagcctaccactgcagtttccactagaagctcattcctctctattccttctaagatgcaaagcagttcagcatgcatggctgtgtctcttctcttcattcatgatactgtccagagtcactgaaactcttagttcttaagggaagaggggatgggtgttgttggttttacatcctttgttaacgtcaagaaaccaagccacatattttttaataatgagaatctggatcaacttcaatggatatttcaaaaatatattccaattaaactatttaatagagtcctggctttttctctaaccccatcccatcaccatatgtatccaataattcaagttctttcttctcttccgataaaagtgagggtcactgaagcgttttgaaagttcagtttatttgaaaccattgttttcaaaatgtcaataataacccttcatactggtaaatttttagtataagtaccatgaagcctgctatgctgcacatctaagtaacccatgcaagcttcctgtgtctgtgcctgcccaatggcgtccctcaatgatcactccttatcaatgtctacatacatattaggtggttgtgctccaagaagaagtttgagagtggctctgcccacctgagccacagtgccagcaagtgatcccattcactattcattgggtacgtactgggtgccaggccctgtagtagatcttggggatacagcattgaacacaattgttgccattaatgcctgccctctggaactggcaatatccctgccaaccttctccgaccagcctccatgatacaaactcctgcttagctagagcttggaaaggcaatgagtaaagcaagggcagagaagcaaagaagccaccagagaactaaatcaaatcaatgacacatttttgtatacacagcatgtttatataaatttcctcacaccaaaaaattatccctcttttgtaggtgagaatactggcatgcaggaatagaagtaaattgcctcaatgtagagaattcatgaccatcaaagacgggggcctagattttcctgagtctctttaagcccctgtctcttaatggccatccgtgagggcctcaaagccatggtgacaccttgaataactattgactctgcttctaatcacagctttgtagggaggaatatataaaagagatggaaattctggatcacttacttcaccagatcgctgtgaaaatgaatagtctaatcatgttttaaataattaatcgtcagaaaggcaatattccttggtcctgacacaactttgcttaagtgtctacatacagggacataagggccttgaaggtgaagataatgaggatgatgaagacaatgataactagttgtattaaatgcttactatgattttaaatgcactatctcatttaattcaagaattctatttgattctacttttccaaataatgcagacgataaaactgggtgtcagaaaagttgagggacttgaccaaggtcacaaagctagaaaggatcagtgataagagcctagcctagacctagtctaactccagagtctatgcttttaatcactacactcatcttaaaacctgacagatttcagcaatttaggttacaaacctaattcagtgtgcaaaatgttagaagctcccctgaaaagggtaagttaaatataatatatgggtgctatgcctgggaaagctacagacaagactgagaaaatttgaaataagtcacaacccatctggccacaggtttcccaacctgagctgcgaggaaagaaaaattataaattggataaaaagcacaaagttcaaagcagtaggggggaaagtctacttattccaccaactgagaggggtgttgttttatataagcaaaaaaggaaagaacacaagttgcaaggtccagataggcttgcagcagcccattcctcacctggagacctgatacaatttattcccattgtccagagctaagattttgctcatcacgaaacttttcttattctaagaaaactgagaaggctaccatgaggaataaatgaagttattaaaaaaatctcttcaaataccaaggcatatgtgaatgcttagcaatattaataataatatcatcatcattataaatatataactgcactcttaggaagggagagagcattttgagtgccagatgaaatgctgcctttggaccagcttgtttacccaagtggtgatgctttggttatttacagagctcctgagttctcttcattccaggagaattggtataacccatatcttggcctgaggccagatgtgctatattcggttgagctcccactctgtccctggccctatcactaagcagaggccttgctccagggctttaccttgctgcttctgcatggtggtgaagtcttcgaaggtgagtgtgcgcacaggaggtctccagaatgcatatgtctccatgatggcttcaagtccagttctgacaagagaaaagccagcaaaggaagtcataaataatttcaagaaatgcattgacttttcagagatccagaggtggactgtcaaacaggtaataaaaacatagatactaagctaccaccatcaaggtaaattcgggtgaaaaaactcaaggtacaatgatgctggactgcagggggaataacaaattaacccaattcagatcatttgcaagcaaatctacaactatgatggaattttattctgaccctcctttaaatgaggctaggtctgcaggcaaaaaagcatggtaagtattaaaggtcaaggccactaatatcatgagtacagttgtgcagaaagtaacattgactgcttctctagcacagaacaatgtcgtcatcattaccacactgcactgacacagcctgaccgagagtcaactcctcaccttgggtatgtacagaacgaatggaactgtcaaactgctgtggttttaaaggcttcttaaatcaacagagatgaatagggcaacagaaataaaaggagaggtaagcagtgaaatagacttgggtttctgctgcaataagaaacacctacctgaagataaagaaagggcttggtctcaaaaattatggctcaggcaaaaagactaatacatttctccaaatattcatctgcattttagtaacctaataatcagtctggtctttggccatcacaaactgtcagagttcaggaagtatccaacattttacgagtacattcctttaaggctcctggttcatttgtattggaaattccataaattggactatgtgcatactgtctttttacccttcaattaactatgtctctaacacatatgcaagtgctgatatacatcattttcacatgattattgagattatctcagacatattcttgatgatatccataccctcaaaacaaaatatcagctggggctttgtttgaagctttgaacacagcttctaattattgatctttctttaaaaaaaaaactgcttcacttaactaaacagagagaggagaagtgtgggacctgtgagaaaggtgggaggagaataggaaagagcagatggcataaatcttttcattgcaaggtcactggaaggtgggtggtatggcatcccttcctgaaatggattagcttccccttttgagatgaaacttctgctgcctgtgtttctttcttggtaatgtatttccagagttctcttcagccttacacaacaagaataaagaaattttattttaggtgagaacaaatatcctttacttatcaacaactataggataccctgaggttcttctcagatgagctgctgatacgctgattgactctttgtgttggaaaatttcctctctgaacaggcctcacttgcacagttaactttctaaagtcttccctggaatcttggaggctttaaatacaccaatgttggcaaaccaaactctgtattttaagaagaggttcagagaagagagtgttacatggtgtttattagctgttaatctgttagaagtaggaataggagacatctccacatagtcactctacattaatgttgaatacagtacatgaaactatttgtggagagaaagagcccaggcaattagggagttcagaataataaggggataggcagataaagccacactgagcctggatggatagaagaaatagataggccaggcttaggtcttactgctttgttttggaatgttggccacccaccagaatatcttaggattccctttaatggcacaggaggctcactgaaaatggcagagtctttattgttccacctcctagttcattcttcccaggaacatgtactgatgatgaggacaaaatattagctcaaggacaaagaacagtcccttctcagttcataatgaagtgctggaagactatgaaattgcaataatatactgatacactgccaatattttatttgttgaataaatagaaaatgaacttcattttctatcctagttcattttgtgctgctataacctaccatatgctaggtaatttataaacaataaagtttatttggctcacagttctggaggctgagaagtccaagagcaaggtgctggcacctggtaggggcctttgtgctgagtcatacatggtgaaagatggaaggtcaagagagggcaagagcaagagagaaaggcaccaaacttattctttcatcaggaacacactcctgtgttaattagccattcatggggcacagctctcagagcctaatcacctcttaaaggtcccatctcttaacactgttttattgcagattaagtttggaacacataaactttgggggacatattcaaaccatagcagtttcattttcataataggcaagaagactgtgacaaaagtgttaatagttttattttatttaagcagttaactctatatagaatagtgactatttactcatgaattcaaatctaaaatccaaataaaagaactgagttgtaaaatcacatattttaaatctaggaagaatcttggatgtcatctactataactcttatgacaccatcttgaatggttatccacctctgttggtatatatatatccccaggaaaattttcagttttttgattgatctgatataactttcaccctctggttccattaccaataagtaaatagtgagagtgacaggcatttcccacaaggagtccacctgccacatcctcagcagggagaccttccttagctaacgaacataaagaacaacatgccacctatggacacatatgtaatccatccaggggtctgttacagcaaggatcagtttggtagtggaattgtgtggggagggttatggctcccaaaaaaataatggctaagaccatacatgcctaaccatgtcttattaatccacagtggatctatgtcttataaatatatcctacatagcatatatataaattattctataatagaaatgatcctataatatatattatcctacagagaataatattggtctcatagatttatattattgattttatttatgtattcagtgtgtattgctttttagaaaaattaatcctatttatttaccatattctacctgttttatttgtcctcaaccctattatgcttcattggatagatctaattattagaaggtactagttctatatatcaatatttggtgtagtgccatggcaagattaaacaattcacctctctccaccactagtatggtcgcatctcaagggcttaggtcccatgttcttctatgcccagttttctagcacagtgctggttacaggataagatctcaaatgatatgcattgaattaataagtagaagaatgaatgctttattgctgagtcattcttacactttaacaagcattcatttttctaagcctaaaacttaggaacacaacttggtgtaaaataaagtatctgaagacagaagacatcctccagtattagagatttgggaattgtttctatagctgattgcgattgtgcctttattaacttcaggttcagagaggtttgcattttccttgtctttttccattccagccatagaacttctgagcttcagcagagtctgagttcccttgcaggggtgagtcatttcacctcccatcttttcttttgagagttcttgccaaccacctattaacgtcttcagccagttggatgtctagtcaaaatttaccctgtgctacacattgtttactcatttgtcatcattttactctagttttgtaaaattttatctccaagtttttaaaagtgaattcattgtctaacgggtgaaaaaagcagtcctaggtaatggtatgccattaacgtgttccacatggtgagcctctcaggtctgctgaacagcagagacctgatgtcatctctgagatttccaatcagagacggtcaagttggcaagtgtccccctcttgctcattttttccctgttagctccattgacaacataggccgtatccaaaccacctttgttcagtgctttggctgtaatcacctctccggtttccaggcctcttctctttaggcttttcaggctgctcactagccaaaccaacagaatgtgctgaagagaaggagaaagaggaagaagagaaagcaagccaaggacctcttttgcaaattgatgatggcttgaaatcaatttatttggaaaaatagtcagactacagaaaaaaacatccttgcaacattttcaatccaaaaaagatggcagtatcattccttcaaagttcagcaaatatttgataagtacaacaataattataataaatttcatgaccctacttggtagcactccaatgcatatttctgcttttcttttgtcttgagatagggagttgctttttaatgtttcctttgtttattttctctttagttctgacttccttaatttttactcttccccatactatttgctggtgacactggtaacaaagacaacgtatgctataggttgataaggccattggtcttctcagtagaagatggaaaaggactaagggaagcctactgagacagaggtcttgaagtaataagagaattatccaaccagaaaaaaatacttataatactaagttcaggaaatataaagacagaaaagacacagggtctctaccctttatgactgtcttgttttttaaaaaaggaacaagatataaatgactagtttctgaactatgcagtaaatgttacactgaaggcatgtatgccaagatgccatggaatattgggcaagaatcacttaatatacctgaaaaagtcaaggaagattccacaaaaggccagttatttaagcttactattaaagagtaatcagcagttttccatccagaaaagagtcagtaaaagtttttctagtagacttaacagtatgtgcaaagacttggaggtatgcaagagaaggcatgttttggggacatagttcagggtgactggagcctagggtacagaatgggagaagggcagtagacaccatgagcatttattccatgacaggtgcttagattttgtcccatgggtggtgctatgcctctgatcccctttcttttcccttctagtatttgaaaggacatataactagaatatactgttccttcagatataattatcacatctcaacattcatagattttcttgcttggtttaggtaaggccaaaccttccatacttctttctccttcactggatctgaaatagaattactcagatcaaaatatccagattactcaggaatgttattgtccagggatattctaaaagacctcccagcagaggtgtgcaaattgactaaaaacctaaccatcattcaaaacttggtgttaaatagtaccataagtatatctacatgatgaagtagctgtcattaatgtgccttgcaatggtttgggagaacaagtgtccaatggacagatgcctggagttgagttaaaattgctccttaccaagtgattcccaacttaagaaccctgtcctcccttggagtatgaatcagcagtaatggcagtccataaagagttttcattgactcaataagtgtagtaataacccatgatcatacaaagttggctaactagaatattaagtttctttgcatttgactgaaattgtctaactttaattcagtaatgctaaaatcacatgagggacaaaatagcataatggttaagagcacaggctctggggctagattacctggcttcaaactgctaccctgctgactattagtacaacctttgccaagttatataacctcttcatttctaagtctgcctatctgtaaaatggagataatcataatacttcctcctaactgtgatttaataaatgcagactgattaaagacaaaatgtatcaaaaaaagagagaaaacataatgaaagtttgaggaccattggtctaactcaagcaaaagaattacaatcattctcctcagactgtaacctataatagaagaatatactcttacttcactgaaatccaaagttctgtcagccctctggctctggattaaatgtggagggagctgtatggtacctaattccatttttcgttgtcttctcaaagaaacaaaaacgtgtccctcaagtccctctaggcctcattatcttgcagatatttcagactccaatatgttagccattaaaaagacgtctctctgttcgatgacaccatccctgggcaaaagccacagataacaaaatgatcgccaattttctctggcaaggccacacagccaagaggacaatggtggaaaaggctcatgacaagggagggcgaacaaataaggcagaaaaaatgttaagtactggataaaagactacaagccaaagaatatgataaacagctatggcctgcatgaaaagcaggagtccagctggatcatctgccagaatccagcacagggccagctaccttgaattgtagatgcagtagtgcctgctggagtgtccagcactgattacttccatagatctgctaaatggcataagccacccatgccagggataacaaaagggtttgcaaaattttggggggctggtaagagtgccaggaaagagtagaaagagattggctggacaaatatacccaatggctttagggaaaccaaatgaaaatatagaaattgaaagtgagatagacacttgagatgtcatgctggttgaattaaagacaagtggtcagttcactggctctaagctcactacatgagtcttcaggagtgacagggagccagaggtggacaaagatacaatttctgttaactagcaagctatgcctagcagaagagagtgaaaccattctctgtacactgtcattagctggatttacaaattctgaaagctaatacctcatggtgttcagtcttaccatcagtaaaatgggaaatagtgcattgacgtcatcaacttggagataaaaatggacaacttggaccacagatactctgtgaaataattgttactattgcttgtatacttatgatttgaatggctaacaataaatatatgaggttaaactgtatgaaattgctagcattttgccatttttgacctataaatacagtaattttctatgtttaacttaatagataaaggtatagataagatttgagttacttggttataatagagagctctattagcaaattttaacggagatcctctgtataccctttctcctcccacccccaatgacaagttgtttcagatttcagcaaaaacaaactggccctgggattaatttctagcctacttttcctcgtcccttcttttccttctgctaatattaggcactttgattcctcatcttacattccaccttccattgggtgttgtgagaaggggctggccctccaacaggggacgcctatttgtgcccaagagaggtggttctttataaacatggccatgggacagcagctgctgaagagggggtcatgggaaagttctttactcccagatattttctccacctcccctagacagaaattatttctctcaggttaagtatcaacctcattaaacattctctttcagtgagcaaatatatccattcccgtaatgcagtgagtggcaccagtcttagatcagcatcctctgacatgttatgtaaaaggacactaggcaccaagaaggactgccaccagccacattcccagcaaacagcactgctggctgcaaacactccaagaatgaactgagactcagatttcttcttgcacctcatcctgcaagccctattgtttcttcagtgaggggcaattcattaaaactacttacccatataaaacaacttccttgtgatacagagcctgccactggctcctttctgacagtttctaagttatagaatttgagtttctggctcaggcttccaatggtggattcgaaagagaaaaacataccctcctaaaaagttgtaccaattccctgggctacagaagggccattccacttgggccctatcatgggaccaacagcagtggctttggggtgccataccagctggaaatatctggaggaaactgtgtcagatgggacagtcccacctgcagctgtactagatgcaatggaggctaggagtaagggtaaagcccaaggtcacagacaggatgaaggctccgtcagaggaaatcccagagtctttcactccatagcacttttaagacaagttcatagaacccttcactactcagacagaccacaaccttaataatctcatttttatgtatgtgtttgctttggaggaagtccctgagaattattatataaaattttccaagctgacttgtgctttctgtaaaatcttggcagccaccctatcaaggatggcttgataggaagaagttttcacatcagatgtgggatgaaagatgcagtctctttctttccacttctttggttatctctttcatgtgcagggtcttggcagttgtcatgctccctctagctgagcacagtggactctccaggtatgtgtgcacatgcacctcccataggtgcttctcaacaattagacccagtgcaaagactcttgctcctctttagcttcaggatctttgtcttctccttggtgcaggttccccattggggtggccaacctcaaagacataattttacctcttggttcactactgggtgtcctttctcaaccaaacctcattctgctttagctcagtctctgggaaccacttctttcctgaagctcgcaggcactgaaaattgctaggtatctttctccagggagccagaacacacagacatgccccagctacccagagccagatcagagggtctcaagggtgtgtgtgtctaatctacagttaggctaaatcaatgtcttacagcagtgatcagtctccgattttaatcacaattgccattaatctttaaactaagcctatttagagatttgctccttcttccctccttatgtggtgttcaaaactagctcctcactgctgacctacctgatttccccctggctgggatagggctttctttctctagagctcctgatttttaatttctgtgccattcatcaacacctttttactgttttgtagctaaatgaaaaattattgttttattctctattcctggcaccatggaaaaaaaatacaagaacagaaacctgcaataggtacagtcccagtcttccaggagcttatattctagtagggggcagagcccaggaacacagagcacaagaccaaaaaaaaaaaaaaaaaatctcaagctgagaaaagctatttctccctgaaaacaggcaagtgttactgtctccccaagtaagagaaatctcccagaggcaaccctggatattgtgcctgacagctacaggcctgataataggtgaacactgcccccatcccacacacacacccaaaaccagatttgggccacacaatttctaagaaatctagaagtagaaacaacttagaaaaaagaaaataaaacaatttccctcctattgcagagacaatgcctggaagcaaaatctgtcagtgatttcactccagaataaatggccatctgctatgcttccccacgacgtgaacacacacgtacacctactcctgtctctctctctctctctcacacacacacacacactcacacatatataggtatacttatacttgcacacacacacacattcacacatatatgaatacttacaatatttatacatacacacatagacacacactcacacatatacaggtttacttacacatacgcacactcaacattcacacacacacacacacacacacatgcatgcatgctcccagtgaagacttctcatcaggggcttaattacttggtaatggaaagtagcagttccataagtcaagtctgaagggtggagaccttcctatgcttctcacctgacacttcctaaagaagcagggagaactacaataggctctaatgatggtggcaccacaggactgaaatgtggactcactggggctccccttggggtcttacacagtccaatgaatatcacctcttgtttcacccaagctcagaatctattctgtggaaggcacaggagcctaatgccatggagaccagaataccatttttactatagataaaggtgtttgggggttgtggcataagcgagaaggctgaatgagctggcttgaactcctctgaaataagctgatgccccagaaatgtaggcctcctctgctagactttccacataatgaaaagacagctgggaatgtatgttctgcaggcaagcaggcaagaatctggggggttccttcctccagactcatgaatcagatcagtcattctggttcccattgagaggaatgagaaagggatggggctggaagccaggaggacttctccatggatatctctgttttgttgttgttgttgttgttgtttgtttgtttgttttctttttcttctttgagacggagtctcgctccgttgcccaggctgaagtgcagtggcatgatttcggctcactgcaacctccacctcccagattcaagcaatcctcctgcctcagcgcccccagtagctgggattacaggcacgcgccaccatgcccggctaatttttgtatttttactagagacaaggtttcatcacgttggccaggctggtctgaaactcctgacctcgtgatccacccacctcggcctcccaaagtgctgggattacaggcatgagccaccgcaccctgccagatgtctctttacatcaacatatgaaaaatgggaagctagtatgctcagccacaggtccctcaagcactcttttctatgcttcggaggacatagttgtcagccagggggctacactcggatggttctgagtgtgagaggcttatgggctgagagagactctcataggcatttgaggagagtgttgtgggtggctgtgtcctccccatctttcctctcattcccctcttcttgagcctctggattgtactaggagggattgagattgacaaacctgaacatgttttggtttgaggtttggcaaactctgtaactccaaagtcttccacaaatgttttgtgttctgcaaaaccaaaaaacattggacaagcactttccctcctaatttttaagcccatgtgtgtttaaaggaaatgtaatccgtatgttttgggtacatttacatgcaactcatcaaaccatgctcctctgcatgagtagtcacttgatgtctaaaatgcatggggaagatcttagatttacaagatttttgttgttgttgttgttgttgttgttttaccacagaagggcaatagatgaggtgcttgatggaaggtggtgaactgggtcctgattctggcacagaaccaccagttcccagaagatttgcaaataattctctgtatcctcatctatcaatatttcccacctgcaaggtggcattaataattgttgcccttatcagatcctgtgggtagccagtgagaattaaagtgtgattatcaggtaattttgagatatttaaagagaaaaatacaagggtccccttacttgccgtagcaatttattttaatctagttttccagaatgctgaaggacaaaaatggcttctatctttagtaattcatccttgccccatcatgagacacatgacttcaatgtcattatatcatagtttcacctgctagggaaggtcaggctggcttcctgttctctactaggaaaacacttacttacatggggatagaaagttgataaagaagtcatggggagtagactacgaagacaaactgagaatatacagtttgatttacttggaaaagcaaaggtgctaggtgacttgaatagtgtttttacacagattaagaggtaggattctgccttttagagttagaattctgttctcaatatctgttgaagataaaataagtcaagtgtaaactgttagcatgataaagcacaaaccattcaggctttgaagtcaggcagagtcggttttaatacctgctccagctttactttgtgacagtaggaaaactgcctaacctctctgagcctcaattgcttcatttgtaaaatacgagttgttttgaagattagagaaagcgtaattaaaggtctggaacacagtaagttaactgataaaatttctgatagtacttaaagtagccctcagattttgatggaacataatgaagaattcccatggtatcagaaaagaataaataaataatgctgtgaaatggattaacgaagatccatagttctgctttcctgaatcccttagagagaatagagcccattaggaaggacacacacataactgtctgccctgagcagtaagacagtcaccagccttcaggccagtagaggaacgagggcctcagcacttgaactgagatgtcatcacaattcctaaccaaaagcaaatccttcaagatgcaacagtctaattctcaaagttaaagagtggctctaattcctacaacatagatctaatgctggtcaacactagcttatctagcctacttttctgttctaaatcatgcctcagcaccttcattctcatgatactcagtcatgttcctgggcaggggtcacgccttgtagccacagggcctccttgatgttgcacagacatgcctggcacacgtctgtctttgcacttgctgtttctactgcccagagtgcatagttggtagcttcttttgcaacattcatggcatcttatcaggacaccatccctattcacactgtaaaagtgtcttccactctcactctacctcttaatctgatttatgtttcttctttgcatttatcaataattgacatacatatttcttgatgcctttgcagtgcagacaataaatggttaaagtatgttcagatggcaatttccaaggatagggtggctgctcataggaaagcacttatttagaaatcaaattcaactttagaaaaacgaataaaaactcagaaaaacaatgactcaaatgggagaaaaaagcaaagaaaataaaatatttcaagtgccaagaataaaataagcaaatactaaatgctattggagatacagaaggaaggaaaaagaaagaaatagtttaataactaacaccagtaggttggaacccttgagagagagagagagttgtatctagagcagaaattcttaactttaagactttttgaaaatctgaagaaagatatagacctctctccaggaaaaatgtgcatctattcattcaaacacaattttacctacaatatctggaacccctgaaaaatctatccatgtacttcaagctgaaggtcttaaaagcccttgcatgccatggcctacctccagaaatagcctgtcatgaaagtcctgccccaaagaatcaccaccaagacaggtctagaggcttctttacaaaaggctagcttcatttttgatctccttatcactaacaaggtcttctgttagcccatagtgcagaaccttggaaaaaaaggcaataggaaatggcttgcaagcacattctgctgacctggacatgtaaaataagctaatgggaaggaagaggatgggccatctgaaatgaaagtagtaggtattcattcctcactggctaaattttgaaaatgacggcctttgtcttgttataaacaaagaatgatcaaaaggagagcatttgacatgtagtccataagcctgagttctactacgctctaccactaacaagtagttgcttgaccaaaaatatattgctcaattttgttgtctacaagctggaattttgagtgatttttacttttctcagtacatacaatttttaaaaattctgaggtgaataccattttattcaaatctaaatatattttaaatatacataagtttagtagagaagtgattcataagtcattttgtaaagaaaatgattgccataactgatttttagcataaatctggattttaatataatgtactgcacatttcacaaaatggtttgaaataaaagtttttggtttatttgaaaattcttacagacagaataccaaagataacccctggtaatctgtcatttgaatgtaaataaatgccctcaaactataaaaaaaaaaaatctattaaaataaacagtcattgcaaagcctacgcacttatgagacagatgtgtcacatttgtggattcaatactgtctatacaagatgaaattttctgattgaataatcttagatatagctggtttccctacccattttgattctctcctaactttccataggtaacagcttttaattttatataggaggagtgagaaagaatttcgagaaaagaaagaagtatcaacaagagaaatgacacagtctctaaggacatttatagcaggagcaaatggtcctataaacttcagcaataagagattcactatataataacctagtcatagtgactgaggctaagtcatcaagaaaggggtgttctgtaaactctcttttctaaagcaggaagcatctgatatattttggaactatttcccaggagaaaaacagttacattttttttcacactgttttagctcttaaggtagtaattttctgaaaaaatgttatttgtctacaactccttgtttcctgggaatgagaaatatatgagatatcactgcaggtgctgaagccacctatagatacttatcagagaaaaatggcaatcttttaatgataataaattaccataaaatttgttttaagtgactcaattactaaatatgatgtggggaagaaaacagcatgagggatttgatctggtgatttagactatgcaacaaagaatttgattcttacgttagctatccatttctctttgccgaagtgtacacagtggcggagcatacaggtgttttctaaaaggcaggagccatcaaccatcagcaggatgtgagggaagtaatgtcacatagaaaagaagtgcctcttccccagtgattcttacctgtttctcccagaatctctgaatcctttagcaaaagggtttcggtcaatttttaatctggtaatctggaaacaaacaaataagtatgaattgcttttatattaactgatttctttcttagtactcctagaaaattacaaaaatcacttttttaataacagttgttgcttttatttaatttcctttcagctcaagatttaatttgaagctggatatagaacttggcctggcacacagatgtctgacccacccgactcacttctctataaaaactaaaatttgcccagtatgtgactctaaaaactctctcctactcaccttccttgccccagagtggtggtaaatcacttgcctagacagatattgaaatggaaaattggtcaatggtcacgtccatggtacatgacacacgggaggcacttaaaaaatgcttgttgaatgagtgagtaaacaaatgatgtgtaagtgagttaataattaataatggactcagtcaattcagttaggtggaatcagaccacaagacaatctgccttagcctgaaagacccaaaaaattgactgcatttgccatttcactgaaggcatgcctttcctaccactagaaattattcatttaatgacttgaaatgttcatgtagaagacagaaaaagcagacttttgccagggtcttacccaaaggaaaatctacaatgtgagactgaatggggcaggatgcagtacatgttatccagtctccaagactcacaagcaaatcagaaacaaagagccagtttcataaggctgaccaagctagcacatccaattgtgtcaccagcttggtcctcaggggccatgtggttcaacccccactcaatgcataagtccccatccattgcatcctatcttagttctggcaaaccctgccatggttgtatatattgccctcatgcctgtagactagaacaagcctgaacaacatatgtcacatgcactctagtgtttccactttcagccttggtacctttgtgtctgaattgttaatgactcactacatgcaagcaatggagacttaggcataggtgctagggagctcaggaaggaaggaaggcactcccaatgcaaggtgattctagaaataagggaatctcattatttaagaccatcttcatatttttgataattgtagaacgtatcactaggacagctaaagttgtttcctacattgcaaatctttcctagttctctttcacctcattttatcagagtggaatttcccaagaccgcagtctttaaaggtctttcaaagcaatgtgagattctgacaaacagactctgacttgaaagagtcttccaggcttcaaggttattttcttcctaaatattccttgcctttaaaattgcacactaattatgcagcaccaacaatgtagcaaaagcaattttacatgtattttatagaccatagcaggagtctaaaggtttggctttctaaagtcgagtgtctgccatatgaatactgtattgagtttaaagagtgtcactgcttttctgtgtttgaccgaaaatcagttctttcttcctccataatccacagcaataaaccatgcaccatattttcttttcaagttggagttataatattttattttctctttcaagttggtttatcctgtccaactcatttatgatagggatttctgacacatgactgtgataccatgttttgggggtctccacagacccctgtaaatataacagcactctacttcatgggcccgggggaaatggttaaaaatatatttcccacagctcattggatcccaggccaatgggtatgcatggaaatttaatagcaaatgtctcaagtgttagaaaaaaacaatatctgtacacttgttttaaagcttttaatgtgagaattagggagctttatgaagagagtggttgtgccacttatcatttatcatcaagtgccttctgtgtgcaaagcagtgtgacaagcaacacaggtgacagaatggtgtacagccagtgtatagctgtgtgtcatccatttttcctcaaggagcttataatccagaagaaagaagcagatgtgcactaacaattacaatataaaaaagaaggtcataaagttcacaataaaggcaaagtaccctgaaagcttagacgaagtaggaattactccatgttgaagggctctggggtttcatgttagagacagcatgtgagctaggccttgaaagatgtgtaggattttaatgaaaacacaagagaaggaaaaaggacaaaggaagcatttcttaagaaaggcactatgtaacacaggatatgaacagacacttcacaaaagaagacatttatgtggccaagaaacacatgaaaaaaagctcaacatcactgatcattagagaaatgcaaatcaaaaccacaatgagataccatctcacgccagtcagaaatggcgattattaaaaagtcaagaggccaagcgtggtggctcatgcctgcaatcctcatactttgggaggccgaggcagatggattgcctgagctcaggagttcaagaccagcctgggaaacatgatgaaacaccatctctacttaaaaatacaaaaaattacctaggcatggtggtgtgcacctgtagtcccagctacttgggaggctgaggcgagagaattgcttgaacccaggaagtgggagctatggtgagctacgattgcaccactgcactccagcctggatgacagagcaagactctgtctccaaaaaaaataaagaaataaaaaataaaaataaataaataaaaatcaagaaaaaacagatgctggcaaggctgtgaagaaataggaatgcttttcactgtcagtgggaatgcaaattagttcaattattgtggaagacagtgcagggattcctcaaagacctagaatcagaaatagcatttaacctagcaatcttattactggatatatacccaaataaatagaaatcttctattataaagatatatgcatgtgtatgttcattgtagcactattcacaataacaaagacgtggaatcaaccaaaatgcccatcaataatagactggataaagaaaatgtgatacatatacatcatggaatactacacagccataaaaaggaatgagatcatgtccttggaaggaacatggttggagctggaagccaatatcctaagcaaacgaacgcaggaacagaaaaccaaacaccacatgttctctcttataagtgggagctgaatgatgagaacacatagacacagggaagggaacaatacacactgaggcctgtcagggagcaggagaggaagagcatcaggataaatagctaatgcatgtggggcttaatacctaggtgatgggttgataggtgcagcacactaccatggcacacatttacctatgaaacaaacctgcacatcctgcatatgtgtcgtggaacttaaaataaaatttaatttaaaatttttaaaagaaaggccctatgtaagcatgaatatcaaagtgggaaagaataacacatattccagaaaccttagcccatgtcatcatcatctcttgactgaactattctatgtagccttagaactgaactcctttcttccattctcgtccctgtacaatctcttctctatccagcaccccatttggtcttcgttaacatgtaactggaccatgtcattctctttagtggccactaccgctcagaatttaatccaaattccttgtctagctttgcagagccagcaggcccttactctggcctgcctctccaacccattcacactcccttgccttgatccacaggctcaggacagactgagcaactcagccagactgagatgctcccagttctggaatgtgccaagctctttctgtgttcaggccactcacatttgctctacaaccaaatttgaaatgctcatttctctactttgcacatagctgactcctcgtcctaagcctcagtcaaaaatattatctcctgagagagatcttctctgatcatctctccaaaataggatacttctgctactcttcttaactgcatccttttaaattccatctttgctcttaacacaattggtaattacacatgtatttttgtatttacatgtttactaaatgtaactccccccggaccacaggtaggaaccatgtctattttatataccatttaattaagcagaacctagtgtgacatgctcattgaatatttattcaatgagcaagtgaatgaataaatgatgatgtgagagccagggatcaagagtcccaaaaccatgataagcttcagagaatctagaccaaacaatgctcttgattctatttgctttcactggaggcattagagacaaaaatcctatactaatagaacaaggtctattagtaatctcctgtgcgactaaaacaagtctgctagtctacatgtccaaactttgtccagtgataatgagaagacagggaaaatacagaggttgtaaaagcattttactttactgattttatttccataaccttatactaatttgtgtagtttgaattatagaacactgaggcacataagggggtggttgccgacttgccaccattaatgttaatcattgtcacggacttcttgcctagtaacatggaggcagttaataaatgaggtatacttcacagtgcaccaggcagacataaatagcacaacctgaaaaggaaatgaaacttgaatatcctgagtatggttttacagcacgaaggctgaaggggccttctcttattaacactcttcgttatttttatttcatactatattgcttgaaaggttttccataggggggaaaacaaaacaaaacaaaaaaccttagcccatatgaaaaagattccacactgatttgagccagcaaaatggctctctagtttagaccataatgagtggctcagaaatcctattggatttgctcacacaaacctggctgtggtttccaacttcctatctggttcatgtagccaattctcatcaagaaataagactgtgttacctgggaaaacaaggccatgtctttttgaaatctagtttcctgttcgaaaacaaaaatcaacgttcagcattctttttcccccagagaagacaaagactttgcaatggaaatttcttgctaattctgtgaggatatgttggcatcagattcttctaagaaaaagcatgaagtgttgagtcacctttattcccacatctaccattttattctctttgaagagattctgggcatgctacacctttctctctgccataggcctgccaagttggcacatagagagccaataatagtaataataacttcagtatgctagcagccctaagagtctattggtcagtaagcaaggatggaaggaaggaatggaaaatggggaaagaaaagcataacatattccatgaaaatagaaaagctctctttactactacttacacccaaagaaacagaaccacagatatataaagaaaccagtggtagagtcatgttggctaatcattcattcagtttcatttcagtcatttgccaaccatatatattcagtgctatgcaatataggtcagacgcaaatatcttagaattacagaaatgtgcttcagaattttttaggtcaattctaatccccctcccattatttgagcaatcaacattacatccgaatttttcattctaccaaatggagacagttaacatctatctactctctcttgtctcataatttcataaaataagtgacatttttatatcaaaaaagtaggaaagacaaaataaaatagtctattaaattgaatgtctacattcataaaagtacccatatttctttatttttctcatttttcagtggaccataaaaaacttctccatagactagtactgattcagacaaaatcatcaatttgtaaatgagaatactaaggtagagtgatttgtcaaaagtagtacagtccgtcaattgcagagttgggtctagaactcaagtctcctaactcccaacttcgtgttttctacatcatactgtttatttgtaaaaggtacaacttttgttctcaaaaagctcaaaatatcaagaggaagattggacatgcaagccaaagttgcaatgtgatgaggtcacgagagagtgcagtcccctaacagttctaactggggagagctcatttgcagctgaaaaaaggaaaggaagtggtagggaatggtattttcactgaatttttgaagagtagaaggaatcaagacaaataaaaacaaaagggaagggcattcctggaaaagaaaaagggacatacaaaggcaaggatgctgcaaagttcaggcaacagtaaaaatctgaccagattgcgacactcttgcagatgtgtgaggaggaataacagaaattgagcctagaaatgtagttggtcattagccacagaggacattattggaaagactcggggtccagcacttgactccctaggcactgaggagtcattgacaatttttggcatagaaatggtgcaattatcactgggctttacaatgatgtataggatggcttgtgagacattaagcttgcagtccaagtgacctaattggaagctatcataagaacccaaggttgggggaaggcaggaacagaacaagggcaaaatcaatcagattagaaagaagaaaatattctgtcagtagaagcaaaagacattagtgacagactggatgttgtgacaaccaggtgttcaacctgggtgacaaaatggaagttagcagaaacaggaggtttaacaatgctactaataaccccaacactttgggaggccgaggtgggagaattgcttgagcccaggagttcaagactagcctgggcaacaaaatgagaggcaatctctaaaaaaaaatcaaaacaattaggtgggcatggtgatacccgcctgtggtcccagctacagtcagaaagctgacacaggaggatggcttgatcccaggaggccagggctgcagtgagccatgttcacaccactgaactccagcctgagtgacagagcaagaccctgtcccaaaaaacaaacaaacaaaaaaataaaaacaacaggagaattgaaaagagtcataaataaacagtatcttggggaatattttatttacaaaacaccatgttcatacctctcaagtgtagacttactaaaaatttattggtaaagattatctggtgaataaaaacaattttcagacatgaacattctaataattttcagtagttgaaaatcgtgttgattgccttggtttgagaacaattgctcccaatcctcatttaaaatcatgcagaaaaaaagaaggataaattagaattccagagctttcagggaccttgtaaagcacaggccaattcctcattttctaagacaagaaactgaagcactgaagcacaattattgtaaaaatacacaacttgctcagagcaacatgtgtaactcgtagaaaatttaagactaaaacccaggtctccaaatgtctagcccattgctgtctgtggagcaggacactgcttttccttagaaagtctgggtaatgttccatttccattacattccctctattgtcttttcttcagtgtttccccaaacaagttcctaagaacaccaaggacctaccactaaatttttttctctttactatttcacaggcctcctaaccgtttccttaaaaagaaataaatgaagtaaataattttgacgtactgattgttctcattctagaatgttatgaagaataaaaacacagtaagaggtgaaaatagctcacaaaagagaacaatttatgctacctggcatcttcagaacaagtccgaaaagtatagttaggtaacagctctgacctacaggatgcaaacttcaggattcctgggggaaagacccgaggttattttgtattactagaaggtactgtattatattaaatcatatctgcgcagccaaagggaatgttaaataagcatgcttgttgatttatccagggattagaggcttgttaaacaggcaaaagctgtcatcttgatcccaaaatgggcagaattgagtatgactcatctattttgcatgtcagcacatcatgaattcaccaatatgacatgacgacagagagatcaaagtagttacctatggattataattcctttgagagccattgcagctcctccaatttcgaacaatgcactttttccttaataagcaatctattctttaaaattgcttctatgccccgcttttcatgcctgttcagacccagccacggagcaatgtaggctgactactattaattagatgtcaggtttgtgtcagtgaatttatacacgtttccttatttagtcctcatagctctacgaggcaggcgcattttcaagaccggaaacacaagttgaaagaaattaataccacacaatgtcagtgaaaagatcagaaatcaaaccaagtttatctgctgccaaattttatgatcttaaccatggtatcctgctcccacttcagcccagatgtaaacaaaatatttctatgagtagaatgtactcatgtgctagaacactgtctataaaagaaggtaaaggatgtgaagaggctgtcagaaacccatgcttagtcctctttcattgtcaaagtgagttgtagctttctagtttcaacttgggttacaataatggctctcctagtctctgtaactgatctcaatgaggcagtagaatgtttgttcttcagtgttctacaaagtaaattctgatgttgaaatatttattgtcacatcactgccttcatcagaaactattttaaatggtggctggagtattcttaggaaagtctataatcagttatccaaagaactcagactcttactccccttcttctgagccagaactaatcccaaagttctggttgctccaaagtccttgtctatgttgatgctatatctcgtatcagagcttgaaaaatcttaattattacagttttctgtatggaccctccatggcttctgcagttttactatctaaggaatttgagatggtttaatagcttcttaaatagcacccaaaccaaactaaagctcttcttctattttagatcaaatgtggcattcacaaggaaaatctgaagttgaaaacactttacagctgctgagaactctaacactgtatagtacttaacatttagtggactaagggttgttgtatgtcaaattcccctgaaagtaaataatacctaaggaatcttatgcagaaggaccaaaaaacagatgtagcagaagactctcaagggccacctcttacctgctgattctgataggccgtaactgtggtgaacacagtctcaggaaagttgaacgttttcaccccatccccaacaggaacaggcttagtgggtgaaaggtcactgctgaagtctttgcgaatcacatgaactcgaggctggtatttgtgcatagagtgcagaatgatctgaaataaaaaggggaattgtaccaggcttggctttaaggaacctacattttgttctcatgcaaaaataaatcactaagttgaagcactataggaaaagcacagattggaggtgagatgtacagaaaactagaaatcagtatacttgcccaggaagaactaagtgattaaatagcattacatggaaccaaatagcaggacatccttatcatagatggtaaaagtaatatgtttgcttcaattggataatgctgaatgacttctttagtaccaatggacatgtcactaaaaggtttcagaacctctgccatgtgacaagttgttccctccagcttcaaattttcagcatgtattcatgctgtctttaaattctacatcctattatttgcattcattattgaatatgtgaacattattttgttatgtgagagtaaatggtagatatgggttttcactctttcagaaaattgttatttccttgaagatggaagcaatggttttagcttattcaatcttcccatagcacccagtatgggtcctgccattcagtgaaaattcagtatgtgtttcactgccaaagataaattaataacatcacacgctccaattatacctggaaagccttaagatttagtcttccctataaaaaaattcttgacaaattagctgaaactgtcattcacttgtttctcttgttttatagccttgtgggttattctactgaatgttgtgattttttctaccactggttgatttgtcttgttttgctctcttgcctcctcgactagactgtaagcctctggagcacaaggactttgtctggtaaacacaacttgatgtataacagatgtttgctaaatgttagatttgtaataaatggaatttaactggaaaaaaacacttttatgcttacttacttaaaattacttaaagtggcatagagattccttattttacctatttgaaaaagactggggctagccagctctaaagcaaacagaggaagagagaaagaaaggggagataggattctttgactcacatgtccttgatcatccaactcattgttggtaagcttgagtttgtcaaaactgaccacctgtctcatccaggtgtctccagaagctagagaatcagggtgtatataaactcttgggggcacaggggaatcagcattgccagccaccatccacttggagctatgatacacatatctgagataaagaggaagagaggaaaattcagagacagaggcagagaagggacagaggcccaggaaacaagttgagacaggggaaaggagagaaaaacaaagagattacatgaatggagaagtaatgggaaagaaacagagactcaaaggaggaaaagagaagggcagataaccagggaaatgaaatagagatagaaatggacaaaaagatggagtggggagggcagagaagtgttgtggttaatgatcaaatcttcagccctcgcaaggaaaacattctcacagccgtcttcctttcttccctctctccatgccgtgcacccctgtgtgcacacatgcatcctgaactcacatgtctagctatagaaaaggcattttactgcaacctttcacctttcaaatgcaaaccatataatcccttggccatttgttcaggattttgttccttattaaaaacatcttccatattgtcctataaaatgcagccatgtgcagagccctcccaagcctctcactggttaaccatttccttgctaagaatctggactttgaggcatttctatgacgggcctttgcctctctgcaaccatttcagaagcaccaccaaatactcccagttcacattgcctttgatgaacccgttttgaacaccatcttctacactattttcccacaaagtcactggaaaaaagacattgtttggtagcaaaggaagtcagttttcccgactttgccaattttctcatagctcagaagaaacatctccatggatctggtactttcctgcttctcagttctaaaggaccacatgggacctggaccctgagaaatagaggcacccagtccaaatcacaactcccaagatcccctaaaacacgctggaagcatcttttctcctaagtcctgaaatccagaccgtgtctctctcagccatctctctccccacttgccatactagtcctggcctttttcatcagctcttgcctccctattcatgggtttagggccaagttgttagacttcagatatttcaaaaatgagtaatgatttactgatttgagtgagacctcaagagaagaaataagccacaactttttttttttctggcaagaactatgtataagccatccaagagacatggagactatgttggcttttaatcagtttgagggaaaattacttaacaatctcactcacaacccatatcaatgaataataattctccataagtagatattcttcttgaaattttacccagttctcttgttcttcctctccatcatctatggggcgatccatcaaatatacattttaatatgccttattgttccacctctccttcctctttccaaaataaatcaccccaatttatttagcatttcacaaaccaaattattcaatatgttaatcacttccaatgttaattaaattaattttagacttaagatccacttgatttttgctaccttaggagacactatacaatcccattctatccagagacacaggggggaatcccaggtcaaagttaacactttttccacctggtgctctgccacaggccattgacatagtctccattccttgttctctgtacagcatgcattgctaaactatttcctctaaggagtttgaagaattgtcttggaatgctggtgatacccacatttccacatcccagagttattgttacctgtatcttttattgtccacaggcacaatgtccattgctatgtagtactgctgatgtggatctaggccagtgattttcactctcatggcaggaaacatcctcctatgaagatgaataaaacagaaagctcagaaatcagggtgggagaagtagcaggggtaaaagcttaaacaatgtgggtttttttgtttgtttgttttcttgtttgttttttgagatggagtctcgctctgtcacccaggctggagtgcagtagcacaatcttggctcactgccacctccacctcccgagttcaagggattcttctgccttagcctcccgagtagctgggactacaggcatgagccaccacgcccagctaatttgtgtgtgtgtgtgtgtgtgtgtgtgtgtttagtagagatggggtttcaccatattagccaggctgatctcgaactcctgacctcgtgatctgcccacctcggcctcccaaagtactgagattacaggtgtgagccaatgcacccagcctaaacaacgtattcttattaggtactctaagcatatcaaattctaatgtcctctaattctcaaagttgactaatttttttcactttggaaattatcactatgaaatatacaatagacttatactactgaactactatctcttcttaacttaaattgacctatttgatgattcatactctccaagggttcaaccctgctttgtatttttagttaatcttagttgtgatataaatgtatgcacaggcatgtgtgtgcatgtgtgtagccatgcatacatttcctattagctataatctttttaaaggttagtatagcaacttacactcttcttataatctgaagagcttttcagtttattgcaagttatcataaaatattttcaactgagtttatttgaaaataaccactctaaaaatagtctctcaagtgtaaaagaaaaaaaggaaggtgctaccagtctccaaacaaagagccaccaagattttttagtgcataaaactgtagaaaattttctgcaagttctcaggctgtcaacgtgtgtgtcagaggaaggaccctgtggaattggaagcaaataccaaatgaattctcgtggcctctgggcaataccttgtttctaccacaatggcttgttaaacttgccaaagcaagtgaggtcaggatatagcactttacgacttctctcataattgaagagaggaggagacagagcagcccaaaagaggtattgagtttcaataagtctagaataaagttcaccattcttctttaaccataagaaagaagaaaaacatcaagctcaagctcttttgtatcaagccggacataaaaagttctcagttcaaaaatttggattgccctgaatgtgctctaggctacttgtatgcaaaatgctgcattaagcttaaccatctggggctagttagttgagctgggcagagcacagtgctaatgaggtcaaggtcacaggcttgatccacatatggcctaattggctttgctccatttcatggccatagaccataccctgacctcaaacagccatcttgcaaatatgtactggttggtcacaggagaggctctctgtgctagttacacactcactactcatccaggagaagcaacccaaaaggctaatatcccctggcagtaggtcagtgacatcataatcatatctgagagaaagcacaagaaggatcacagtcctttaatagagatggtggctaattcttatatggttacaaaattaatgcataactatttcatctttctcaccttattactcttcagaagcttctaggatatattatcatttaaaaatttctccccctacctcacaatttttatttaaaggcctcatacttttgtcttatggtgggctaatgaaatttgatgatgggatactcacattgactaaatctaacattcactataggttaggcactttaatttgcattaattaattccaaaaatttgggaaacttgatctacacatttaaatacagataagtaattcccttcttaataacactgatttatagcttccctgtatatgtaaatgtttggagggcatcttgccagagatggggcaaaagtcctctcatttactacctgagataagaaaatatggtttcccccagtcacctagagaggctgtattacacgaaagagagagatttcttttattcatacctttacaaaaaaaggtgttagatgtttttaattcaatatctgttctgtctggaaccattatatgacctttaatggagaagctacccatccctttccagtacctgacttctaaaataaatgaactatgtgactttggataaatcatttaaccccatcacctataaaacaaaggaaatcgactagataatctctacagtgcccccttgctttaaaattctgtgactacctttgaattctcttcttaaaaacttcgcaagccttttttttctttttgtcacattttagcatagaatatcaagtgaagtcacaacagtctaaagaaaagttaacctttcatgttttacaaaaagagatgtgtttggttttaattttatggctaaatttaggccagttcttttgtcttctaaacccattaatccttgcaagcacctctgtccatggtgctgattatgcaggttgggttggtacactcaaagactgagggctctatagacttcagcagctctgaatcaataggatcacagtttggggtgtggaaggaggtagatggtgactaagatcatctaagtaagaaaaaggagagaaagccatatataactaacataattaagaagatggagattggaattaaaatggaaaagaatactgacaatactgcatagcaagaaaaatgagtgagaagcaagaaattaaccaggagaatgagaaggaatgaagaaaattcacagaagagaaagccttatttgtatgattcagagttgtttcagaattacctgagaagaattagatgtagtaacaacagttgagacaactgaatacagaaccaattaatgtagtttctaaacttaaacaaaggatttcaattattactaaagaacaaactatgtgtctgtcttggggaatgtgtagagtatccagatattaaggtgaacttgtgaaatcagggatatggaaatgaaaatactgcagaagaattacaaaatgagtcacaagaaggttgtcaaggagatgctcaaatgaactcaattcactaaagcacagggaataacgaagtgatatcaggaacaaacatgactggaatacagagacccaagagtaataaagtaaaaacccaaaaagaataccggaaaatcttatagacaaaaaaaaaatgtaatatttcttctctctccaaaccaactcttctaccaaaaactttaaaaaaatttccttgagttactttgttttcttccaagcctttacaccacaaaatgtggaacagaagtacactgagacccaagcaacgaaaaagagatgatattgaacacagttatccagcccatcttctccccctaggaagcctttaatggttttattcactactgagagaaggaagagagctccagaaaagaaagaaaataaacaaaatttcagatttattttaacttcatgtttttgtcatatcttattgttttgggaggtttccttatatacacgtagataaactggacccaaccaaaatattattttactttaaatggctatgttcatgaaaacagctcacaatcagtaagatgcgatttttgttccccatgacatgtgagattatgtacactggctttgaaaacacaaaagtagcataactgttttgcttaatttcaatgaactattcctatatgctgaaaagcttagtccaaatgtatttatttatttatttgtttgtttatttatttatttttgagacagagtcttgctctctcacccagggtggagtgcaacggcacgatcttggctcactgcaacctccgcctcccagcttcaagcgattctcctgcctcagcctcccaagtggcagggattacaggcacccatcaccacatccaggtaatttttgtaactttaaaagagacagggttttgccatgttggccaggcttgtctcgaactcctgaccttaggtgatccacccaccttggcctcccaaaatgctgggatcacaggcgtgagccaccgtgcccggcccaaatttaattttatctaaatcgtttcattttgaatccaaggggcaagaactacagccatttcttcacagttcagagttgagaccactgttttagagccacacagatttatgcagaattctggagctgcctcttagtacccatgtgccttagccaagctaattaatgtctttcatcctctgcatcctaatccatatatgggatgattatgtccaacctcatagggttcctgtaagtttcaaagatgtatgttgagtgtccagcacaaaataaatacttaactatggaaagttgaaacataccaataaaggagtagcttaactaaaagtgtctatatcaagagaagctgtgtttttaaaattttgtaatcctagaaaaacagttttacaagaaattccataggtcaccaataaagttgtgtaataatttcaagtcaatgataaaacacaatggacatcaacaggctcagaatatgcatcaagtcaattcttttttaaaaattactacaaaagcattgttgctttaaatactttagaagatgcaagttgttatttgggaagcaaacttcttgaaagtatttaatggtgaagtaaacacttgctttggaaatatatattttggctgttaagatcccatggacttccaatattagctgaaatacatttgtaggtggaaaatgtttgtgatttacatgacttacatttgattggcccttggaggaaaataatacaatcacaacaaacacaacagaacaactttaccaagatgtccaaatgcagagaagtgagtgcaagctgctttggttttgttgatgccatcacaaataaataagaatggaagaatgtaatggctcctacttctgcaaattctttgaatctggccactcaaaggaatttgtccttacctgcctgctttggtgatgatcatttcagttccaatatcatggaaccgcttccagaggtcagcacattgcagctccacctgaatctcctccatggaagacatggcagcaggcacagggcctgcagcaccagaggccaggtcagtgtgagtactgaaggagcaggaagtccgctcagtgaggacctcagaatctgaaccagtgctctgctcagaatctgcaaaataaacaatcaagccttaggtgagaaactgctgagctcccctcacccatggccctaaaagatgggggtgggaaatgcaatgaagtggggagaggggtaaacaaaaggagacttaaagctgggaagctccagagcacagcactcagggtattttattattttttatggtttgtttttgtgatttatgaccttctttcaggtttcgtgtttccaacatgacatctggcattttagtaagttttagcaacagctgaagaaaattggtccacaacaggcaatataaatagtactaatgtcaccatgttgaagagaatgaggccaaactggggcaacaaaataaatgccatattaaactaaaataattataaattacaggtccaaacctagattagactattacatttgtgcaagtaaagattcagtgcaaacattatgttcttcaattccataccactcagcatcactgcctgtcagttatttttaaacacagaaatttttcctctacttacataagccatggccatcaaaagtaatgaaaagctgcttgggatctttagaagtactttgtcatatatttgagtaaatggtttttcctaagagtctaatcaggccattttggatgggaaaaaaacctctgttgtgagtcaaggatgtaagcatatggaaaaagttacccaaaaaggcagttgaaacaaagggaataaatgagttcaggagacaccttgattggtttctgaagtatgggcagaggggaggggtgatccaaacaggaaggtgggattgagagcaaccaaataaaaagttggcatgctggtccagatggtcctttcctgtgtcttctgtactcatgaagacaagtggggctggggggcaggggaagctgactgatggagaaggctagagccagatttacccgggaagatttactggaattttaaatatttacctttaggagcttaatgccaagaattgtgtgtcctaacatttttcaaattcagattatctagtataattttcttaggtcaaatgatgctgcaagtcaagcctaagaatccatttctctaacccacccttaacatctagaattctgattgctttccttggagttaaatatattcatgagtaaaggctggaaacaagtgttgtactctgatgagtgacttttcaatggtgtcaagggtcagagcttcttgagcatcaatccttgacactagtaagatggaaaagaatgggacagaatgcccaatcacgttgctgccaacctcacttacctgcagcaggtttgcagacctgtgaaagatacaccccattgttcctttacttttctttccttttgtcactgacttttttctcttgcaaccccaggcagcatctctggcaagaatatctaacagctgtgtcaaagccacagggaataaagtgcccacaggggaaaaagtgtcatttctctccatctccctaattcctcacctgtcacttgtgaagatattcaggttgttaaagaaccaaatcaaacttctaaataaaggggaagtttctgaccaaaaacttcagtttacccataatcactacatgaagatgtagtcactatcttcattctccctccccctctgccccccacccacaaaaaaaaaaaactataaagttttataactaggttttacatgtctaagcacataattttatacctaggactaagtagcagctatttttggtcttctccaagcactgaaaagtagaactacttatctaagatgacagctgttgctgagtgacaaatctatatcctagcctgattctataggcctttcagtagcagagccattatatcatcacacactcagccaaacacactaattcatgtcccctgagacatggattcccaaatcctattttgtgtctgggatattttaagagctcctcacttatcatgaatactgtaaatttttcaaaaaacctcctcagaaaaagatttttaaaatatattattgtcctgcttttggaagcaaaaagttacaaaattcaccataaagtgccacaattacaaaaaattggaaagagacaccttaagtaggacccaacagaaattttggacatatgatttctccaatgtatgtttaggaactggaaaagggaaggaaaggtatcactacactaagagataagtattaatggtagctaaattgaggctgagattggaattgggactacggctagagaattatgaaataagagactctacccttaactcagtatgtcatctggaacaaaacagggactcaaaatgtaacatcaaatgaattaatgaataaccttagacaagccatttaaccacagggggggcctaggtcctcaatgtgcaatgaaaaagaatgaacttaaggattacacctctaatgacctgaatgtaagaatcctccccagtgcaagtgctaacccaggtaacctcaattagaaacatcaaatttaaaactctttgaacaagacaagttaaataagggaaaagaccgggggctcagattcacattaccataggagttaaataattgagtgggtattctataagggtttatagtttcaatcaaatcaatcaataagcacctatcagcatatggccttagatgaagtaccatgcagataattagaaacagaatccaagaccttaagaaatttcccagttagtgttgattaattatgtgtttattgagtgcttactatgtgcccagcactgtgctagattctgggaaataacaaagtacacaatgggacctctcttcaagtacagtacagtggagactatgagcattcaaaaataatcagagagcaacacaaataactgccacacagttttccacaccattacatactgtctcagatgtctcttagaagtccagaagagaaagagatccaagagggctagaacactcctggggaacccattgttactagaaaggaaatgggcaagtctgtggaggcataggcagtatttgtccatgaagaggattttcaaagacatttatttaactggaaataccctgaacttctagattttcactctctcacaaaacaggatccagtgacttttatataaagaatgtaagcaacagcccacatgttcaataacatgaatgcatatgcaatcttctattctcaattgtttcttaaatattataatcttgaaataaagttactgttacttttatagatgctctttttaaaaagcttctagaagggttagggccacccgtggggtaagcaaccctacaaaacccttaaaatagtaatctcagagtcaagattaacagcctaggtaaaaataaaatttaatcttttgtaaaatacatttctaaatcatagttatagaaaatattttggctaaccagatcaaaatttttagctattaattaggatgtataataaagttatctaagtcatggaagaaacacacagctggttattttaatcaaatcagatcatccatttagaaatataatcagtcagtcccttaaagatcaaaaaacacctctgtgttttcaaggtcatttattcttggcaatttgtgacttcctgtcctcaaaaaatagccattaggaactcatatgaatgatgcaggatttcttggctatcagatactgtcagaatagtatttcaacagaagaagtttaagtaaatcaggaacataaaatgttacatgtaaccaaggcagctaaaggagaaaacttaagtaacctgcgctgagccagttacaagtcactagagaacattttgtgactcacagggccaaagcaacatatctattctcatccccccaaaaaaatcctttaaaaagatattttaaccatcattttactttctatctctgacctatttcactttgataaaatgaatgctgtaacactaagttcccacagaaagttgagtttagcttaaagtacgttcacttctcactctagcaataataataaaagaacttttaatttatgttttacacattacctaatattgtcttcccattgataagatagacatagcttgtatttttatgtctattttgtggacaaggacactgaaacaagagaaattgaaaactaacatgtactagaatgcacatcttctccatcctgatccaatggtcagatctccccaaaagcacactaggttcaacccagccaaaacagctggcaactctgtaacaccccctaactattttaaccatcctcacaactaaggtggcttaaatatgtttgatcttggccaagtcacatgactattctggtccccaatttccttaatccttatggcacagcacatgcacatttaattggaagtgtataaggtcccttttaacttgaatgtctaatgggtggattagtagtacagcttagagaccaccaagtctaacaaaagcgaaccaactacaataggttcatttggttaccatacatagaaaatgcctaaattgcatacacttttagtctaataaaaacttaatatccaaattagacattttaaaagcatattttacagtcttggcatctccacttaacagttaattttgaggaattattcgttactgcagtgaacaaagcacatttactcctgtggctctgctactgatcagcagtgggatctttaaaagtttctttggttcacttggcctaagtttccttatctttaccatggggggtgggggtataagatatctttctgctaaaaaaagttatatatttatgataaagcatagtgtaatggttctattgataataatattattgacttgggacagggagatgaatataagctcacaagaactaacacaaagagttaatggtcaacattattgagctcttactatttgtcaggcactctgccaagactgtacatgcaaaacatcacttagtacaggcaagcctaagagttgttattattattatctccattttatacattattgatgccagagtccaggttacatccattctactgcctaaggatgtccagcacagaagactacatttaattcaatttttatgtcaccaaatatttctgctttgccttgactaggttacatattaatggaccaagacaaataaaacaggttcttgttctgaaggagctcacaatttggtagaaaggacatagaaactgttaaggaaggctgactgtgacagatacgcctgcagaggtggggaaaattgttgaggagctttgaagtggaagcaagtcaatgatgagaggattgagaagactttatgaggtaacatttgaatatggtcttgaaatagaagtttgaaaccaacaaacaacaaaatgatggagaaagaatttcaggtagtgggaataacagtgattaaggatttggagtttcagagaattacaaacaaactggtatgtcagagtttagattatgtaaaggtagaggagaagtaagataaatgatgaaggtggaaggtcaggttcaactcaactaaatgactacatattgaacatttactatgtgccagtcactcttctaaactcttgggacatcagggaacaaacaaaaatttatggctgaagatcttgggtgtcaggatatggagtttagactttatcatctacatgctaaagttttctttaacgtgcaggtagtgatagttctgtcttctatccagactatgaattccataagctcagtttaatgctttgccccatctcatgtgtgaatgatgcaagatagcctggtttctatgtgaaatgtgtaagctgactgtagagtcagataagagatgtagaatgctctgagattagatgcacagtgttacttctgtaagactggagctcagctgtcatattttccacaaggaagaaaatagtttgaaacaattaaaggagaaaaacccaacccggatgatagacaattcatcttactttcttttctgccaaatactggtacacaaccacattgaatggtgtttcctatctgatagtggtaggacagccacttcttgatctagttcataaatcacaaagtctctaaaaccaaaactctcatgactatctcagggctcccattcacagaagggcaaataccagaatcttaaaacccaggcagccctgtctgtaccaggagcaagtaagttcctatttccagaggacctctgcagtggaaattggttgtgggctatcagattttatcgagtatcttagagaatgctggtgacgaaatttttcatagagtaactctaaatatggcagaagcagagcatttggcactgacctgagtacgaactgagcccaaatttgatactcagtccagagcttcaagggaatgaactataacccgggatggattaaactaaaattatgatgatagcaaacactcaaatgagcctgttaaatggctttagtaatggaatggtgtctctgagctctccatgccctccaagttctatttgggaaaagggagtaacctgaagcttgcaattcccatgccaataagccaattaaggagactaagggcacatcatatctcaccaactgcctacagcactctccacttaacaagcagcacctctctcagcgatacatagaaccacagcaaggacccaaagtcatcctgagaacaaagcctttgagagagtctttgcaaagaagtggtagtagtaattttttatatctgtttcttgctgagcagacaaaggctcaatgccattaaagtttcaacctctgttttaagttatttgaaaaagattcagattgctctccacagtggctggattaatttgcattcccaccaacagtgtataagtattcccttttctccacagccttgctagcatttgttttcttctctttctaataatagccattctgactggtgtgagatagtacctcattgtgactttgatttgcatttctctgttgattagtgatgctcagggttttttcctatgtttattgtccacttgtatgtcttcttttgagaagtgtctgttcacgtcctttgtccatttttaatggggttgctttttgcttattgatttgtttacattccctatagattctgtatattaggcatttaaccaaaaagacacatgcatttgtatgttcattgctgtactattcaaaatagcaaagatatggcatcaacccaggtgcctatcaatagtagattggataaagaaaatgtggtacatatataccatggcatactatgcgaccataaaaaagaatgaaatcatgtccttcgcagcaacatggatgcagctggaggccataatcctaagtgaattaacgcaggagcaggccaggcctaatggctcatgcctataatcttagcactttggaaagctgacgcaggcagatcgcttgagcccaggagtttgagaccagcctgggcaacatggcaaagccctatccctactaaaaatccaaaaattagccaggcatgatggcacgtgcctgtagtcctagctacttggaagactgagatgggaggatcacctgagcctgggaaggtcgaggctgcagtgagctgtgatggcatcactgtactccagccagggcaacagaatgagatctagtctcaaaaaaaaaaaaaaaaaaaaaaaaaaaaacaaaaacaggaacagaaaaccaaatatctcatgttcttttataagtgagagctaaacatttagcacacatggacataaatacaggaacaacagacactgaagactgctagatggtggaagagggaggcatgggttgaaaaagtacctatagggtactgtgctcactacctgcgtgatgggattcataccctaaacctcagcatcacgcaatattcccatgtaacaaacctgcacaggtatcccctagatctaaaataaaagttaaaattgtttaaagttgaaatttcaagtataaggtgaaattataaaaaaactttgctttagcctagaacaatatgcaaaagtttcaacctctagtgatccagcatgctttgaagctggaaatgaaaaaaaggaagagaagtagcaagtactgtattaggcactttatgtacgttattatctcatacaattttcacagaaacctttaaagtaggcattattgctgccattttatatataagaaacctgaggcatgacatgaataaaaggcttgtctcacattatataaatgggaggtgtcagagtgtgaattgaattagtctgacactagagttgatgctcttttcattatactctgttgcccatttttcagaactagaactgcagagctgtgcacatcctactctgaactcagaaatgcagagttaacgctcaggctgctcaatcagaaggtagcgctacagaaattaaaactgtcggttttttgagaaaggaaaattcaaacgaaggtctgatgggaattttcccctgttagtacaagggcagttatattcaggaatattttagctctcttcatcaacttaacattatttagtaagtaagtacaactataaaaggcctcttttgctatatttcacttcctatccccaatccaacctaggtagaagatccaaatgtgacagacactgaagatcactgtcaatgtcaaatcacccttttgctttagcctagaccattaagcaaaacattacaaggtacttggaagatgtttgggctttgagaaatttttaatggaagcattgaaagacagaaggcaactgaagtgggccctacttgtgcagaatttggtttatttaggcttaactcaagtcagagtgcaggacccaaaagtttttgatggtcctaagtggatatctatgtttgaagagaattcagctgataataatgtatatgaaagcacttcataaacagtaaagtgtcaaattaacatataagattctacgccaatgaccaagcatatcagaaaaacaaaaaaaaataaataaaggacaaatatgggccccgacttttctaaaacagtcctaatttcaaatttcaaatattttattttattcttcccacaaaattaatatttatgagaccaacttttgggttagaaaatattcgtgatgaacacacagacagtgcataaatggaataatcaaaaattggccacaagccacatggaaatgttcaacctaagtacctcttgcaccaaaggtccttcaaaagttcattctgataaactgggtggtcttcaagatttaccaatttcaggtgagcagctatcaacacaggccccatcctaaggctcttggcatttttcctgggtgaagcgatacattatctcatccccaagtcaatgtttatttgctctttgcaaccaccacttccaacctcccaccaccacctccgacatcagccactgtcatagcaccattgtgtatctgccattatggtcttttaatttctatgatgtgaaaagtgggcctttctccaaaggccttacaagcatttgctttataccttgttagaatgttcccactgagcaccaataaataaacaaattcatgatgacgcactaaaggggaagaactaagaagccaatttctaaacatcaagtgtaatttaactatgacttctggagagagtgcctctggaggtggcagtttcaaagatgtaagtaggataaacatttgagcacagccaggaatgcccttcaaatgatcccaggagaccaccaactattccaagtttaaaatctacccaactcaccatgcaaacatagaaaaccatcccgtttagtaaatataacatggctgacaacaatgtaacaacctctccagtaatcaaaattcatccattcaatcaatcattcattcgttcagcaaataatattcattttctaggctgggcctggcaatgtacgaggtgttattaggggcacaaaattgagtaagagatgatccatgtcctcaggagcttatacaatcatttagggagagaggataggtccataaataagtctaataaaagtagaatagtcaaaatccaccatagcacacagcatgctggggcttaggatccaaaagactgagttcttgagctcatctctcctctttccaaccatctaaccttaagcaagtcacttaacttcttaagcctttgttttatcatttgtaaaatgaggatatcattggtatctactttgtgaaacttttatgaactattaacaaggtgcctgtgtatgtgtatttgcattaatacttcatcaacaaaaaaggtccagacatacgaatgctaattttcagatattattatctaagagaaatggcaacaaaatcctatgggagtttagaggtaagagaaatctctccaagtccagggattttttctgggcctaatgaagatatgtctgtgagatgcaaaggcagaaatggggaagaaagagaggggtttctaggaaaagggaattttctggcagaggcgtggcaataaaatctaccaaatgtatttagagggcagcaatctatgtcatcctgaccacatctgtgttattcctcttgtatcctcagcacctggaacagtgtctggcacctattatgcactcaataaaatgttttcgttgaatgaattaatgaatgaaatgctgtaggtttagcaaagtaagagaagagatatagccagagaagatctgggagggtaggctggagccagatgaagaatcttgaatgctattcttctcatcttcttccaggagacaaatatatccctagtaatgaggtgtcttaattgcatgacatgttcccaatgaaatccctattaagtcctagggtcacctcctgacatcataacctgaactattggaatcctaccagcttttccttgcatgactgtgagctgtgtcaaactgagtggcgaggtctgacccgaaatctttcaggggtttcaactgagttcaaagagttcagtcacttctgtgagaagcagtcagtcaaacacctagaaaatactcagatactaactctcctccacattaacctaagaagagaaggtgcttacagtcatgaggataaaatggggaaaggatcaagttctacaaatgctagagctagtaatgctaagggagaggtagtgagacagatatcctcctccttcaggaacagaatgactgctgtgctcaccaggtcccctacacatctggtgtctctgttgtctgcagtgaagtggggtttccagagtcgctaagaagtaaggcaaaagattacaaacctcctttagaattccacagacccagattatgactgggaaagctgcttaacctttctgagccaatttcttcatctaaaatggagatagtggataccatgtgtctcagtgaagcccctggcgcacaataggaatatacttaatataaattgtttccatcatttggaacagaaaatgaccatatgcgttaagtcttttctcagtcacttccctgtccctatgagagagacagaaagaagactttcaaatgaataaatgcaaacctcactaaagaaaatgtaaaatatagaatgggaaaagatcacatgatgaagaaaatatttcagggcctagggcaaaactatcaaaactgaatggtgttaggagaaatggtggaaaggcagaaagagggaaaagcagaagaaacaacgaaaatgccatgtaaggaagcctgcttttgagtgggtctgcttgagtgatgctctcttggtccataatggctggcacaatatctgagaaagaaagtgataaggtctaaaagaagagagaaaagggtagatcactaagaaaagaggtatattgggtcttcagtaaggaaaatgggccagggagcaaactctcaccttgaacagagaagcagagatagcaactgaggctgaaaaagctgcccaaaggcattgttccatgagaggtggaaatgacagggcagagcttggaagctgcaggaagccctgactccagatggatagccttgtcagaaacactcacctggctcaggataaggaaaacacactgaggaggcagaaaaaaatctagtacctaggtgaggctcccagggagcacgagcaggaggcctgaaaggtaggcattttaaccctattttgagacttatacaagggaacatgcccagtgccacccacccagaaatattagagagaacaaatgcacccaagtctctcccatttcaaaacttcacctcatccaccatcccacaccaccttcagaaaccctaaaatcaaatgctttgatggcagaaagaagttcacttttggggcacaaggcaatcattgagagtgaaatcattgagtgtttttatatttacaactcaacaaacccagattaagatgcttgcaaaacttagaatcccaccctcacatcccaacttcccagaccctccaggaaaagtcttcctcccaagtctctcctgtctttctttttcctctaaagctcttcccaaaagggaatgagtcatcaaaggatgctaaccccaggatggattttttatgatggccaagaaaaggagggtggggtgaggtaaggaattgccttacactgtcttctgtgtagaaggctgatttgggaatcgcaaagtgaacatgttattcttaactccattcccgactccttgagtcatcctcaccatgtcacttaattccactcattccatggtcaacatcttggcttcaacaaggctctatttttccccaggcctacctaccttgaagggtcagaatgacccttgaagagacagtgtccttcaagtgtgtcagcaattcagaaactgacagcttccaaaatagctggtgtgttgttgagtgtctgttgccttctgaaagagtggcagtgtcgccgagacagcaggatttccttgccaaagttgctcctaccctcctccccacaagactctgccctgcctctccctgtccctgcctaggaagactttgagcccaggggccatggcatttaagcactgtcagagttcccacttcaattcccacagtggtgccagttcagcatctgtcatgatgacccagcctgaactgtatttagaagcttggacatggcaccatgttccagcacatctcacagtgacaggagatttcctgagcacctgggcttgcgattcgagcactcctcttcccagggaatgggggtcaaaatgactttcctctgatgacctgtttccttcttaggatggtgtccttctgttggaggcctcttctcagagtcaatctccatcaatgctattacacaatgctgtttaaaaatccatactttttagaaagcttgcaatacgtagcaggggaaagagaggagaataggaaagtcaatcagaaaatgggtttagtactctgttcatggactattcttacaaagataaatttccctgaaaacatagcctgggagtgttcagaacctaccagacattgccagtgaattgagagagcctgtctatttcacaactaagtgggacagtgtataagaattcatttcatctttttggcagcatttattccagtctttaaagcagcatactacagtccccccaaaattgtaagttaactctgattagtggttaaaaattaagtccatttatttacatattcacattaatctccacctagacaggcagactgataattgtataacactaatcaggtgggctgtaagttttgagggttactgcacacagagcaggtctaggtcctcaatctgataggtcacaggagaaagaaaggctttttctcaattgaccccaaactctctaccccactgtccctaaccagagctccatggagacaccctgtcatttaaaaggcatcaacgtttggcctctcccattcctgggcaagaacccaacactcagagaatgtggttttaggatcatggcatctaatccattcaaggattattttccccccctactgttcagatgggtgtgttaatcatcacctctctttgttctgtaataaattcaaccctggctaattccaagcctctatgcatcactggagtttaaagatggcattttgacaggtcagatattcagagtcaatggtccaccaaccagtcaaaaatccttaagtacttttaggaacatgtggaagtaattttttccaagaatttacaagtctggaggatgggatcttattgatggtgtatgagctgttgtatatattaaagtattactttatatacatattctacatataatcaacattgatgtatgagtgaaggcagatttccctttttataccaagtactacacaagtattatcaaatgcaaattacaataaagtatacaatatatagcatctttaaaaaaataagactacagtaaaactataagtgaatgtgcaatgagtacaagtttaaaatacaaatgctataggctaggaaatttcatagatatcagaatattttatatgacacttgctatacttgtacattttaactacagtcatagtttgagatgaatatttttataaagaaaaaatttattatataaaatattgacttctaattatttaaatgaagaggttattaacctaaagtcaatggacaagctttggaggtttacaagtcacctaaaatgataagttaaatttgcaaaagcttgtgtgcttttctggggcaaggatgcatgggatttatgagattctcaaaggaatctatgactttaaaaggccttaaggactacactggtttgataggttttcttcaagtgtaataaacatccatctttccaagctctattctgctgtaacaaaatgctttttccctcagccagatatttacaatgaaaaagattcaaaagaatatgacacagattactaatggtgcatcttaataaaaatatattttatctttattatgaagaggaagggattgtgtttctctatgtagtaatgagtattaaaatggccacctgagaccatcttgctttctctgtatgattccctattttccattgatctttattttaaccacacatacacatatatataagttggataaattataatccatattcacctacttacttggggaaagtagatgaattataaattatttttgagtgaatgaaaacgtggcttttcctttggtcttgctgcttttactctggttctcttttcccctatctcccaggaaaacattagtggcacaggaaccccaagcttaccaggttctttctccttatgtgtgccaaaagtctgcacagcaagtctgctgttgcgggacttgcagtccaatcccctcactggggatgtgctcttaggcagtggtccctgtatctcagaagaaatccctccacctcatgtcctctaaggcaatgtctgcatctggcactggggttgagaggcagctccacagggaaagctggacacagtgagtaagtgaggctgccccaggtaggcctgccaaggctttcctaaaggccatggcaatggagcctgcccatgagaagaacattttggtgagctcagtttgtctgctaccaagaacctcctggtcctcccagctaaacatctatttttaccacactgtgacactgaagactctgctgtcattaaagtgaataataaatacagtcaactgcattatttgtcattttatggtgaaaggaactctggattcagaatcagaaggtaggagtgttagtcctggtttggaatcagaaagcaagagtgtgagtcctgattctgactctacctagagatatgatcttgaggagccatttaaccctgtggtgcctcagttgacacatctgtgagaagtggagaaggaatcctactgcttacgcaactcaatgaggcaccagcaaaataaaacaatgcagaggaaagcactttgtaaattataaagtgccatataaaaatgtaacttatcagcattacatttaatcattcaccctgcagagatttctcaatgtgctctaaataccatgcttaatccatacttgcagtgcccattagagatgaggaaactgagactcggtgaagcaaagtggtgaagtgagaagacctgcttgctgagagcctgggttctctcctcaaactggtccatgcctcccccagcagcagtacttcatttactcttgctgagcaactattgcctcatttttaaaatggagacgttaactgcttgctcctatgagacaaagatctagacaaaatgacctacccagcatcttgttccatgatctgtgattctgcaaaatgcgagcaaggtcatgagttatcttgtggtggtagggaactagcagccaagtgtgctgaccaatggaccccatttgttcttttggtttctgaagcatagcatctgaccatctccccagtggtgactcagtgaagagtcacagtacagtcagggtctctattatgctaagtgccttttcctatattctgattctctgttaagagacatacgtagcaacttttcactgatcaagcaaaataacccattttataatgggggcagacagataacatctttaaaaggtcagtttacagtccacaccgagagattggctctatcacatatcctcttacacagaggccactaggctgcaggataattagtatggccaaattgctctaattattttcagcaaaagaaggctttgctcaatccaatggcaaaatgttccagggactggtcctgtgggattctgagaccaccagcagagctggccttctgctccctcctaaaacaaaagctagtcccaaagaaacctcaggttttacataaagttgctcaacttctctagggtccaacctgcctggctcttttcccctctgggcctcagtgcaattcttctctcaaagcatacctcactttgcctttaccccacagagtcactgttgtggcaggactcaatgtttgcaactgtttttcaacttcacaaagaaacacctagtaaaagatcttgctattgattctcatttctcaaaatgatcttgtgaaacatgctgcttgttgcctcagagaaagtgacttttcttccctccagaaagaccctaccatggtttgagttgtgattacacatctgaattcagtttgcacaagataaatattactaaattagagataaatattctgctaacttggtccttagaagaaaaaacgcaacatgtttcttatcatgctcctaaactgcctgtgaaagacctctttcttgccattatttacaatttaattatgagtcagtgtggaccaggataaaatatatcctcttaggaagggagagcaaatgagtttcaacatgcatgtcagctctagccatttgaatgtggcatttgagagcttgaaattcagaagcatgaggcccaatccaagctcatagggaagagtaccagattgattagtgatgtgtttcatggacacaggagtcaggaatagcagcatatgcattacatatttattatcatattatttctaaggcttctactggaatgctgctgtgcatgaattgtcacaatatccctcttacatgctttcaggaaataaaagctattgtgtcattgttcatattttatgttattctttccaagtggcccagattttccagaggcatctgagaggccactaatctctcccctctagaaataaggtcatcatgttagcaaacttcctctgctctgacacagttgtggttttaatggagaactaatgtcttcatcagtatctgtgctatttcacacttcatttcctccccaactcttggatgaaaaccatccagtcctggtgatttactttgtgggagtttctttcaagtttgtttccttctccaaggatgtcacacaagcattttcagggctccagctggggagcacccagccttgaaacatcagcgtgtgatcaagtcactcaagaaacccaatgtccttggcagggacctggccgtgaggcctcttagctgaggcccttgagtctgaggataagagaaagagctgctacttttcctgcctttccatcagcactggttcaatggcttaagatggtccagattgctaggaccccgagaactgggagaaaatgggagaaaaatacaaacaatttgaacccatgacccactattcaggttgtctctggatctctcagtgagtttcacaaaaatctcaaaacaaccttaaagaaagaatagttttaaacttcttttatgtgatccatagttgtagccatcatccaatccagattctccaagacagtacttatttcccttctgtggtccctgagatacatttgcatttaaaataatctcctactatctggcttgaaaaaccagctcctagcatgggcacacaataaataccttgcttttaacttgataaaattctggctacatgacacagctcagagaagcaaatagggaggatgaaggaagaaattgtaaaagactgctcttcagtggcagaaggaaccccctcttcatggtaatagtcatatactcttagggtttaggcatatgtggcttctggaggagagacttctctgctgctttgaggcctctggcttcattgggacaggctcttgtctgacttgtgcttcactgagaagagacaaagacaggattgaggatgcagaatccaagatgaagccagctcatgctgagccaagactcactgacataaagaggagctctttcttcatgcatccttggggcagaggccacttgatgtggtctcatctttggccttaaacatagtttaaatgaggacaagagccatgttggaccattaaagtatctcccaatagcagctgaaaatatacaagcaccttccctgagagcaaactccaagtacagggccaggctgcggccttcccagaaaagcctgttgaagtggtagtggactgagctgcctgacctctcatgtggttttgttgttgctgttctgtttcttaaatgaacatctgatattcataccttgtcaagtatgggcctttattattctctaataggaaagcttaactcagaatgtcagctatgtttcaaagaccatcacaaaaaaggaagaaaaaaaccagcttcagttctcaagcttgccagtataaaagcacaatatgcctcacagttctcatcgaaggatcagctgggtcagtccaaacatcaccatgtcatcttggttccttaccaaatgaggcagtggtgctaaaagaaaaaagtccaacatgccactgtgcactccgaaaagacactggcatctactgcccccaaaagagcaatgcagaagaacaattttcatactgcaacaaatttaaagttttaagaaaagatagaatcattacacaattcagatgccatgtagctatctataaaaagaataggatattacagaaaacaaactacaaactatgactacatcttcaatgtcataaaatacctggcttgaaataaatttccttgacaggagaaaaaagattccttttatccagagaccagaaatgttcaaactccaactgtcaaaaggataacaaaatcatgagaaaggagtttacctcccaatgtagaagacatttcccctaattggctcagcattctaaattcttgggatacacaaggtagcagctaacatgcaattcccagaataagaagcaacgacaactctctcctaagaaatagagataacctatgccacccctacttctcgcagctggagaaagtccagtggaggggttttgagtaacaataatagtcattggctctgagcccagggcaggagaggcaggagatatgtggagacccagaaccctggtccttcctctcttgttggcaaggtctccaaatggttccttagctcttcttggcaatttttaaaggtcacctgctgcaaccacaggtgcctttttctactttgcctcatgccctcagttgcaacatcttattgttcctgattccaagtggcaaaacctaaaggtcaccattaacctgggccagaattgcttcctgctcctatatctgccaatttgcaccacacactcaaaaggtcaccaacttgatgttagtgtcccagccctatctgggcctcactgcttctccacagctacagccccaacaaggttatgtctcttccctgtgccatccctgggcaagggtgggagggccctgctcctgccagtgttcaaaatctgaatgtgactctctatccatgccttcagctggcaggaatgtagggctgcagttgaagttgatataagtacacttgaccctagaacaccaaggatttgaactgtgcaggtccacttatatgtagatcttcttttgcctttgtcacccctgagacagcaaaaccaacccctcctcttcctcctcctcttcagctactcaatgtgaaaacaataaggatgaaggcctgtgataatccacggccacttaatgaacagtaaatatattttctcttccatgaggttttcttaacattttcttctctctagcttaccttattgtaagaatatagtatataatacatgtacaaaatatgtattaaccagctatttatgttactggtaaggcttccagtcaacaataggctatagcagttaagttttgggaaaatcggaagttatatcgagatttttggctacatagggagtcagcaccacaaccctcacatttttcaagggtcaataatacagaaagaaaaatttagaaaaaaaataattttctgtccttaaaaccaaccatgtctttagattcaaaccaagactctaaattctcaattattttaagtgtgggttctcatctcactcagtgccctcactgagtgtcaacagtcttatgccctctttttttataagacattttacaatcctgggccaaccatcagttcccgatgtctaatccctccttctcctgggcagtctgccctaacatagctctaaatacctacagaggcccagactaggcacctgcataaagtatggctaaacttcccaagggggctagccatagtagttttgaccaataaataatagtaactctttgactcagaaagctaataaggactttttccttggccaagaaactacactaggagccacaagagacagaaatcaagtatttattttacttgaaattctgctatctcagaaaatgaagtacaggaaaccaccaggaaaaactgttgtcagccaagtgcctttagcacttgaaggaatggtgcatctcatatttagatccacccacagctcaggcttcttaaagcagaatagaaataggaaaagatggctggaggaaagagaggcacttcatgttttttaaatgtataaacccaatactgacatttttccatgttgccaaggaatagtttctgaaaaaaaaaaaatacacctgtggccaactaacagtattctctttaagatttgcttttgtgactaaattaattaaggccactggtattttttcacactagtgatttcttaggttgtcctctgaacctaaccctcataaatgagtcactggaatttaattcattctaaatgctactttttattttaacccttataacacctgacttagccaaccaaacgtaaaatacaagacatagaataaatacaaaatagaatgtacaaataagaagagattaaatagaatcttggcgaattccaactgctccacatccccaagagaaacatggggtctccactgtttcactcattcccaacctcccactctgggccttgggatcctcagagcctcactccaattagaaagaaaggtaagaatgacactcaaaattccaattataaaacacattttaaagtgaaatttcattattccacagcttacaaaataatatttcagatgggaatggaagtgagatgagaagggccatgtgcctataatatgtttgatgttacacatatgggaattatctgaaacccatgtcttcctaacccagtaccaacactttatacacaggattgttccaagttttttctttttttaagtttattggttttcactctcaagaaagtgaacaattctcttcactatgtgaaattttttgatgaatgttcttttgccccctacaaaggtagacattatttcagcagatctgaattagttttaatgaacagtctgaaatgaacagtcaaggagttgtctttatttgaggaggcagtgaacttaacgagaatattgtgagctacctatagtgtcctttgcctacccttctaagttcttataaccaggccagaccaaataaagccaaggttctatccctcaagatttgtcacatgacagccaggtggtcatgggagaaacactaatcttcacatggacacttggaagagcaccattctaaatagctactttccaggggctgtcaaagctttcttcttccccaacacataatcaaatcaaactgtaataggaagactaaatatcgcaaatcaacagtcagatggacctctggagaccaaggaaagctaaggagtttccctgcttggctgggcaaagcaaggatcaaaggaagcttggagtgggtggcatatcacagccctggaccagaggtcaggtatttggccttttcctggcttccaatgatattgaatacaacagataaattaagatcaaggcacaaggcagttctaaaagcaccagcctatccccaggagatctcaggaaaagagtcatcatctatcatgagccagatcttatctttacgtggaggaatgcttgtcaacttgagagtggattacatacagcaatgtctaatcaaaagccctacaacaggatcacagaaggaggcaaactcatcaagagcattcacttggccaaggaagagatcctgattcaggcacaggacaaagtcaataaagttcactatgctccaactcctgattaaccatatgtgtgtggagagatgattacccaaaatagcaagggagctcaactgctttcgggaaaatctgaccctttaaattaaggcaagaatggcctgccagccaatctcaaagacaggaaatatttctgggattaataactcaacccgatattcattccaggttgggggatttccctaatccaaatgttggtatccacaactgatgcacacaggcatctcagctggaagcactgcatgattttataggcccttgttgagcatacccctcaagttccttcagagcctatccccaccataaagagggaagagtcccaagcacctccttggctagcagaattacaatatgtcaagcttcaggcttcatcaggcccaagagtgagacccacaaagggagtgtgaagaatgtaagccacctttccagaatccctcttcatgggtggcataggagtcacctacatggcatcactttaggcttgccaagaaggcctcccctgccctaagtttgcctatacctcaccatggaagatcagttagcccacaggtttatttttatctaaaaggggcttttaaatatgtagaagctcccttcttttaaaatgccatctgccctttaaatatgaacaatgtgattaaaaaaaaaaatggatgtttaggaaaagtgaagtctggaactgctatagtgattttgctcatacaagggaaactccagaaccacccaaggttataagattaaactaacacagaaaaactttatacttatacacaagtcagcatctcactatatctcccatctcacatatcccaaagcatttggtgttgtttcagaaaaccaatcaatcaatgaataatgggggatgctaataagaataattcagggccctgctcccaaggcttttacaatctagtgtgtagacagtgtggaaatacaaaactattcagccagaagaaaaccttggtctgcttttctgcgagtcaagacattttccgctagagtctagaaaaagaactctcagagtcattttacaaagagtaagaactccctgctctagggccattagaaagtgaaaaaaggcagggaatcacataaggtcatcctcttctgtttcaattccctgaccctattctagagtttatggaatgcttgtatatggaaatttagtaagacccaaggattagttacaacagcccactcttccctatgtgtgcctcatggagatttatagttcaggtataaaagatcgtctaccaaatagttatccttccaggcaaggtaaatgagcacagagtttatcctaggtcttcaaagacctctcatcctaacggttatgagctgtgggtcatgcctggcttctccatccataatctccttgaagatctctaattaataggattagtgccccttataaaagaggccccagaaagtgacctcgccccttctaccacatggggacacagctagaaggtgctatctatgaatcaggaagcaggccctcaccagacaccaaaccccaaatcttccaccaccttgatcttggacttcccagccttcagaactgttagaaataaatttctgtttataagctactcagttcatggtatttttttctagcagtctgagcagactaagacaataatcttgaattagatcttagattaggaaaaaaaaatactagtactggatattaggacaaatggtaaaatgtaaataccaactgggttaaataacagatcgtatcaatgcatgcgtctccagtttactaacaaatagttcagaaaaaagttaggtatttatatataaatgtttatacaaaaacacacacagagatggcaaatggagcaaaatataaacaatttgtgaaactgtgtaaagggtatacatgaaggagttccttctaatagttgctgtaaattttctgtaaacttaaaattacatcagaattaaaagttcaagaatgtttaatcattttggaaaatcatcccaacaattttgaaaaaataaccacatcatcagagagctgaaagatattcatagtcttttaaaaatagattaaatctggccgggcgcagtggctcatgcctgtaatcccagcactttgggaggccgaagtgggaagatcacgaggtcaggagatcgagaccatcctggctaacacggtgaaaccccgtttctactaaaaaaaaaaaaaattagccggaaattagccaggcatggtggtgggcgcctgtagtcccagctactcaggaggctgatgcaggagaatggcatgaacccgggaggcggagtttgcagtgagccgacatcgcaccactgcactccagcctgggcaacagagcgagactccatctcaaaaaaaaaaaaatagattaaatccactaacacttcaagattacagaagtcacaacaaaagaacattcagcctaacaaagctgaagattccgaatgggttctctagttcctgcctacctccattcctgtgagaaatttagaaaattatacttggctactgaatgttatatttaactaattattgtaatgttgggtaaaattcaaactattgttgaacaatgaaaaaaattgagcattgaaaacacaaccatgcacttgacaataatcaaggaagaaaaaggaaatgaagaatttggtcagagtcggaccaatccagtgagggtcagaccttgcccctttgacttagagtaatgccttggcccactgctctaccccagatccaggagctgggtttctctagggcaggaccaggactggagtgaggtgggcaatgcactggcctggagtgaaaaatttgagggacaccaaaaatttcagcaatcaagataaataatatttcaatgcaatattttatttttttaattatactttaagttttagggtacatgtgcacaacgtgcaggttagttacatatgtatacatgtgccatgttggtgtgctgcacccattaactcgtcatttaacattaggtacatctcctaaagctatctctccctcctcccccaaccccacaacaggccgcggtgtgtgatgttccccttcctgtgtctatgtgttctcattgttccattgccacctatgagtgaaaacatgcagtgtttggttttttgtcctcgcgatagtttgctgagaatgatggtttccagcttcatccatgtccctacaaaggacatgaactcatccttttttatggctgcatagtattccatggtgtatatgtgccacattttcttaatgcagtctatcattgttggacatttgggttggttacaagtctttgctgttgtgaatagtgccgcaataaacataaatcatgctgctataaagacacatgcacacgtatgtttattgcggcactattctcaatgcaatatttttaaaaattaaaattaatgcaaaaatttgccatgaatgaagttatcaaaatatttaataaaataaagatagtgctatagactgaatgtttgtgtccccacaaaattcttatgtcaaaaccctaacctccaatgtggcagtttttggagacgagactttgaagaggtaattaggattagatgaagtcataagggtaggggttggtccagtgggattagtgcccctataagaagaggcagcagagagtttgttctctctctctaccatgtggatggccatctgtaaatcaggaagagagctctcaccagagcccagccctgctgtaccttgacctgggacttttagccttcagagcagtgagaaataaatttctgttgtttaaggctcccagtctatggtattttgttatagcaacctgagcagactaaaacagacaggatcagtattcgtgattttttcttttgcttcaggttccaatatcacgccaatattttgatgtttagttcaacatagatttttttacattaattctgaatttttaaaatactgcactaaatattatttatcttgatcagtgatataatttttgcctccgcatggtcctggtcctaccctaacaaacacagtctatgactccattcccaccacaatatccttccatattcccaccagccccacctcccacctcccagagaagtagctaaacctcatggttcctgggactgcatttcaccaatgtcttatcttattaggcatgttgagatgctcaccaattcctaccaactctacccggccactacctcctctgctttctgatggcctggttcaaaagaagaaaaatattaaacagctgtttcaccctagaaggagcaaaaacagaggctggaatagtaaatgagaaggaagattggtaaaagatgggtagaagaccgtgcttattgttccagtattataaatactaattaatagggaggctctctaatttgggaagaaaaggccttagtggtcatcagaaggtataatatcagagagagagagagagagagagagagagagtatgtgtgtgtgaagttaaacatatactctggtaacattccttgagggagagggtagaaactaagaacaaaggaaaaaggggaatgtggaatagagtgggaaatgtcaacaattaaggcctcttctgcaccaggaactgtgctagatacctcccacattacctcagtgaatcctcccaactatgaatgctgggctgtggaggatacaccctgatccatgccagaaagccttcaggcgaataagaatatgtatttatagacatctgcaagagagaccatcagctctcctttggaaggcagacagctgtgttctgccaggtgttcaaggcttctgcagctgaacatgaaatgtacaaggtgtttcaggcctgagagatgatggtccttgatatttccagtacctaacctctgtcagcactgtagaggctccagattctgtagctggaaaaaaacacatcagccctgccaagctgaactgagccttccctggagttactgccactgcagcacctgtttcactgctgttgtgttttccctaaaaccacctgaacactctgagcactagcaaaatatagagctttgttctccagaacagtgtcagtcctactccagccccctaattcatcattgttaaatagtgaatgaactcagttcagtgagcgaggggagctacatatagaccaaatgagaaagagatgaaatctgacttcgaaatcagaataggcacaaatgtctgcaataaattcagtacatccaaagatgctctgattacaaccagagttaggagccaatttctcctccttgtacagacacctggaatatagtaccttggggtggagtagagaggcatgtttcacctgcggcttcccagagaaaagccctagactgaaaccatcttctctgaatctctcctgcactccaagaaaaggcccagcagcaacttagaaattgtcaagacagctgcagggctagctgaagaatcactggagcaaagcaaaacttgaagagaaagagaaaaaaaaaaaaaaagaagagaaaagggaagtcagagcaagggagaagaatgtctggcaggagcctgtggtttgagtgaggcgggatgggggaccccctggctatttctgcctctgtttttggcggcctctccatcttgctgtgtttatgggcctgacgtgactttccaactaagtacatccgctaggcttgcactggaaaacttgccaccttccgcccagttcaggtttcatctgattcacaccaggaagctctagtttcgagagccccatgcatttttgcagctgaatggaaacaactggatgcaaatcagacctagagaacacctgcagctcttcactgcccttgcacctccatctaacctttgaagcgaatggcttgggtggccagactcagtgactgagcttctccaagctttgagatccacagctgcaagcttcccaggacccagaagaggaggccagtcctaaaaagtaccaaagtttatacaacacaattgagcgaccaggaggccaaactggacaatgagaggaatggctgcagggaaggcctgccagggtagaaagcacaaggtttaatttataggagatgacacagcctcccaggcaggctactgagtgagccggcagagtctccctcaggatcagggcttcgtgttccaaagtccaggctggtgtgaggaaatagggacaagcggccactctgactcaatcatccccagtgtttgctacttgttgctttgaagggaggagggagggcagagtcgaggtctggtcaacacagcagtggctcaaagtgcaatttaatcatcctggacttggcccaacccatcctcttggtgtgagggaggagcaatttgttattgctgctgtcatcgacactgggcggccatggacagagatctgcaggcagcagcagtagcaggaaaggctggggagcaaaagaagtgagtggcagttgtgctgggctataggaactgcaggagagtggtggcccccaaggactgggaattcatgcaaggtcctcttcatccaggccctgctataggaaacctgatgggaatcaagagactaaaaatgatttcctggttcccccttcctaactcaggctctgtgccccatactctgttcatattctgtcgagacacccatccccctgtgtttcacttgtctgattacatatctgtcttcttaagagcagagaatggtgtttattcatctttatacctcccagcacctaataccatatttgttgaataagtgaatcaactattgctatgatgagagtgtgattcattctctccactgaaattgagcatgtactcttctacagtctcgatgtttgcaaagtactgctaggaatcaggcagccatcttccttggggagaaggagcattactcaaagtgcatgaggggaagggagatgtcagaagaatgccccatttactatgtaaaattcaggttcctagagccttcctctgactctctgaagcagaagcttgatgatggaggccaaaaaaggataagaagtttcatctcactagatccccatatttaagtgtgaatcctgaggcctagggaagaaaagtgatttgctcaaaatttcctatctagtactagcagagctgggagtatcatgtgtctaaccccattctttcccactacaagctgagtcacttccatgagcatctccttggtacctgctacctgggggactctctggtgagctctgaggggaatgcaaagatgattaaggcactatccctgtcttcaaggtatgtacagtccaagtgctgagataagaccctctcctataatcaagacaggctatggtacctattggtacccatgccgaagcaaatgacaatggctttggtcttcctacaacccaatatatggatgtttactgaagaactttttaagttacagtcaacttctacttttccagaagaactacaagaagccaggattaacatttatatcatgaggatatgccaatttttcaaaagttctagtacattaagcccaaatcctagccaacaaaatttcttttttctatgaggacagtgttacacaaaaggcacattcattttttgtagaactctaaggaaaactgtgtaagggtccattactacagaccagcactgataacattttggctatgtgagcttacaatttgttccaatatcagataaataaaaaattgactatcgcttttttaggtaaaccctaaagacagccttcaacttctggttgcctacataacctcaaatcgtgcctacatttcctcaatgcgtaatgacaattcagctgatgataagggtaactatcatcacttctcccaaaagtaaagcaggctacttactcttgtctctgtggccaaaagcaaccaacaacacccccttctgtatttaaatgacaatgatgctcgttccaaagcctcaaaatatcctagatggacaagtggaaaactgataaggcttcatgaacttcagtgaaccacctcactacctctaatcaattatgaaatactagtgtatcatatcaaagtgctctcaaaaatggccaaaccaagtgctaaactgaagttttcatgtccccataaagtgtaacctctaggatttaagggactctctctacccctttacagtttcctcactgtatcggtttacttagctacacaataaagccttcagtgggaatctagaaaattggtgacaatgatgatctttggaaaaatatcagtgaacactgaccatttaggtaactgaattaatttagaaatggttattacataattaaattacaagttggtaggagagatctcaaaagcagaaatagtttatgacaacccctcagttccattaaaactaaaactttctagaaaagggaagaatgaaacttttaaggaagatggcatatttggaaaatggagataagaaacaagtcacttttgaaagtttttcattcaggcttatcattacattgtctagtctctgaaagtctttctaacctttatgctgtaaagcctaacattcttgttgaaaaagaaaagtagagaatatacatctaagtaaataaaataatccatgacagacctcacatccttagagcaaaacccagccataatattaactcacagaaatgaagaaaacgtgtgtttttatgaggttaaaaaatatagcaaaaagttgatttaggacactgttttatctgaactattactaaccaggtatttgaacggctctttcattgaatcaatcctctcctttacaatgtcttcctaaacactttgtttcagacctgcattactgcttacctggaccaccacaggcaccttccctagtgatagtacaaaatatttctagtttcattcttacttgtttccctctcctgagcatcagaatacatagctaaggccctctgttcttagacagggctatgattagttttgaactgtgacatatttaacttacaggctaaggccccagtgtaactctcttccctagccatggcaatattggaagccatgtgttgagatggtggaactataaaatgaaagcagactgggtccctgagtcaccactcagaagagagccatgctggaagatgtccagatttctcacagtattacagactattacatcagtgggtctcaattaatgaactcttcttctcagtatttgtaccgttgtacagtctcctcccacactgaccctgagtttagtaacatgacttgctttagccaagtggacttttgtaagcatgatgcaagagttgatacatgtttgcacactggagcctgtcctcttagaacacatgcttttggagcccagctgacatgcagtgaggacgcccaagctagcaacatagagaagccatatggagaagaacggtggagaccatctgacagccaaaatggagactacagacatacatcccatattaggtcatctcagccagccatttaagccaccccagctgaggccccatgtatcatgctgtgccctgaatacctgacccacagaatcaggagcaaatgaaatggtgccactaagggttttaaggcactaagcacagaaactgataactgaaacagtgagcaagaaataaacttgtatatattaagccactaagacttcagggtttgtttgtcttgccatggggctgaacctatcctgactaaactcatatctccccatttcttatctttccccattccatgctttagcatcctatttactactgtgacatgaatcttcctaaggcatagccctggttatgtaatagttactgacattaatagatcactaattgttggtgactttaattcttatgacaaaacctttatagataagtaaatggaagtcaagagaaattaagcaacttacccatgttttcagagctaataaggattagagtcacaattcaaacccagcctaagctcataaccactatcctccttgaaaacttccaggggctccaaacatctactcaattatcctttctgcctagattgtaaagtttttagggcagggactattccttactcatctacatattgtaagtgttcaataaatagttgtcaaatttcactgaatgggctatttgtctcaggcatcttgtaaaaacaacctgaaggctgtgcatggtgaaagaaggcatatgcactgggtcaaatcagccacatggcttatagctgcttgcagccactctttggagaaaggtgggaatagccagctggagtcatggtttgggtccccctccaggcttttccagtggttccaattctttcctactacaggaagagataaacacccttcatatatttcctctcacccccaactgcaaggaaaacagtaacactaattagttgtaacagggtgttcatttcacacaggtctcagcaggttgccctgccgttctttgaaatggtttggaaacagcctttattttaaacatctgaagataattgaaccaaagttgcacccagaaaccctgactgacatgccttttattctctccctcactaacaagaaatgtttgctgccatttcttatttactcaacaccttgaaagcctccggcactgaagacttgcaccccaggatcctaaaagaatgagttaaagtaatgattggtaataaatggaggaacagggaagcctgagatatcaaacaaaaccctatgcctgtttaaagagaagaaggaattactctacaaatctataaacttaagctctgtatctggaaaaaatggagaagttggagggagaacagaagagaatttatgatgaaatcaatttgcaagcattatacccttcaaatacaagggtattaggtagcaaagacaaaaatattttctaatatattgttggcaaatggataggaaaatgggctgtcatacactgtgggtggaagtgtaaattgaacaacctttcgggagggtaatctggaataaccatcaaaattttaaatgccatgacttcaactgtacaactctactctacttctagaatttattctataagtgctatcacaagaatgcccaaaaataatcatggagtcttatttaaagaaggaaatgactggaaacaacctgaaggctcgtcaaaataggttcaataaacattatgaaagatccacacgatggaattctatgagacttttaaaagagggggaagtggagaacttgcaagaatgactatttgacagtctccaacataacagctcaaaactaaaattataaagtctaaagtactatatatattatgccacaatctctcttttcattttaaaggtttgtatatatacatatgtgtgtatgtgtatataaggactcatataatatatcatacatgtatgtggaatgatgcaaaaggaaactggtaagagtggttatcctgggataagctcggaaactagggatgggagattgctctttatgcttctcactgttcattttgggctgtttggattttttaaaagtatacaaattatctgagttttttaaaatttataagtaaaaaagaagaataagtaaaaaatatcacagcctattagagaatagaaactggggccaacacaatcttctcaggcacagaggtgcacctggcactttaagatgaaaagaagaatagaaccaatcttgtgactttgaggttttgattcagtctttcagggaaaactggaggcccatgaacagaagaagatacctaatgggctgtcacccagcagcgatttcacaaatcgtgcagagcaggttctcctgggcctgctgggcagcagctgaagaaacacaaaagtagacattctgggcttagaaacactggctcctcaaaaaaaagtgaaggaaaccctctatatcactactgtgtgcctctaggcctggccctcaacccaattcctaggagaactagaagaaaactcattgcacattcagaggcccttagaatgtaaaatggtattcggcctgcctccagcacatcctctaaacttccatccacactgcccagggtaaggaaatgaggtacggaaaggaggagagtatactgaggaaaggaaggtatattgaggctgggcattttagcaggaaagcaacaggtctatcccaacagctctgctcatacctggctgtgatcttgcttaagctgtcttcatttgctttcctgcttctaagataagactagtggtttcatcttctatgtttttgagagaataaaataaaattgtcaacatgattttctgtcctgggacagacagtactttgagaaaataaactaatatacaaatataaaatattagcagtattatgcaagtgatctttttggagaaaagccagtgatttgactaaattttccagccagctggttcagtcaaaacagttaatctgatagctcagcacagacaaaagccaaaactatgattattcattaattgccacacatgttaattaatagggcacttattgcaagccagggatggtgtgaaaactagacatacagagataaagacagactcctgacctataggaaataccagatctagtgaagaagacagacgtaaacaaataattgtactccaataccatcactgtggtattctgttagaggtataagcaaagtaccacaagagaaaaagaaaagggttgacctcgagacacctacattattgaccttcacgtgcagattcaccaaatctttattttttatttattgctttgtattgttttcacttagtcaagcatctaagtgaataatttcaaaaatgaaggactaaaattgtcaagatttcacagtggtagaaatgctatataaaaatcataaaaatgacctataagtagcagcataattaggcaatatttcaaacaaaatgatttaaaatgatgtgtttgccaccactgagctaagattttatgttctctgtatgcctgacaaagatagctatattccgtacaaacagcacctcatctgccaactcaacaaatcaaatccatcagttaagtgaaggaaagggacaagtagaagataaaatagtcaaagcagttatttaaagccatgtagacacaagaagaggttacccaaatgtttcacttttaaacttgtgttttattcgatttggtgtttcattcaggtctaaatatcatcctaagagttgcaaatgttgagcatagctcccagagttaacctgcataaaattaaatttaattctaatttaattcatttccagaatggtattctgttgtcagtgttaaaaccctgaaggagtttcattttccatgacctctataaaataacaagctgtatttgccacagccagaaaaacatcccaggcctcatttgcttagggagcctgtaatcagacattacttactcctctcacgttatttcaatagccatagtccctcctattaaaacaaaaagtaattttctgacttagctacagtaatgaatattctcagttatgacatttgtttgtatactggtagaactattacaatagcattacaaatacagtttccggagcactgtgaccatttttgccaaatgtacacttgtcagtctttttctcctgggaattcctaagaaaaagagtggtacagaacagtgttttccaaacctggctgtccatcaaaatcatcggaggactttttcttttttttctattttgagacagggtctccctctgtcacccaggctggagtgcagtggcgtgatcttggctcactgcaacctccatctcccaggttcaagtgagtctcctgcctcagtctccagagtagctgggattacaggcatgcatcacactaatttttgtatttttagtagagatggggtttcactatgttggccaagctggtctcaaactcctgacctcaagtgatctgcccacctcggcctcccaaagtgctgggattacaggtgtgaaccactacgcccagcctaacatcgtctgaggaattttctgaaaaacaaacttaaatgctttctctcaatggtgtgtatatatacacacatacacatatatattgcgaatatatgcatattgcatttgtgagtaaacagcctgttttgccaatgctgttgggtgaagaaggaaagacccagaagttctcagcatggaaactagtttgagggtttgttctgatttgggcttccaaaagagggtgttggtgccccacttcccatctaaagagaaccatatgatgtgaaacttggattacagtctacagtgagccccagagccaggcacagggagcttccctgtttacctagaccctctttttgaggagggaggagggagataaagacaccaggcctctatctccatcgtgaataccaggcacttcagcttctttgaaaagtattaatatggttgggattagaaagtaggttttggggttttcctaagatagaacagcccaaatggcataatcaatacatcacctagcatggattgttaacaagatctgggttagaaaaaccttcttgcaagtcataaaaagcaactggcacagcagtcagatctcttgccccagattatctgcaccatgttccttagcatcgtggacaaatggactcattccctgtacctactgagctcaaaggatagacctctcccagtagcctatggttcaggttcatcccatcttctccatcactgaataggacccatttcactgtgaaacagaaaataggagagctcaaactgtgtgattattataggggtgtcaaggcagtgaccttctggggttattctctggagttgttgattctggcctctggaccatgaaagacctgaagggaagcctataagagaattctgtaagccttaaggatcagcatacagatgaatgaataatgaactttcaaatctttatggacaatatatatcctcagaaagcagttcagcatctgaagagacttcttgttcttcagaggcatcaaattgggtccttcatgacctataatcagatcttggtgagtcatcttgtacaacccttcctgggttgagtcctgggtcagactccctttctaaagaggatacagaataagaaccatgttggagtggcgttctcccagaagacactaggtcattcaacaattcctagagtctgttggctattaacatttagaaacccacaaatgtatcttgaagaagtatcctccaagattcaggatcagggattctcaactagagaaagatagactaggttattctgatcatttacatattaagtgcagagaaactctcttttcccatgcttggagctcaaggcatccattcacctccagtctgttggcctttgatatactttggctctatgttcccacccaaatgtcatgttgttttgtaatcctcagtgttgggagagggacctgatgggaggtgattggatcatggggtttcccccttgctgttcttgtgatagtgagttctcacaatatcttgttgtttaaaagtgtgtagcacttccccctgcgtgttctctgtctcctgctgccatgtgaagacatgctggcttccccttcacctctgccatgattgtaagtttcctgaggcttccccagccatgcctactgtacagcctgtggaactgtgagtcaattaaacatcttttcttcataaattacccagtctcaggtagttctttatagcagtgtgagaatggactagtacagcctccttgtgtaagtttggccctccacacctgtctccactttgcgggatttagaatataacaatggcttggaaaccaccacccctgcagaacccacaatgacactgggtcagccctagcagtccactgccactgtgggcatactagctgagagttcacactgaatcaaggagacctttatcttctaaaccaatggattgttaacaagatctgggttaaagagaaaccgtcttgcaagtcatgaaaagcaactggcatagtagtcagaacatctctttccaagcagcagcaggaaggcaggtcataaggcataaaagaagaaaggaaatagcaaagtgaggctgtttttctccttgaccatctgtgtcagaaccaaaacagtactgaggattttacatgtaatttgacaggaccaaaaagcacctggcactctgtggatctctgcggctgactcttgactgtgcagttttttaatgcattctcacagagctgcctcatatttctcacccctccatttgctcagtgattaccctgtgtttgaggggtttttctccttccttctcctgacaatctaccttccctggtaccatgtggctgagccctaagctgggatctcctgtcagttcatgcacatattccccactgctcttgggaaggaaaagccagaaaaaatttctgtcattctgcttcaagttaacccaattctgctctctcaggaaaacacacactatctgtctttcacttagaaacttttttgcacttctgtttaagaacactagatagtttcagattgctttttattctatttctttttctcccttgctgggcagaaaacagaggctgccgtggtcacaatcctgaaacaaataggaaaagaggaggcagagaggttcccacaatctaattatgcttctaaatgctaacacctcatcaggcaaaagctccaaaaaagactccatgagcattcaacaatttctatctacaaaaatgttaaatgtcctttctttctttcttctctaagtccagaggtcttattcctattatagagattccagaatatagagagatcaacagacacattccaggtcacacctacaggtgactggcaggcacctcatgctgggctccaggatcatcttgaagccaagtcatctgtaaagtggctgtagtggtcacaaaacccatcactaaagtttgacaaccaccaattcagttttacaaatgttaactgagtgccaacaggaattcaaagatgagtaagacacagtgctctccagggttttgcagtctagttggggcttgtaaaataaatatttcttccaaaaagttataattcaaggaaaaatatgttggatgtcataagaaaggtacaaaatattaatttttaaaggcttctaacttatccattcatctacgaccaattctaaaatgtagaaaagatcaaccaaaacaattgtgtgagtgtgcatatatgtttacatgtgcacaaagatggccacagaataagagggacagccaaagccaacaaccccttgggtataggcatcaattgcccaaaagtctaacagttaatgtcaatctaatagggcaaaaggaatagaataggtgtgcatcctgccaagaaaataacaggttaaaaccagattactgtcctgttgatagtgtaaagccggcagttattctataaatgataaaggcaggacaggagccttgattaatggtcaagtcaggttacttggtgaagacctccttccaagaggagctgataatgatggccaaagggggacccttgtatttgtacaatcttggctacacctttgagagttgcagaatacttaactggggctcttttgtgaccacaaaaccacagaaacaccctggtgccattttgagaggaaaccaaaaagacatccctaaaagaagagctccctttagccaactccaagttaaaggtaaaattggtgcatccaagaattttcctccattacagtatacccaaacatatgagctctgcatggacacatgtaatgttctgaagccattatatgtttggatttacacatcatgtcaattaacatttatatcaaattgcccttttccttcttaaaatgatcctgtcatatttggtgctcaagatagatcttgaaagtagaataaactttctttagaaagaattttatgggaaaaagcaggaggaacggtgctccagacagcagcaataatggcatggaagaggagaaaaagcctgtgtggagaggagctgtgaatagggcagcagtgaaaagtaggcgaggagggtagtttggtagtttgggaccatcttgtgccaacactctccaaatggtttcttttcctttcttttctttttttttagatggagtctcactcttttcatccaggctggagtgtagcggcgcaatctcagctcattgcaacctctgcctcccgggttcaagtgattctcctgccctcagcctcccaagtagctgggattacgggtgcccaccaccacacccagctaatttttgtatttttagtagagatgagatttcaccatgttggccaggttggtcttgaactcctgacttcagatgatccacctgcctcggcctcccaaagtgctgggattacaggcctgagccaccatgcccggccaaatggtttctcataaaaacactaaagagtgtctgagtggtctcaatgtatgaaaagtataattatgagcaaggtagacagatgataatattgagcactccctaattttgcaccaaatatgacaggaatattctaagatggaaaagggtaatttgatataaacgttaattgacatgatgtatgtaccaggtactatgccaagcaccttagatttgttatctcacttaattctcacaacaactctgcagcaatattattgccctcatttgacatgtacacagctgaggtacagtgtgcccaggtcatgtgttcaaagtcacagccagaagagttgctcaaatcaggtctccctgactcctccctgcagttcagtgctacttctttggcctctatctactgtcttagtttcccataccaaccagctttctctgcttctagtatatgaaggctgtctgctttcatgctttcatactcacactcatgctcatctcccaacagaggccatccaatacactacagggttagtactcagctgacaagattatgggcaaaaaaaaaaagccctcagaattcagaaaaggcgctgaataaaaacctctcaaaagtctaaacctatacacatgcccaaaaactgcccttataataaagcagatttttcattctcagcactggccagcaatgagccacacagctgtggaagcctaagaatttgggcaggaaaatagactggcaaagaaaaagaagaatgtagtcaagccccaaagaaaaaaatgttaacatccggaaccaattcacccacgcaggctagggaactgttacacccagttctccataacacccctcagcaccgcccccaacactcccctacacacatacacacacacacacgcacacacactggctgaggcttggtttactctctgctcacccctagagccatcaaattggcctgtgtcttcaggaagcacctcctacagtacctaccacccagtcagaatatcacagagatgccttaaatctctgtgttgtcacagtctaatctgggtaacgcacagttgtaccagatgggatctaatgttcccaggattaatgttggtcatgcaactagtgctctgaacactgcagggaaaatgaaatgaccaaggcctggctggttgcataccttgcagaatctacatttctaatgtgatagatctgatggatgagatccagtaaatcacccaagattgcagtgttcatctcatcctctgccacattctatatttcaagagtttggctctctatgggttccttaggaaaggaaatggacccagagattcatatgcttctattgctgcaagagcgtatcaaatcccatcaatcagttgcctgcatagagtggtgctggcaacaggagaaagcaaagctttaaaacagagatggattttacatctttctcttttttgcttctgaaagccatttttttaatcactgggcacaacagacaggaatatgacagactgtacaactaaacagccaagaaacacattaatgctaaaatccacgcaccaaaacaggggcagggggctggattttcttcaaatccctgttggagacatcagacttcctaagagaggaaggttacttggagtggagaaaaagtaatggaaagacagtgaacaggtgtgccagaaaagcatgaaacctgctgttaagttctctgaaactcactgctggcatctcatccacttacagcattagaagagtaatggagcacagggtgtaagtgttcattgagaagagagacttctgcaaataactgctaccataccaaacaaggctactctaaatagagttgttacaaaataaatgaatcagagcagtcactcagaggttaaagttaaaacctctaccctaacagcgggtgtacttgccgtgggtcctcaaggcagtttcctaatcctagggcattaaaaagaagccactgtggaaatcagaatctcttcctttgtaaattcaatccatggcaaagggatttcagctgtgattactgagtttgaaaaaagtcaacagtacttagaaatgcacgaattgcccgtcattgcaactgatatgtttctaagctgttccattttgaatcaattaccaatgagattccatccatcccattgtgaatggagaagggaatgggtaaaacagaacagttaaagttttcccccgaatttcactgcatgaggagatttaggatgcagaggttttagataaaattcaatatgtagtcactacacttcagacactgagatttttgtgcattaaagtcaaagaaacgcaggtcatgtcgggaaggctgcacgtgtgccattccaaagaccatggcttagaaaacaaccctatatcactgccacaaaaagacctttactagcaggtatggaaaagtcaccttaggagcagaggaactaagaatgacaagcaaggaaggaaaagacctggaaactataaataacctctctctcattcacaatttaacaatttctgttttggtgacaacgtgagcagcaaacataaatttccacctacaaaggttcaacattctccctagagctcttaagcatcatctacagggcaggcaatataatctagtggttaaggatattattctggtgccacgcagggctgagtttaaattctggctgggtcacttaaagtatactggaactgtgcaactgtgggtgagctatttaatctgttaagcctcaatttcctcattggtaaaatggggaaagaattaccttcctcaaggcctattgggtagatgcaatgagagaatgtgaataaaaccatccacacagtacctggtacagagtgtgctctcaatccatgaaagctactgctggttagagttgtggacactgagcaaagacaatgcttggaaaattggagaagtatagtaacatctgtcttggagataaaacatagggcagagtctaatttgaacactgagacctggcttccagaaggaaagtgcagctcccttttcctctggatggtcaggacctcagcacttcttcttaagggccctgggcttcttgaaggaggctgaggaaaggatctcttctctgttcctctttcctagggaagccaccttctccctctgttgccaggaaataatataaacaaagtctagggtgaaacaaaaattttaaaaaagtagtaaatgatcaaatccaggcttctgttttacagaaggaagaaaactgggcaaaccagggctgccaaatgtgggttgtccagccgtaaacatggcaaaacagagctggggtttctgttgttcctctaaaaaaaaacttcccagattcctcctccccgacattcagctcagttataggttttcttttaatttagtctctttcttcttttattcttgttgttgttgttgttttaattcagccatgcaacacccactaatcctctactgcagcttcaactaactggggcaactggctgatttttcccagaatcctgggggtacattggaatatggctttacagacaaagaatgaatccttctatttcctatccggtaaagtctggttttttggggatttctgagctccgggaagaaatatcaaaaactaaccaaagagaaacatgcttgcattattccacttccctgcattcagaaaggccctcctgtcttctcagagctgagctcctggggaagttggtaaggctgagtctcctcagcccggcttctgctcaccccctcttcctactgtatgccagccagctactccccaccccttccccagatgctcactcaggttggcattttgcctcagtggaacattcaatagcaagagctgtcaaaattcctttcgtctttattagccacaggtactcaaattctgtactgtttctaactgcgggctataaacaaagtggggattccacttcaagtcccacacattccatttaaagcaaaagaatgggggagaggggcaatggctgctatagattataatttgcaaacaatttcttatccaagctgctcactaaggtgagtaatcgctgtcaattcaattgacaggaataataggctttgtgctaaatcttttgttcctgtatgtgaactatctcatgtaattctcaagtaatcctttagtgaacacatttattattccaatttcatagatgcagaaactagggttgagggtgattaactaacttgcccaaggtcatacaactagcaagtgttaaaaccagggctcagacacatgaagtctgaccccaagaatctgagctcttaaccactacactgtataattcattcattcattgcaccaaatagaaatgataataagatagagtattttgtgagtgttttgatatacatataattgttatatacacatatatatgcacatatatatatatagcacaggggctggcacagagtgcctatttaataaatgttgctgtttcttatcgttgttcttatcgtgttatcattattatagttttgttatttattaagtgcttcctatgtaacagccacttgtcctaggttctggagatacaaaaacaatgaggacaaggtcattggcctacagtagtttatagggtagtagcgacagaggacaactagtaaatccacaggttccatgattgcagaagtctgcacaggggctgtgcagaatgtggacatcagatgacggtggggagccatcactggagtttgaacccacctgcagaactctgtaaggaaataaagtcctacagatagaaacactagaaaccctcctaggtgtatgctgggcacagttttgcatctgaccctgccctcaagttcagcagctatgaatagaggccttgaatgctaagctgtcttctgatctatcttgttgacaagcgttttgcctgttactaagtcatccttttagcattctcacatctctgccagatcaagatctcggcttaagcagactagacatggaaaatagttactagtgctttccatcagactcaaatagtaatgagggggcaactgatttttattagcccaccaattcaactcaccagtgatgaagttgcttttttcaaccctcatttttcaaatccagagtttttccagttatttctgggaatggcacagaaaatgttcaaagcataaataacttacatttcctttaaattcgctaatgccgtagaaccctttcaacagcgttcacgcaagcaacaataggttacatcatacacaaggactggaaatcactgatccaggactgttgaacacgtgatattaatataaaaactttttcaagaactttaccaaagcttttaattctagctctaaaaatctctctcttttatttttattttttggtcttgtgttgctattgctgttaatttctacaactgcagtaaaattccttcgttccaacaaagtaaggatgggtcaagtgatgaccaaagtactttaggagaaaatgttaatatttcaaaaagcaaaaccaaagttaggatcacagaatctcgtagctaaaggggcctcagaagtcatttgagccttgtctccctcacttcacaaatgaggcactgaggcctcatcagtggctataaaacaattttgaaactttttttcaacattaatatgtctggttttaaaacaaatatccctggttccaacatcaatttcaaagctagcactagaatctaggactcctaacttaagctccttcagccctctttctaccataaaaatatggatataatacagaacatgaaggtctgtgttgaaagctttgcaggagagtgaagacatatatatccacataagtaagtaaagtttctgatatattttacaattcagtattcctttgcaagtttgtttatacctttaattttttaactaaatccttctttctaaatagtacgtatagcccctcccaccctttgatgccaaaaaatatcaaattattaattaaccttctaaattgagaaaacatttctgaacccagggaaggcactgctgtgttcacaatctcttgttggctcaaatgtttgcccctccccactgtgaaaatcagttatttatttttcaggagcaagagtggaagaactaaaccacccgaggcacctagcccctaggtttacaattcggagccctgtatcctggagagattaaagctttggagcaaggatgcatcgggacaggacttccctccaaagggaagccattcccgccgggttcttaaaagaacgcagttatttcagctactagtagtcacttctcactctgcttttacacttggttggtttctttttctttctttttttttaataaaagaattcgttcattgttttttaatccccaagagcagcgggaaggacaatcatttgcttttctttgtctcggtgggcaatgcccgctttctgggcgtcagcgtccctgcctcttaggcacccagggatcctccacgtcacgatcccacaggatgactttcctttttaacagactagctacgatatatactgaccctagatttacccatttggaaatggttagggattaaaagttcttcaagccagcggattcttggtttctaattgctaatgtttgaagtcagtttgattcctcggaaatttgttctgcctgatgaaagcaaaagctcgaactcccctcagggcgcgaggtgtgagacccttgggttccatttgcatttctggtttgtcgttggcgggttcctgatttgtttttgttttgttttggtctgttctgttttttggggggtgtctttcaccagggccttcccggttagcccagggtccccacatttctccaggatgtaattagagctaagaacagccgccatccctcagggttccgggtcccgggtttccagggtcccgggtttccaaggccccgcgataaccccgggcgcacgcggcgcgatgcggcgaggcgaggcgaggcggtggggccagcgcggagccccaggcgcgagaacaggaactcgggctggcacaccgaggcctcgcagccaagccgcgcctgacccgttcgccgttccggccccgcggcgcctccaaggccgggccgaggggccgaggggccgagggcgggcagacgcggccacggcctaattctgacttctgaaggtcaccgaaactgcgctgtttttccagagatgggttgaagagaagagatgcaatcccagttccttctgcggcgaaacgggatctgaaattcttggagagggggaagaattggacgttttcatcgtgcgtggaggaaaattgggggaggggaagtgagtggcaagtaagggggttaactgcttcccggaccctatccggagtttaaactacacgctcccagctgtgggatagtaaagagaacgcagcggtgaggggattcggaaaatcggttcatccagttgacaactaaaagctaaaaaaactccaaggctccgggctaggtctataataatgacctctctaatgttccctttccaagggaactctactcgtcatctgtagtgggtggtttgtgtttttgttttttaatcctctaaagtgtatggcaacattttggaaactgtcagctcatttgagccttggcaactatattgtagaaaatgtaagaagacaaataagaggacgtttttacatgcatttcttacgttcttaaattaatttccccaaatcacgatgtttctctagttatttctataagccatttttattattaagatttatcttagttattccgtttactttctacatggaagaacatgaaaccactttttagaataaaaagtagcattctgcccatccaaaattaatacaaattacaaaattaaatgccaaatttagttggaaaagtttccactcctcctgttcttttaaatagcatctgtacagtctcaatttctggtattttgactggtgcttttttttttccttcttttttgagacggagtcttgctctgtcacccaggttggagtgcagtggcactatctcggctcattgcaacctccgcctccctggttcaagcgattctcctgcctcagcctcccaagtagctgggattacaggcccgcaccaccacacctggctaaaatttgtatttttagtagagatggggtttcaccatcttggccaggctggtcttgaactcctgacctcgtgatccccgccccccgcctcggcctcccaaagtgctggggttacaggcatgagcctggccttgactggtacttctgactttggtcacagtcatcagtttatttacaagttaaatgaaaatgcccattacctggaagtttcaaaactgggatgctttagaatcgtcccatgatacctaggggtgacaaaacttttggcctcccaaattttatacattcccaatttgttaaactagctacacacacacacacacacacacacacacacacacacaatggcagtttcttgtcccaaattttgtctacatccaattcagaactgatattttgatgtagatatagtgttctggtgatattatggtgttcacacataagtttgtgtataagcacatacatttgtgaacatatgttttatacacttatctataaaataaataaaacactagctaatattaaaagtataaaatgaaaagtagtcatttgcaaggcctgttttcacttctggtatcaaaagctcatcatcagttttgcagtcagcaagatatcctgcctaaaagtgaagccattagtggcactgaagaaatgttgattggtcctcaccagtttcttgaattccccttttcccatttcacagcgggtcctccctactaaatcatattttccacctctgacacttagagcaagggcctcacttaaattaactaatgattatccttcccccaaagaagtgtaaacaggaccctaatttataaatttgctaattgctgttcccagtgcagacccctgagtatgtcagtcatgcacatataaaattccagacttactagaaaccaggaaaagcaaagcaaaaataaactacacggatgagaaagagtaaggaaaagagattccacattccaccagttccttagttttcccttttgtgaaaagtatctcaaaaggtcaaaacataaagctcagatgggaaaatcatttaagtattttctcctattgaacaactttatcttttgagagtaagaaagcaataaccagctgcactcccagaataataatcgaatggagtcctgtttccagaaaggagaaaggtatatagcatgccaatctgccctttatccctgtggaatttgtacagttcggccttgctttaaaaaacaaaaaacaaagaaaaaattatagccaccctgagaaggaattcacagatttaagaggtaattgtttttctcccgggtgtgagaaataaagttctaccagagtctataatcaggatctcaaagcgatcctctcatcttataatttttttggcaatagaacgattgtgatggaccggaaatatttcactcaataatagcattgcatgccctaagagaggactggatgaacacaatgtttaggccttctaagccaaaatgtagttgtccctttctccttgtggcctaatatgagggttaatgacgaggaactcgtttccatgtttacactcatgaagcacattatacagataaatggggaacacaaaacacaatacccagtatttttagttttggtccccagtttaggcattgcatgccattcttcactcctcacatgctgtctatattaaaagattttaaacaaattttctttcataattaaaagatttttaaccatttgaagtcattggtatgggaggtgtcagaaaaatggcagacgatttgtgtcagcatcatttcagtctgaactcctgtttaagaaatttaattctcccttcctccctgcatgaaggttgcccccatgaaatcttccttctgggagtttcacctatacaaatcaagatacccaaagtggcaagctcagagcccaaatatagtgctcagcaagaaataacgttgagttgggagtagatctgaatttagaattgcagcggcggtagactgtgtgtgaagttgcctaggaaagccttcgctgcccatgaggtttgtgcttccccagcgggtctctgaggtgcagaggtggacgccagaggcgggtgaggggtcgccctgcacttcgtggcagcaaaaggagagacccgcacacccccttgtgatccctgggtctatcattactggcttctgaagcgcgggaacctagggtgggaagggacctttggagatgcaaaccatagcacattttaccttcctccctatcacagtccaaactctacatctgggttttcccattctctgaacttcccattgccctagtgcagtttgctgtggtcatttctttgggtgggaacaggttacaattacttccctttgcctactggtttctattgtgccaccgcgccggggccggagttttacatagaatgtcttcataaccatccccgctgcccgggaacccagccccgcgcacccaaagggcgtctaatttagtaagatccgatcagtgcgcagaaaaaggcccttggcggtcatcccctcagcgaacaataatcctcactggcccatgacaaactcgggccttagatccctctcgcttcccttcacacaaggtcacttaccaaaagggtgacctccgtggaagaccgttttaacctgacaagcgagtaccttgcgtaagtccaccaggcctcacccttgactcctcggagccaggcacctccaggccagcaccagtgcaggggcgtgcacggcagagacaaaccaaggttccttgtccctggactcaaccccagcagaccctccggcatctcactctacgcgttcgccgaacaccctgtccctgcggtctgagctccggcctgtgccctggctggcgcttgccccgcgcaaacacaaacacattctcccccgctggcttgaactcatcactttttattcgttacttaaacgtcagtaaagagtcacttcctccgtgttcaccctgttaccctattgggggttggaggttggtagagaggtgatgtcagaattaaaatctctgagttttattttgagcaaacaaaccataaactggcagattaattcatgtgaccacttgatctagataactccaaagaagaaagtgccctggggcggccgcgctttctgcaagggcttttcctatctcatttcactagcagttgagctgacgggtgcgtgcgagaatgcgagacctgccacgtgtacacgtgtacgcggagtgtcgatctgcctgcgtgtccttggatgtgcctgtctaggtgcccacccgcgcgcgccaccacatccccaggcctctggaacgcagctgctgtgtggcccggcccgaagtttctggaggaggaaatccctccacagaaggtttacattatttcgctccgcgggagacccggcttcggcagcacttagcagaagattttggcgggaaaggcccaagccctagctgaggactccgggtggagcaggggctgaggtccgagcgcagatggcgccgccgagcgcctgaaatatacttgcaaggccgcagcaatatacttgcaaggccgcagccggagcagctgttccagccgatcctagctcgaaagttcctctgttgctctgggagagggcgggggagagcaggctcgagagccaggctcctccgaggctggtcttgaggcacttctctagtagcttctccaaaagactgagagtgccggcgtaggtatgacagtgagggtacctcacagacccttctccaaagtctggcgggccttggggtttttcggggccaccaggctcggtggaatttttgaaacgctttcgaaatacatagtttcctctgtggagtgagtgcctacaacgcgcaggccggactgatcccccgttgctgcaggttggtgccccaagctgcgggtgctcgggcgccaactaaagccagctctgtccagacgcggaaagaaaaatgggctgtgaaaaagcaaaaggcctcgtctttgaatgaaagttaaacattaaaatctgaccctagagttgtctaaagatcgcggaattttgaagctccggcagagcggactaaaaaacggtgctatgagagatggtgagaatactctaggcatgaacgtgtgcgtgtgtgtttgtgtgtgtgtgtgtgtttcattcttcccgcaaaacaattttttgtttttttcctattcccggtttgttatcggcctagggcgggagaaccacgcagcggcttctgggccctaaggacaaaagagttaaaacaatgaggctcacccgggaagagacgctgccctgggcacaatagggtcgcctgcattactcctccatacacacatctttaaatgtgtccctgtgtgtgttcgttagggtgctgtattacagaaaaagaaaggcctaaaaacacccccagccctggtcgcgcctttcgctaccgcctgagtctggagccgacagctccacctcttctgctccctggaccgccgcgtctccacgccacggcgccctttttactaaaagatcttttctcatcctatcagcaaatcgttaagaaaggcttagccattgcgggggctccaacttaaggattcccccggcccactaaaaggctaggcccggcctgtagcccagctccgcagaaagccagagggtgctgggctttcagcttcttcctcctagacacttgccccacaaatatatttcgttttctctaatccaaatacccatctttttcttttttaaaaaatgataacgtaatgggaaatgaccaaccgaactctgttacataaagttagttctgttagatcttccaccccacccccatcccgcgggagcgagtaaatagaattcatgagcttagctccccaggttcacgctctggaatggtttctttttgcctcattccctaagttttctctcttctgcctcctgaatggagctcaggctaaggagaacggcagaaagagcaaactctgatctgaatctctaattatgaccccatgtattacccatttgaacataaggccctagacgggctccgtgcgatctggggcctcccaagagaaaacttccccgggacaggacgtctgccacgcgcagctaaacaacttctgttttttccgccgtggggaaaataaaagaaccttacaaattctaaggcgtcataacccctgcaagaacttctaactgtatgaaggcccacgcgagattttgacaatagataaatgagctgaggaaatagggtctggccagcgaagggaaacacacagtagccctgggtgcctttctggaatgcccacgcaggggtccgcgtggacaagcacttgcattcaaatacaggaaaaggcttggacggtcgaaataaatctccttttaattttcttttcatcgactaataaaaataattccccagcactaaactcaaataccgtaacgggccacaaaaacacggagaattcataaaactctatctctgcaggtcacccgctaatcgcattattattagcctcgggagcatggaaattgaactgtcactgcctaaagagaaaatgtaagcgacagctgtccctcctctgagttggacagctttgtggctgagatccccaagctcctgagccccagaccgtctctatcccagtgcaggccgctgccccctccccgggcttgtcagcgtgtgaagcggggtctactccccagctctggctgttcagcaggagcaccttccagcatggttttagaagtccgggctggaaagcttctgaaaccgctaaaccaagttgcgagcgttgtatgtgcgcgcgcgcacactcaagattcttccgacaacagctgttcccccgggctgtttttgcacagttgaaatcttggcacttaacacaaaacgttaaagttggcttctcccctcctagggttctgttaaaatacagacatgacatcccccctgctttttacatgttccgtgcacataatatacatgggttactgtaggatctgagacacaaatcaatcgtacccacaccctaaatacacagagatgtgggccctgaagagtgacccaaggagtaaggggtctaacatccattcttgtttccgtaaacgccaaaggagtagaaatataattatgttccaccatcgaaaagttggtgggagaaaggcaaggacgaggttgaaggctaaatgagacaactggtcattccccgaagactgaggtattggattggagaacgccgcgccagtcctcccgagttctcagaagcgagtcctagatctcggctcccgccgttgccttcggcccgcgcccctcccaatcccagggaccggcagcccttcatccacggacacccagaaagctgcgctctccacccaaaagaaaaagaaatgcaaacaaacaggactccttgcttaggctggcgacgaaaatgcaaggctcagtccagccccaaaaattggttccggtgaatttagggaggctcagggcatttgcgcgaagaaacagaaacctatgttggggcaaggcagggcgtcaatggcagggcctagctcctcacccgcgaccggcgactggcccttcggcgtcccctctccgcccgcctcccgcggtcggctgcgacgcactcacccgggtgaggctccaggccgtgtgccgccgcgtcctccgtgtctccgagtgggcccgcggggctcagcgcctccatagacaggtccagccccttctcctcccagtctcgcagtttccgttttttatttgagccgatcaaggcttcaacggagaaggcatgtgctcgcgagctcagggcgactgcagatcttctcctttcactcattttagccgcccacacccctgcctccgcttgcccccgctaccgagggagcagccggcgccctcaagctctgagcgcccaccgggcccggcccgggagaggcggaggcgcgtcggacgaggctgagactgcggctcgcgggtctctccaccctccccctgcgtcctcctccgccctcctctgccggatccgacctgcgcccctacgctggcccagctgctaggaactagcgccccgagcgccgcccgctcgctgcatgagcgcccgagtcctgcttcccacccaccggggcaggcgctcacagactgtgtccactgaacttcatcttgtttttgttattattattattctctctcctctctctctctctctctctctcccctccctctctttttctctcctccccctctctctctcttcctctctgccttcccgtcctccctgtgatccaaacttctgggaaacttttttttccgctaaattcctcccttcccgaggaacagggggcaggcggtgcgctcctgtccgaggggtgagggagagggagggggaggaagaaaaagactgagggggaaaaaagccagcccccaaccaatagcgaggagggaacaagagaaactccgagagcgcgaaccaatgagaggaagggagagactgaggcccgggccaaagcgcagcgccagtcgtcccctggatgctcctgggccgactttaacccctggcttcccggtttccccatgggttactccaagagggaggtaggacagttgaaagttgaggtctgatctgcgcctttacaaactcctgcaaatcccaaatccatacgtttttcttccagatctgctggtctcatagacgctgcaagtccagagtcactttagttgcagatctggaattttggggctctgacaaaatgttaacctgtccaaaatgccagaaaacgattctgataatttcgcgtcagcccctaggtgctttagaatattctggttcctcctggatttcgccacacaggttttaatgttcctactgaacgttttctaagcaaatctgggtaaggcaaaaggaaacaaacaaacaagcaaacagaaagccctgttactaaccagggtcttgtaactgaaaattcaaagaccgcttcctccttccagctctacctggtggagaaggagacacaggcgccttgagagcaaggggcgggcggcggagcgcggggtttagggcgagctcctcaggcgtattccagctgggccccctcacgccgcaaatactctctttccctacggcccgaacgctgggctgcgcttcgcctgttccgggctcttgttgcagagaacctatggagaggtgacaggcaagaacagctaggaactttaacagaagagaaggagctttttcaaaattccctgcaaatcccgttacctcaagaccatggctttcccggccagctgatctcccccctggccgccccctgccttttgcgatctctaaggactgcattcaacatggatttctaaggaattaaaaaatccaacgctcctggccattcttaattcccacacctcttcccaagttacgccaccggtcgaggacggcaggagacccccgagtgcagagaaagctcaaaccggcagcgaagtcggtcctagccaagctgaaaaaacgtctcggatttcgcggacagcggcctagacacagcccgatcttccagtcctagtgccctggtcgagacggttctatccttttgcaaagaagccggaaagagctgggtcccgggggcgggggacagactgagaggccaagcaggccagtcgtgacgacagccaggcccttagaagtctccaaacctgaaagtttaggttagggggcccacagcctgttaagatttcttgttgttgttttcgcgaggcccgggagaatcagctctcccaccttgcggcaagaaaagatgacttgtcaggcctctgaaacgccgaattctctgccggactgcggaggggcccagggaaatctagtctttattattacagttggaagtgttctggtgctgaaggcaaccacagtgttgtgaattcaccttgggcctctttggacaagaggctacttttgcccccttccttcacccccgccccaaattaggatccaaccaggatgtcaggaagctagcatcccaggcgaatgcaaaaagaacaatggaaaagccaccggatgagtgtgattcagccaagcctgacctccccggagcctgtgtctcaggcttggaggtccccagggagcacgaacatgaactctggggagctggaagcagggtactggtccccgcctcctgcagctctgcccagaggacttggggagcccggatggagaggcgcaggatctcccacttcagtcagcatttggcgttgcttccaggagtcgtcgctgaaagtcagcgcgcattcactgctaccgggcttcagcagagaagctggagacaaggcagacgggaacccgcaatttccttccccagcggctggggcctctctctcacctcccaactctggtgtcgcccggcgttttccgcctgcggctggagcctgcccctaccaagcttggtggggtagcaatggggccggcctctagactttcccagctcttttctcatccccatagccggtatctcccatctctctctggcagccttttgcctttcacagtttctcacaggcctggtttggactgagaagcgggtacaccatatgcctcaccctctctgagaccatggaattttctcaaaaaggaggacttagcctgggcaacatggagaaaccccatttctacaaaaaatacaaaaattagccaggtgtggtggtgtgggcctgtagtcccagctactcaggaggctgacaggggaggatcacctgagcccaggaggtccaggctgaagtgagccgagattgcaccactacactccagactcggtgacagagtgagaacctgtcttctcaaaaatagaaaaaaaggaaaaaaaaaaaaaaaaggaggactttttggttatctaggaacataattgcaagtccagaggcccgattgttcctgtgtgtccaaagacgcagcatctgagaggcatacatagaggaatgagcaatggtttcaacagcatgcatctgcatcctctccgaagcttgcactccgcagagtcaggagtcagccagaagagtttccacacccctccttcagattgcacataggctgctcccacccccattccacagacacacatat

SEQ ID NO: 605 - DNA, 35692 bp, Homo sapiens
  source 1..35692: mol_type = genomic DNA
gcagcagcgactggcttttctgagttggcgtttttgcttccacctttgagtgcagggtggtaaagaaggcattgatgctggctttccatttcctagcattagaacagggacagacccatccaggaaaagaatttccctgtcctctccccttcaagctgattttgaggtcagaatctggaaagggacagaggctggttgaggacactggtggagggagggatgcagcccatgctaagcactaagggaccactctggggatccttattgatgaggattctgctgtctttgcagatgggtgggcaggcctatttctgccccaggattctgggcatgtgacaggcggggaggctggggcacgggctggggtccgcatgggtccgtctgctagtggaaaggcagcgtcctgtgggaggtacagacagagagaaacagaggtaagtggagacagagagctcagaggctgggcagggaggtctaggtgctgagcgggactccgtttctgaggcggaaagaaccgggtggctgggagcaggacgctccccagtctccacttcctagactagggcaggcattgggcttcctcttcagctctccaggatctcaaggagctgccgcggaatcctggccctgggccgcagtttccccaggaggctctgccaagcctggcaccttgcagcccggcctgggctctgtcaaggcccgagccggactcggctccactcagaggccggcccagcacttccctgccgccgccgccccgcacccggccaccgggcttcctcccagtcctcacccctgacctccgcggccgacttcgaggcgcgccaggccgggtccagcgcccgcggccccctgggccgggacaaggagggcgggtgagcagaagggccgtgcccagggcctggaagtgcaaggccgcgtggtgggcatggtagggaagcggagcgtgggcctgtgaggcgcgtgtgcgcctgcgacctcgggaccggggctcccaaatgaacagcgcgcacagctgggagcagggcttggggagcggggctctgcggccggggatccgtagaagccgctgcctggaagcgggcgccggcagggggtggccagacccggtcgtggagcgtcctagtcttcgggcacggcggggccaggcgagccctcctggttgtcgagcctcggctgagagccgggctgctcgcccttgcttcccgcctctctaatctaaaccatgcggggctcccagcccctacccggctcgcggggcccgagggccaagaggagggcactgggccgcgcggtggaggagccggcggctcgcgtggggctcgggatcttggggaccgcgacgccggggaaccctggagcccccctccccgggggacagcgggcgcagactgattgacagcggcgacgtcagcgcggagggggggcggccccagagggagggagggaggaggagggaattgaggccccaaagtgcagccttggagatcaagggcccgctccagagccgggatgtgtccagccccgagggcacggcaggcagctggaccctgacccagcggcgcggagtcggagccccggccgtcccgcgctcctcggacccgaacctgcaggggacctcgggccgctggcgcctccgcatgcggcaccgcaattagggtgagtgtgggttccagccgagtggggacgagctgggcgtgcggggctggggccacaggggctcagggttaggctgcggggacggacaggaggatgagctggaaaggggtgagtcacgcgacccggggaagaacttcaggggcggtcaaagttgcaggaaggcggcgcgaagtgccttgggtcgggccgccgcctcggcccgacacccagtagttggggcacgagccctcctctctgagtaacgcgatgaattgggtctagagatccaagagcatagaaatatcgacagcgccagcaccctaagaacaaggccgtgacaggcggagcggtggcctggaaattggtgtttgcagaatatgcaaggccaaggaagagggccccggtactggagcgaaaatccgtgtagatatgtgagtgatcagaacactagactcagagcctttgatgcaatagactagtcaaaattaaagcaaggaacattatatataaataatgatcgatgattaaagattattggaatgtgaacaattaccaaagaaagggctaatcggcataactgatataacacgtgaacttccaaataatacaatcatagtcactttcagaatcaagtgaaaatagtaatcacaatttttaaaaggattaaagacaaagtaattctaaatagaggaacaatgtaaggactgtttattaaaaccaattgcactaatataacatatagtaatagtgtaacaaattaccaaactgtaggaaactagcaaacgaactgtaggagaaagatgaacaatgaaaatactattaagggaaatactattagtggtagtgatataataatataatgtattattgatactacagtgaactattaaaagaaatattaactaaaatcttaggagcaatagtaatataaataaagacatattaacaagaattgctggagtaatatgacaatttatgaccaatgtattaatagtcacaagaacattataaataatggttgagtaataagaagtattgtaccaatgtgatgaaaaataatcagagtattaagagctacaacaatattacaaagtatgacaaaataacaagaagtaatgatgtgatgagtaactagcgagttcagatctgtaacattacaaataatgacaaagtaacaagatactgtcggggtgtgttgaagaataatacctggagtgttatgagcaagcctaacaaaacaaattgtggttagataacaagaagtattataaggatgtgagggaaattaacatgaattttgagaacaattatataacaagttatggtaaacaagaagttattgaaacagcgtgacaaagtataatcaaaatgaagagcaagcaacggaaacgtattagggatacaaagcaagaataaaaaattacaatagattaacgtgacctattgttcactatgtcacctcgatattggaaatagtattatgaatgtgccaggcggccctgaaatgatggaacagtgacaggaaaacaacaaatttagtaacagtaagctaacgaatcaaagcagggctttaaccatacagtattaaagatacaaagtagtaataatccacgcgataggatattctcaaagttcccgaactgatcaaaatactactatggtaataaggacaattaaaatattttaaaaagcacgaaatagtaacagttcccctagtgcaagaaacatatccccagtaacctaaaaatgaaaagagaaatgctgtcgtctttggaaaacgaggcagctgaaagcaacagaccccatcgcaaaggcagcggaggttgcgggccgcacccgcggaggagtggatgtgaaggacgagagcggaccgctatgcggtgctgagtgcgggaccccgcggtgctggcggcggccgagcgcgcccaagctcgaggtccgagaggaccgcgaggacggccgccccgggccagccgggcgtggaaaaaaggaaattgctgggaagggggcaagctgtcccgaggtctggatgtggcttcgtggcggagagaaaaggaagaggcaaaccctgagcccgggagggagagcactgagcaggcctcgtccccagtccgagctgcgggaccggcgtcagtggacgcgggcggtgaaccagctcctcacagggcagggctgagcgcgtaggactgagagcgcagggcgcgagccgcagggctccgctgcacggctccgggtgtgacaagagcccagcagaggaccccatggccatgcgggccaagcgcgagacggcccctccttgcgaccccgcaggccgccacatctgggaccagcggatcgcttggtcgctggagccgatcccgccggggccctagatatagttggacccagcgcgctggccggagcgggcagctaccctactggcgcagcggccctgtgtggggactcctaggtttccgaggctcggcccgcgttcgcacgtggcccgaggcgggtgctggcgctggccatgtccagcgagtctcactccctgcaggctgtggccgaagactggtccgcctgtcaaccttatctttatgggtttttcccaacccagactggccccggcccctttttatctcctgggttgcacttggcttgtttactttgcgaggtcctgggagtcgaagtctaagcccgggatgaggaggcctctgaacaagatgggcgagaggcctgagcccggggatgctccgggagggcccggggagagcgggaagaaggtaggaagagaaaggcggggcattccgcctcaagaagggccgtcagacctacagaaagctccgctggagcgcccaggtccagcaggatggggaagagcagggaggtggaaaggggaagcggagcaagcggggcacacccttaagggatgcgggcaggctggcctctcaggctgtgctctcatcccgaggccccaggacctgcttcgggcagggagcaggcacctgagtaggcgagggaatcagccaagacagccgaagaaatgtagctgtgccaggcagggctaagcggttcctgtgaatgggcccagcctgctggcctggtccttcactgggaagggtgtgggtctttaggcccaaagcagagccctgtggcgctaaagtgtgcctgagtgagcctgtaggttcgaactcgagcaccaggtaggggaggcctgggctgagggcagagcctggatcagtcacccaggagagtgtggctgctcaggctggtgggatgctgtgtgaggggctgtgtttgggtgtgaggatgtctgtgccagaacgggaagaggatgtgtgtggacggggagtgtgttggagtgaaagcctttggttcaggaagtctctacctcagtgctgtctgaggggttgggtgagggcagatgggtgagctgggcctgaggtcctgaggccctctctgcacacaggtgtggagctgcaggagcctgggccctgccctccagcctggctctcctttcctgcatggccaggaggtgtcctggctgtcctgggcccacagagaggcctggaccccagttattggggaacagccgagaaggcccaggcctcaggctccaccggagctcagtaggagtgagggactcggggtgcagctgtggcaatgccgagagggcggtccctcccctagacctactcatcacagaaccccacacccaggggcaggcagacattgaactgccgcagaccctcccaggtccacagcctgaagggaggaggcgagggacctgccttccttgcgggttccctcctccagctcaggagggggcggggtccacgtgctccagggctgcctccgcgccccgcacgaagtcccggaatcggctggagagggccaggggtcctctggcgagtgtggacctgggcgagtgactcgttgtgtgctgtgcccgcaggagatgctgcaggataagggcctgtccgagagcgaggaggccttccgggccccgggcccagcgctcggagaggccagcgcagccaacgcccccgagcccgcgctggcagcgccgggcctcagcggagccgcgctaggcagccccccgggacccggggccgacgtcgtcgccgccgccgccgcggagcaggtagggctgcgccagccgtcgggtagaagtcgggcgtcggtctgtctgcggggccgcctgtgtccgtctttccgtccgattgtcggcaggactcgctttcaggaggacctggctgcattcaggacggtctgcccgttcgttctccactggacatggctcgctttctctgccttttgggtccttctccactttgagccctcggggctactctgggacaagcaagagctagagctagagatagaggagagggcggtaagagagagggagacccccgtagcatctgagcgagcctggaccaagtgtccagctccaacaacccgtagagggcctgggacccaacggcgagggggcaggaggaggccaccccgccggtgcgcacgggagccgctgcggggatccgaggcctctgggacgtcgccgagggcttcacagtgataatcggacgatcacagcgcacgggatgccgcctggggatctgtgtgcactatctgcaggcgcgcgcctggccgagggtgcgtgcgcctctccctgtctgtgtctgccccgggagcctgtggcgatggcccgccacagaaatgttcatgagtgagcaggagtgtcgtctaacctgcgctggccactatgtgtgtcctctgagggttcctccgtaggtgcagctttaaaggaggaagttttagccaccgattaattcttttatattcacgaatagttcaaaatcgttctgtgaaacgaaatctggagccatgggctccgggcgggcagggttccgcacagctcttcgggtctggttcttctttcctcaggctccgcgtggagccctgggcctggcagacacaagtttctctccctcccatccccagaccatcgagaacatcaaggtggggctgcatgagaaggagctctggaagaagttccacgaggcgggcaccgagatgatcatcactaaggctggcaggtcagcgctgggagatttacttccggggatggcggtggggagcaaggggggccagggaggtcccttagaagtcctctcggccccggcctggtggcctgtgggaggcctctctgcctcctcgggcgtcagtgccacctcccttcgcagcttgggactgggccgccaaagcccgcagggggccaccgcagccgcgcgggccttgcgggaaagaccgaggggaggggcagcgctatgcaaatgaatccaaacagggatcgcgacgctcaaaagtcccagctccagcacttttggccccctggggggctgctttgccctcctctctttgaggacctgaggaggtttctcaggaatgcattgattggagacccagagatgcctctcagcagatggggagagggaaatagactatgctgttcagttttcatacattttcgtgagtgactcgaaccccaagtttttcatcccaggggcgccgctcttctgtttccatccccatctctggccaacgggaaagcactacgttgggctccgtgtgtgttgttgggggagcggctctcggtggctgccagaaaaggatgatttataaagtggaaacatctttaaaatgcgctggtgtctgtgggagagaacagggaggagaggatgagaggaggaagactcacggcgggggtgggggtgagtgagagattcgctggggctggtggggtgggggcaggagtgtggaggagaacggttatcaggtgaaggtggattgctgtagacagagacgctggcaagttcaggttcaggaactccctccccacccactctatcccctgcacatacacacacttgatttctgtccctgaggacagattaggtgtgaaaatgtccctttgcctggatgtgtctcataattgggattttgaaggaataagatgatgaaggctcaagtgccaggaatttggagtcagaccacggtgggtgagggctgcagttccaactcagctactttcatctgtgcaacctcagacaaggtgcttaatggtctctgctccctccccactccatctgtaaaagaacaggtcttgcctcatacattgtatgtaaagcaccaagttcctgtcacatgcaagcacacaagaagtgctagcgaataatattagcaataattagagaagtgtctggcgtcccactcagtattttcttctactttttagagaactcagctctgctgaaccacttagtgaatgatagactattcaaaggaaacaaaaagccggctggtttgctgtgtgcagcgtatggggtgctgtggtccttcctctctgctccctggcaggccttataaagtttcctttcttttgttgagggtggaggtctgggcacttggccaccctcaggccttagccagggaggtggcatcaccactcagggcctctatcaggagagaaagtaggtttagtttagggcttgagcttgctgtattttggggatggagatagggaaggaagacacatgaaggggctggcagagggtgcgacatggagcaggcattgaggacagtggaagccaggtgtcacaggccctgcctctttctggctgagtgtacttgggcaagtcacagtctccttgtagctcagtggtgtcagggaaatggtgaccgtagacctatctgctgtcccttccttttctatcactgtgaaactcaaaccagggaatcacgtggatgatggttggtaaatggataatccacttgatcaagtgcgaaggggaatggggctatttcttgtgcctgctagtgtggaaagaaggtaagaaagagaaaggttcagaactgccatttttaggcagcagaaataaccttgtctcttgaaaataactggccagcatgttctctgggcatgtctggcctttggcattttaaacaaagggcatttttgtttgtttgttttcctcagtagtgtttcctgcatctgcatgggtcctcctcctccctctcccaacacatacacttatacacatacttccataggtggccagcttcaggcagatgtttgtgcttgatcctagttgaggcttagagatggaccttagggaattatgataatatttctaaaatggctgtgatgatgttggccaattatggatccatcacagcctttcacttctctggcagaaagttatccttgcactgggtctggttcttaagaaaatcactagtctcatgcccccaacccctcacccctcacagaccccatttcctccttcatagctgcccccctccttcagcaaccactgtattgctctgatctacgttactcaggctgtggttcttcaacatcctgtccagtgcctctccctgctccccaaattctgtgtgcctctactggaacccttcttggtacacgtccatttgtcagcctgggccctgctgctaaacctggaatcatagcttcctagatggctagagctggaggagaaccaagagaacgtaaaccaaaccccagagaagggaagttaggcagttaccaggtccacacaggaaaacagatgagacaccccacccccagaacacagcccctactttgataagttcccttgattgcttttttacggggtcctattcagtgtggattgtggctctgccctagagaccctggctgattagggacacgataactgccatctggctgggtaggagcaggccctggaaaaggggagccagaatgttctcaagccaggttgagttctcagatcacaagtttccttcctaccttagccctttgggtccttgagagtcttgaaggttgacagagagaagaatccctttcactggatagtgactttgaactgccaaacaatttggcctggtggataaaatgccaaccacagtgggagccaccagtttctgaatactcagcgacctccatgtcaggtgtgaaatgggggccacagccctccgcagcccgtctcagtctcttgggtctctgtgtccagagggttcgtgctgatagccgcagacagcagatccctctcttggcctccccacatccctgccaagcttgatacatgtgagaaactgcattttctcccaaacatagataaaagtgagctccacaaaaaaatttaaatataaacctccccaaaatgaaaattgcctaactgtctcactgccctactcctaggtcagggttttgccaccagataaatctccactatcagccttcatagcctgttgagttcaatgttgcttgtgttagtgacagtgaatttgcgtttgaaaaatgaactaccgatgagaactcctgttgaacctgtattgtttgttattctgaggcaaggatttggcccggcttaatccggggcttcaaagccaattgccctcactctgtatacagagcgtcagagcccagtggcgtggatgataagagaagtaagggttgaagacactgggaaagtgggttggggagagagtgctttgatctctttttaaagtattttctgaaagcaaaagtctatcagaaggaagtgcctttaaaaaaaatctaagagaagcaaccgatcttccaaaacaacatccattccacacactctcacccctgcccctccctcagggaaaagatttcttaaatatgctttgggtgaattagaaaactgtgtgtgtatgcctctatgtatgtgtgtgaaacgtggaaatcgatttattatcttcaaaatcagaactcacttggctacagaaggcttggtctcagtgtaggtggcaccagcagccccactcctaaccccagccttggatgctgggccctggcctcttccccgtacacccaggattcctcctgaaaagcccccacggacatcagggttggagaaacaaagggttttaaggggacccctgccatttcactgctgtagggttcttttcagactctgagctccaaggcgcctgtgtatgtgtacacacatatataatttttaacctaaatgtattgaagtggaacattcctacagaagagtccacaggtcttaagggtgcagctttacagacttgcacaaaataaacacactcgtgtaaccttcatccagataaagaaatagatcatcaccaccaccgccccagaatccttcttgtgtgcctgcccagtcagagccatccccacctttgaaaccgctctctagacttctgaccccttctggctggtgttcccctacattaagggagggtccgtgtagctgttcctggagtccccagggacctccgagaaagtcggggctgcagcggggttggggcttgggggaccctccaggtggagagaatctaggggtatcccctagtctctgtccctttccccaggaaaggggctgagagtaagcgccttgaatttggccaccgctttggccggggagctcccgcggctctcgcagcgcagctagaacttgcgtgttccctcagcagtgagttcgcagttacgggtttgttgccagaattaaaaaagccccaaacccttgccccgcgccccgcgcgcctccaacaccgagaaacgtccgaggaagcttatcttagcagttcattctaaagccatttccgagtatgaatagataaaggctccagctccgcaccctttcagagcctgtttcatgatcagaggagaagccccgggctttcatctcctcccgggccggcgagcaggcggcttgtttattcccctggcggagccgtttccgcgtgtgccgtggggagggcgggggagcccccatctgtctgggggcgcgggagcccgacggcgcgaggggaactgggggagcatggagagggcgcttggggcgcggagagaaggtgcggggcacgtggaaagcgtgccgaggggctgggaagagggagggacaggaggacggggtgggagcagggagagggtagggggcatagggagagggtgcagggaggggagagggggagcgcgcaaggagggggctggctggggcggacccagaggtagagcgcagagtgcccgggacaggcgggcttcaccgccagcgctggtggcagggcctgcgtggacacaggcggcacacacagtgtcttccttcttggtcacctcccccaccccaacacacaaacagggaggcgttgctttccaccgtagggtgttggttttcaggtacattctatgtcataaatcacagaaacaatttacatctcactccatcatttcaaacctttcatgagagaggcagagctcacaggaagtcacagctcccaaacccagcctggcctctgtcgcctgaggcatgccacgctggggaacacccccaagtcaggcgtctaggcaccaactttagtcccttcaagaacccaagggcagatgcccaaggggccttgaattctcccctcgacctgggcaggaagccaatggaggggacagagggggcctcactttcacaggcagccctttcccaacgctgggtggacccttcctccttctggagccacctaggcagggaaacggtagtgcttagggccccccaccccaccccagagtgggttctgcatggctcagaagcagtcccccaactagaccctgccaagacctagacatctgttgcattgaaggcaatggaactccctgaggcagttcaggccacagcagagggcttttgaactccccattcagaccagacatcctacgtccctgtccctcggcttctgagcgctgctgccttaggtagaggggaattggtgggcaggggaggcgaggctgggaggtactccccttccctgtgccgacgcccacatctccttatcagtcaggaatctggcctacgatcagcttccagcaggggccaggtcccaagacaccagctggggctgcagagaacaggctcctcaaaggccttccagaaagcacttagttagtgtcagcctggccccctgggctgtggaaatgaagcccagcagggagaaggagaggggaaggccagggccccttagcctcctctcagcctaggctatgacgcgtgccaaagtggcagtgagcccttcgctcctggccccctatgtggacactggccctggagggaagccatggctgccctctgctgttgccacctggaatgatgacaggaaacaagctgagtgcaggcccccggtgccaggccagcccaagtatggccagggctgccccattttgtggctgtttctgtggcagttacaaaatggtggcctgcagggggcgggattcttggccttaccccagggaagggggaggtgaggcagctgctgccctccctgcttcagctgttggcccaccaggagagaggcagggccgggaaagggtggtgcaagatccagctgcgcccccaggccccataggggggctggtaagcaggaggcagggttgggttcctgagcccctcacttcccccattcctggagagggggtggggtgggtatttgaaaatgctttcaattgacatctgagacaaattcttccacaaggtttataagtccctagacttgcagctagaacttccctcctccctccaggcacgcacacatccacacatgcgcacttgcacaccgctcacatgcgcctgggcacacacaccccacatccccacgtccccgccctgcagtgcttgcacaggcctctcctccagcaagagaggggcacaggcggggctgggtggggcgtgggctggcaaggaagtgaaccctccacctcggtcggggtcctcgcctgggcttagggcccgccagcttatagaggccttgatcctttctggaagccctgttctgtccaggtaagctggtgcccctggtgacaaaataggggcctctgatcagctgtttgtggcatcttggacagcttctccagggtcccgtactgtcttgggttagtgagaggcagagaaccacctgatggttgtcccagagtggaccagccgggcagtggcacagctcagtggggcttagtgtcttcactgtgtcttcagctaggtttggatcctgtttctcttggggaacacctttgtggaagatcagctggggtgggggatggagtctgaggaggatcgtgggaagttccgttcttccctctggtgaagtcagggacctagtgactaggggagggagctgtgcccagagcgtttgtgtatgcgctgtgctgttgtgtgtgcgtatgtgctgaggggtgtgcggaagccccctctagaatgtgcctcgaacctcagggcccttgacagcctcagcatgggctgcaggaaatgacaaactttctgggttttggtgaatccattttcacagaagtaggtcataccacttctccatttactttgctgagggaggagtgcagcaggggtccgtggtaattcacgcagcaatctatgagataggtggtaatgttatcctcattttagagataaggaaaccaaggcacagagaggttcaagcaagttgcctaaggcttatcagtggggtccaggctgtgaccatggcaggtggtttcagaatccatgccctctcttatccatgaggctcctggaccgactttcccctgatactcagggtgcacaggtccaggtgaggtgttcacagggagaagtacccccgatagacacactggaagaacccaaacctagcagggttttggacagcagtctcctgttttcctgcaagctggttttaggcctaaggatttccacagaggcatgacccagaggaggcagctcattatttatggaagcagctgacgggggtttccgtccccctataactgcaccccagaacttcacttgtgtgtgggctggcaaaggacaggagggaaattaaggcagcaaggttggcgtcagaatctgctcccacaatcctgactggggtctctgtgcttcagctgctcatgggcactagccccaagtcttaggggattatgggggaggggataagtgaatttgggaaatggtgtaaactctcctcctagacacagactgatagctgcaggggctcagagacagcagccagtgccaccttttcactgtgcagctcgggcagagggggaagtgagttgtgcaggtcacacagctgtgaccaatgccaggatcgctggccaaaagggcagcatctgttagcggccttctgcccccttgctcactctgttccatctctcctggtgctctgtccacacgctccgcctcacccctcggctcccccaggaggatgttccccagctacaaggtaaaagtcacaggcatgaaccccaagaccaagtatatcctgctgattgacattgtccctgccgatgaccatcgctacaagttctgtgacaacaaatggtaagtggaccctgaccgcatcacccacgttccctcaactgcccacttgccacgcccccacctagtgttttgtccgggggatttcttagctacctgagtgactgcccaggtctgcaggctggagtccactgcctggaactggctgtgcggaggctgaggtggtcagcgaatgtctgcatgcctgcttcaggtggggctgggtttgggctgaaaagcagctgcgtgtttgggagtttggtggatcgcaagggtctgtactctccttatggccgtgggtagtcaggacttggtaactatgctgtcaggtgacagacaaatcattaacactggccagatttagactgtcagtgcttcactgtggggaagatgggagcagttctcttggggactttaagggcaagccattacctgctgtgtgggggcactcgcctgtttctccatgttctccttggcttcaggcccctccagccatccagacgaagtgaggctccaccagggggttggtggatgggaccctttggcaaggggctgggagacatagagaggtaaagggacaaaaccaaaaggggccaggtaaataaacgctgggctacctttcatgaagccaactccttagtccctgactgcctgggagctcggaacagcgctccaggagcgagcagccagccaggacactgggctccgtggcaagtgagccacagagctggagagattgggccgagcaggcaggatttggtggccacgtcctggcaagggccatgtttctgtttcttctccctctctgggctagaactcagagcaggctctggctgcggggagagctaccaattaatttcttaccattgttttggggacaagccttttgagagttgtctaggtcctctgagaagctccctctaaataatataatttataacatgtgacaatcataatcataccaggtgtagcggctcatatctgtaatcccagctactctggaggcagaggcaggaggatgacttgaaggtcaggagtttgagaccagcctgggtaatatagtaagatccttgtctctgtaaaaaatgtaaaaagttaactgggcatggaggtgcatgcctgtagtcacagctacttgggaggctgaggcagaaggattgcttgagcccaggaattggaggctgcagggagctatgatcataccactagcatgggtgacagagtgagaacctgtctcttaaaaagaaaaaaaaattttaaatcataagtgtaaatatacatagaagtgcctaaatctcctcacaatatctttgtgattagccccagtccttcaattaaatgatcccatttccctgtaacctcccttttcttttctactgcagtaaaataaaggagattcagaactgctctctcctcctcagcattctctcctctgaacctcacactcctacccttgaagtactaatttgacaatgtggtgggaccagcagctattttttcctctggtcaatgggggtttgctccaagaggggacggggaatctggcctcaccagcccctggagtaatcacctgctcttatctgctctgttggcaggatggtggcagggaaggctgagccagccatgccaggaaggctgtatgtccacccggattctcctgccacaggagcccactggatgcggcagctggtctccttccagaagctgaagctgacaaacaaccacctggacccctttggccatgtaagcatgggggctgcctggccccaggaggcaagtctggggcagttttaggggtgggacaggccaggatggggatagggagaatccactccgggatccagctccaggctttggcgctcactgaccagtttagggaaggagctcaagcctctgaggcctgcagagagctggacttccttcccggccacttactggctgggtaactctggacaatcgtctcagcctttttgagcctcactttccttgtctagaaaatggagatgaccacatgtacctttcatggctgtgagacttaaatgagagggtttaccggaagcactttgcacgtaggaggggctaaataaatggcagctatgatgataaaggtgacgggtcagatctcagcttcagttccccaaaatcttgccttgctggaacataacacaagaggggtaagccttttcgagcgagagtcacggatatgttccaaagcccctctttggtgtgtaccgtctgcctggcctgacagccgcctgcttctgggagaaaagaccttgctctggctcacatgttagctcctgctggatttggcctggtccttacagaagagattctgaagccccagggatgctgctgacgccccatccaggcagcccaagctcattctttccccatctggccctggaaagtccacaaaaaagagatttttatgtggaaatttttagctcaagtgtgtggcaaacagaagtctggggacctggtactatctgccagggcacaggcccctcccctcgagactgcccgtggtttctggggaagtgcagggcaggggcagtggaggctttgagatgcaggtgtggctgttggggttacgagatgtgcaggtatgtcccgcttttacgtcccagctctgaagcatagttcctatggaaaactccagccatgcttcttttctgattgatgggtatgtaactggcattgagcttctagttttaatttctcagaatctattcagttcgcttctgagtcattggtgagctataaacaagcagctaggagaatgtttaattaatgcagtcaactcctgacttatcttatctggtttgtgagtccctttgctgggtttcccatacagggcaggcagattcccaatggggaggatcagccaagttcccacctccccgagccccaaggcatttcagctgagaggcagaggggcttcctgggtctccctgggcaccatcctggtcaagactttgttcccagtcaactcctacccaacttcctatgcttggccaggctgtggcaccagcctcaaagggtagggagggtctctgtgtggggaggctagggaacctggcccacgacggcacacacacacagaccccatggggggcgaatacagagcttgtggggagctgcatctttgggtggccatttgtccctagagatccaaacctggagaggattttggatgagccagcttgttgtcagggctgccagctgcagggatgtctcagaggacacctctgcttccctgacctctagaaagtgagagcagagggagttaagggctggaaagctgcgccttctttaggaagtgggagagagcgctctggccttcacagcccagcagtagcttttcacagcctggctaacctcttcagtagctctccctgggtctgtgagtggtttgtgataaactgcatagaagtcagggccagtgaggctgcttgatgggcttgtgatgctgggggtgcccctggctgcatctgccgtgcctgcctggcgcttcccttgccttgatgatagggatactacccacaggaactcagctttttccctggatgagtgggacgcagagcatcttccttctcccttcatccccacacttacccagtacttgcagtttattggctacaacagccctgtgggtgtggcagggcccaggtaccgtctcagacccaggccttctgcttccaggtccagtgtctctgggcttctccactgcctttctgtacccagggctctcgctgcggtatcttcacctatttagagaacccttgaagagggagcagcctctggccattcagacaagggctgtggagagacatatcagggcacagcaacccatttggacattgattttcttctgcctcttggcccgtgcccgtgggagtggtgagctcccattgaaggatgaaggagtcacccttcttggcttctcagtgcaagaggctggggaaaagccacgttgtattgggaattgcccttccttctgcacaaccacttctacgttttcagcttgccctgaaagcttccaggcctcaagggactttctccagccacatgggcttggacttttcttggggatcctcacggtatcccaggagcttgagcagctgcctcctattggcagccctcacccccaactcctgcccaaaagggtgggctctctcctcgcgaaagggcaagttgagagctcatgagagtggctgtggtatcatcttggggtccaacaggtggactcagtgtccttctagcctggagatccctgggcccaagccatcccatttcctcatcccaggagatgagcagggtggctcatgtgtctgcttgctggtgccttaaggcttcaaagagcaggaagccctgactgtcggggagggggtgtggaacaactattttgggataatccgggttttcctatcattcaagattcctttcttccatgaatgctgctcttctctgaagtctgaggaccttagattgaagtcttgggcctggtagcctgtcctgtatggcacatggggccctggaacaggaacctctcagaccacatggccagaacctcctaaaaggactgagctcccactagaacaacactccttgtgggtttttgctgtgggattaggaaagccttcacagcagaaatccacaaggaattttccagtctgaaccttggaaggcaggttcaggagggcagattcagacctgggcgtcagctccagtcccgaggttgggccaggcgggagcagaaaggaccaaggggctggggctggatgagctgcctccaggtggcctgaattcagctttgcttctgctgttctgctggccacagaagctgcctgcccactgtccctcctgcctgccactacctcccacgcccagcagggtcctgtgcccggcgactatgagatgggaaaggaaactgcttccctcggctttcttcctcttctcctcttctgaataagcttctagcaatacctgggcttcaggaagtcagggagggcctcactggggcataggcgggacctgtatcctgtagcacgatgaggaaatggtggcatgcaggtatcccagattgctgaggagggagggccagtttatgatttctgacgcagtgagtccaactgttggaggggctgcattagcccctgggctagaggtgtgggctgcagttcctcagtcacaaagtagcacgcattagtccccttaatatgcgacttccttctagccactgggcttcataactggcataggcctgactgccacacccttaggcctgggactattttcccaccttcttcacctaggtagctactcctgagctgcgagatccaagctcaaatgcaccttcttcagagagaaaggttggggtcctcattccatgctgtcagagcactatgcaccttttcatgctagtacttgccaaggttataattttatacctatttgcatcttaacattttatttatgaataggaaatactttcacaagctttaaacataaatcattgaacaaattaaaatgtctacaatacgacatctctctctacttgttcctgatccactgtttctttcaacccccagtacaggcaaccatggctaccaatttcttttcagcattttttttttttttttgcacataggcagaatgtgtaatctggaatcccctcttttacacacaaaaggtagcatactatagaaacattttttgcatttgctctgtaaacttaataatatctcttggagaatagtctattcagagagggcttcctcatcccttttgcagctgcacagaattattattattttaatttctttgagatagagtttcgctcttgttgcccaggctggagtgcaatggtgtgatcttggctgactgcagcctccacctcccgggttcaatcaattctcctgcctcagcctcctgaatagctgggattacaggtgcctgccactatgcccagctaatttttttttttttttttttttttttttttttagtagagacagggtttcaccatgttgatcagactagtctcaaactctgacctcaggtgatccacctgcctcggcctcccaaagtgctgggattgcaggcgtgtgccaccgcgcccggcctgcagctgcatagaattttatcaaaatgattgtttcagaaatcatgtagccagttcttgttgaaggaattagatgtttttttattctttgctcttctgattaagcttgtacatatgccattttatgctgtgccaagtatatctgtgagataaatggcctgttcaaagggtacgtggatttgtaactttgaaaatatcaccaaattcccctccatgggagctgtactgatgtatatatttccaccactgctgtggccttaccaataagggcgggagagcaaacttgtggatttttgtcagtttgacaggtgaaatgtggatatcagtgttagctttaatttgcatttcctttattatgagtaaggttaagcatcttcttttaataaatttcctctcctgcgaactgctgttctcatcctttgctcatttttcttgtaggtttttgatatcaatttctaggaactcttataaattaggaggatgtagctcttatctgtgatgagttacacatgtccaggttatcatttgtcatttggttttgcctgtagtgatattcccacaccgatgcttttgattgaattgaccagtcttttccttatagattttggattttgagttattgaaagccctaacccccctccttacttataagggacttttcttttagtattttatggatttatttttacatttaaaccattgatccttttgaaatttatcctggcattgatttgaggtgtgaatccaattttttttttttttctacagagctatccagttgtcccagcatcactaattgagttgtcccctttcctcccctggttgaggtgccttatttctgaacactaaatccctatatgaatgtgtgcctgttcacacgccagtcttttaactgttgagactggataataggttttagtgtttggcaggactgggcctccttgatcttcttcagagttttcttggctagtcttgtctattttttcacataaattttagaataagcttgtagtgttaaaaaaggagcttatttgtatttttattggattttccttaaattataaatttacttagagaagactgataggaaggcttttctatttgctgagggttttctggttcttcaaaacgtattcaggtttccttgaaatggccctgcacgtttcttgttaggtgtgtcacctgatttgttaccatgataaatgcagcctttctttcactacattttctcaccacttatttctgctcattttcggagttactatgtgactgccccaccagatagtaaaccatgaggtttccaatcactgtgacatcctagtgcctagccaccgtgtctggcaagccagcgggtgctggtggatggtaagtgcatgagaaactcctgaagggggtggtaatcagacagcaaagccacttcccctgccaggggcagatgtccccccaaagcttatgctgctaatctgccagtggggacccagagctatttatctccctctttcctcctttcctcccacatttgctgatccctgacaatgtggcaagccctgaactccagatcaggtcccaccctccccagccaggttaaggtatgaactcaggcttggaaactagtaccaattctggctgtgcctgaaatcggctgtctgatgctgggcaaatgcctgcacctccctgaccctcagtcccttgcctgttaaaataagggcaataataattaatgcctactttatacggatactgtaaagattaattttatggtgaatgtaaatggcttagcacagggcctggcacataagctatgctcagtaagtgccagctgttactgctgttgctgtggcagaaggcaggaaggtttggaggccccacggtaccaccccagtgttgctcgcatgggagtgatgcctaaggttccctgggcaaggcctcttgagtgggctgatgggctccctgacttagatctagtttgaattttccttggatgcacctcttatcatccggggtctcagttttctttctttccttctttggtgtttaagctgagatcctgtcactgtcctaacctctttgtagggctggggaggatcagaaggatgatggagaaggtagtcacagaaaataaaattatgatgcagggtaaatctggttttagtatctgacaaaatggacattagccacacttttgaggggctagcatccagataacatgtgttctgtgttctgtagggcctgctgacccaagtcccttacagtgtttaattggcaccttctcattaactctgagcttgttgagagcagtgtgtgctctctcacaggccatctggatcctgctccagactgtgtctccaaccagctgtgtgttcctgggcgagtcacgtctccactaccagcattctgttcctcatctgtaaaattagagagctggacacgaatgatctcaatggcctgcctctccatgccctaatgttctgtgattccaatgtagatagatctgggctttattggccaagcacgctatggcgatctcttgaggagagggatgtttggcgcaattgcagttgttaaaatagaacaggcttctgaattgtggccagaacataatgaatcccatttctgtgaaacgatgatgacggaaccagtcatgtagtggggttgttgacgtggctggcccatttggccccatatcctctgcagcaaatataaatgtgaaactctggcaaagtagtttaatgtggcgcctgaggaacttccgagcaaagccaggtgtgtgagtcactgagttggtttcacattctcccggctgatgggactaaggctcaagtttatacttgtcttggctcaatgggtgggactttcttccagatacctgtccaggttctagactgtcggagtcagaaggggtgtttgggaccacttagtcaaaggccccacttcatagatggggaccccaatggttggagaaggagaagagcttgctcaggacttgacgctggtgaacagagatcatgacggcgtctgcacccttcttgacttctctatgaccggggttaccctcacctagtggctcccacctgcccctgtaggactggcagcttccctctttgcaggtttccctgtgagcctggctggttccctgcctcggaagatgtgttgggcactctctccaccctagtcatcagggactttgtctgacgggctaaggagtttggcctttattccaagggtcaagagggaacaatcaaaggtggattgtgtacataaggcatttactgagccccatatactggcagcagtggtaggaggggatgtgggggaaagaggaggaaatacaaaaggccctgctcttaagcaatgcacatcttcctgaatttcccagaaggttctgagcaggggagtgaactgatgggatgtgtttcaggaggaaatggagagaaagtagatggaggtagggggaggctgtcctagcagcccagccaaagatggtggggcctgaagcaggggtgtgcaaaaggaatggaggggcttttgttttatagatagagtcacaggaatcggtcactgagtggacctggaggtggatgacagtgaggaggaggggagttgatgatgatacccagggctttgacgagcccacgactgcttgtgactgcccaggtgtcacaggagcagggtggctgctgccatgtgtcctagtgtcctgcacagccttcatgaggtgctggtgcctatggctctgtcctgggttctctcagcccacggtctttgttctccctttgcgctgccacctttggagagctagagtgactgggggaggccttcatgccaaggagctggcacatcggggaactcatgggagatcatctctgcacatgtttcatcaccacttttgacctaggaaatgccttagagatgatctcgtctttagtgagcaagcaaagaccagagaggaggggacttgcccacgttcccacggagggtttgtggtcgtggcccagatcttcccactctcaaacccgaccttgcactcactagatcctgtctgggggcaaaggagcctggaggtacaaaaggataaaaggtatagccctttctcctgaggagtttagagtttaattgaagggacaagaagaaataggaagccactaggatgcagaatgacaaccaggtagataacacatgagaagtaagtttcagaactgggcgttcagagcaggcccttgtacctgagacttcctggaagatctgggtcttcctagaagagatgttaggcccagaaggtgagaaaagaatgggaaaggaagatcgagacagcagagggacctgcatgtgcaaaggtgcacaggtaggaactgggcattcctggagctatcgggccacctcccaggtattccattgctggatcttccgggaacgtgggtcctttgtggatgcctgcagctctgtgaatagtgcacggtgatggagtcacctaaaggggctgggaggtgttttccaggcccagttcctctcgccacaggagcatccccagcgtcctggaaagggacagacatcgaggcctctctgagcgggacctgtgtcctgtagcctcactctgcattcctcacctggcaggcccccagtcgggcagcaggtccccagctgcaggacctggtttggggtttgggagttatgtacttgcctcgtgaaggtctggaggtttgtcactgagggctgaggcgggagtggccagtgcagaaggcagaaagtgtggttcctgctggatggagtcacccagctcaaccgaggagcccagggaaggccagtacccacagcccaggtcctggcccacccattcctcagctgagctggctctctaggctatccctgtgccccagggcacgataagagcagagtcttcccagactaagactttggccaaggtttgccataaaagagcctgactctggcctttctcttggcactctggtcactaacaggttaaacctttcattcagcgtcagtaccaggtcccatccctgggaacctagaagggtggcagcccaacgaccaacccaaggaaagggcactgccagctacggagaggggagctcagaggggaaggggacccgagggcccgcctggcctggccaggacagaaaccgaagggttaacagaagccgcagggctgataaaatgccccaaattcctggtcctgccttcaatggggagggcgtctggcaaatgtcaacgataaaaaatacattttaatggcacatgatgcagctgctaccgtggggcgcagccaaatgaagcaggtttggagcagcaactactgtgagcggcccccgggggctctggcagccgcgcctccagggcgctttgctaagctttgtccagccgcggcaacccgcctcccccagcccacggcatcctcaagggcccttgggatcgggggcctcttgccttctatggcactattttggaaactgtgccgtctcctaccttggcaccttgaacgcttgaagagcttctctgagggctgggagcggccttaggcaggtctgaaggcaggatacatttgggtctccccagcacaccgtcagcaggcctctgtgaacgttgagaaatgcataaacaaggctaggtgcggaggctcacgcctgtaatcccagcactttgggaggccaaggtgggcggatcactggaggtcaggagttcgagaccagcctgaccaacatggtgaaaccctgtctcttctaaaaatataaaaattagctgggaatgatggagcacacctgtaatttcagctacttgggaggctgaggtacgagaatcgcttgaacccaggaagtagaggttgcagtgagccaagattgcggcactgcagtccagcctgggcaacaagagtgagattccatctcaaaaaaaaaaaaaaaaaagaaaaagaaaaagaaagaaagaaaggaaagaaaagaaatgcatgaacaaatgagcaatgtgacaaaaaaagttacagtgggacattttcctcagctttttccctctctctcatcctgcaaaacccaagtatttctagaagaggcaggtcatgtgtaagaagggtattgagaagaggtgaggctggagggggacccctgagggagggaggttacatgttatgatcccatttacaaatgtggaaactgaggcacagagaagcccagtgacttgtctgagatcaaacagtgactcggtggcaccctggacttttgctgacagctcacaattccacctgctacactgtgctgagttcacagtgggctttgacagtgttaagggctgactcaagttctccattaccacagtgaatcaactggtcacatcaaggagggcctggagctgggcattagtgctggtgcagagaggctaagtagggctggggtggggagagtttggggcccaggggcctggttcttcacttgggagctccagtcctggtcggtaggccccggatcctgggctttgaggagaatgagaaaaaccaggccagggccagaagaatgaggtcaagggcctggggcttgcggatggggacctggagctcagcatgagacccttctcttccagatcatcctcaactctatgcacaagtaccagccgcggctccacatcgttaaggctgatgagaacaatgctttcggctccaaaaacactgctttctgcacccacgtgttcccagagacctccttcatctctgtgacctcctaccagaatcacaaggtacagccactgccccactgccccacagccccacttaacaccaccctgcgttctcttccaccaggcagagaggcagagtgtgaagccagagtcccagcagggcttgggcaggcccagtgcagggacctcagaagcctagagtccctcggagccgcgagcaaatcgaatgatgaacagaaaaggaccctagatatgtccatctccagcacagaggaattacggtctctgtgttttggggaatggagaaaattggcaactgtaaaaaccaggagcttggagtctgccttgtggtttgagcattgggccctttcattccacaatgttctttctcctggttcatctcctggtgccttcagagacaggggtagggaatggggataggagccctggggtgctgtcagctggggtgtggaagcagagcctgagcggaggcccttcccaggctgtgataggaggtgccccagccacctcccacactcactactgccctccccagcccggccacccccactgcatcccagtcactgacagccgtgctctgccgcccgtctgctttccacagtatgcacacagggactggcaaggtgggcaggggtcactggggaagggccgtggctgtggtggattttaggcagaagagtgacagagtcggaactgcatctagaacggtcactcagagcctgatgtagttgcacagactcaggcagcaggcccgggatgctcactgggaagatgttacaggtccccaggagagacccatggggacagaagcccggcagtgcggagggctggggagcaggagaaagaatcagagggtggagagcaaggagtagggagccagggacaaaccaggtgtgaatggcaaggcccacttccccagacctgccccagttctgcctgtgcctggggttggggaggagggaaggccagaggccagtccagtcccaccctcctccccaaggagggtagtgagaagcggtgaggctggagagcgacccctgagggagggaggttacatgttatgatcccatttacaaatgtggaaactgagacacatttgtgtgcctcacactggtgaccctatgtgttttctccccacagatcacccagctgaaaattgagaacaacccttttgccaagggattccggggcagtgatgacagtgacctgcgtgtggcccgactgcagaggtggggctgcgtagcctgggggtggggcgggcagatgggattcaggcacgtggcctctgtgaccctcgatgtatcttcactctcttcctgtctctcctcctgtcctccccaccccttcagcaaagaataccccgtgatttccaaaagcatcatgaggcagaggctcatctccccccagctctcagccacaccggacgtgggccccctgctcggcacccaccaggcactccagcactaccagcacgagaacggggcacactcacagctcgcggagccgcaggacctgcccctcagcacctttcccacccagagggactcaagcctcttctatcactgcctgaaaagacgaggtagggctctcctggtctagaagccctagagggtaagaggagcggtgaggttctccccgaaaccactctgcagcgcccccccccccaacacacacacactcatctcgtgcttgtgtggcctgggagagtgggcctgaagggttagggatcacagctgggcgcagggccatcttttccagtgcagggatgctggttctcatctctcatgctgcctttggaaccctcacagacagcttgtagccccggtgtccccagacacctttccaagtgttgctttgcagtcactgctctgagagcctcgtggggtgagctgggctctgcctggaagtgcaggaagaggctgacacttcccagtccagaggttttgggattggggctgttgtttgtcaaagcaacctcaattccagaacagggaggacttggtgtctcacgtgcagggccttccacccaatcattccttccaggatctgcagaggctgcttgagagttgagatgagctattgtggatgtaggtgggggctgggaagacaagccacagcaccctctgtgccaggcctcttcgtaaagaggaggagcccggagctgggcaccatcacatctgtgctctgtgccaggtcttgattcctccatggatagaattgcaatgattcgtgttactccaccagaagacctcatggggctgctgaaattcccttcggaatgagcctggggacttttgcttgccttccggaatgttccctcagccctggtcctagggactagcccagcagagctccgagatcccctgtacaagtctcattagaactcaatgacctagagcacgggttggcaaactgtggccttcggacctaacccagcctgctacctgtacaaaatagtttttacatttcaaaacaattgaaaaaaatcaaaagaatatttcatgagatgtgagcattatgtgaaattaaagttttagtgtccataaagttttattggaacacagccatacccatttacttacaggttgtctacggctgctttcatggtacaacggcagagtttcgtagttgcaacagataccctgcggcccacaaagcctaagatatttactatctggtcctttgcagaaaaagtttgcccagtcttgacctagagtgagtaggccacctgccaggatcaagagcttagctcagggagaagagagggatttggagagaagacggagaatcgggctgagtgaggggcaaaggagagagctgggcaagggagaggagcaggtctccctgggcagggcagatgccaccagcaggggcagaggagagaggtgagcagaggccttcacacccatttagcccctctgcttccagccccgtgggtgcacacacagagctccccgaatgaatccctggagaaaacaggaggagggaggccaagatgagccatggatgtgtggggtttttgttgttgttgttgtccttgttttgagacggagtctctctctgtctcccaggctggagtgcaatggtgcaatctgggctcactgcaacctctgcctcccgaattcaagtgattctcctgcctcagcctccccagtagctgagattacaggtgtatgccaccatgcccagctaatatttgtatttttagtagagatggggtttcaccatgttgatcaagctggtctcgaactcctgacctcaagtgatccgcccacgttggcctcccaaagtgctgggattacaggtgtgagccactgcacccagcccggatgagtgttcttaaattggctcagtgggctgctccccaaaccctcaggcctgggtcagccctggatcccaggggaggtcatgccactccagatacttaggccctccttgtggaggatgtcgaaaggcacacatacatgatttgtggcatctgatgtcatctttccccagagtatctgcttagcctgaaaagtatgtcacctttttcacttattatcagttctatttcttaatttggtagacactgtggtgttggaatctgtgtagtaaaaatctgatggttcttctttaaacacatgtgaggttagttcatcttctaaaagcaacagaaacatgcctacaagtggctttggctccctgaggtcttcctgggagctgaggatggaggcagaaacctcatggccttaattttctggctacttcagacagatgtggcctctgggcatgggctggcctggcaagtgcctctactttccttggccagggagggcctagcctgagaatgccactgcacatcagggcctctcactctgcaagagtcaggctggcgaaggatcaaagccgagtgctgcctggctaagcctggccctcagtgtccggtgatgtggtgtcccccgtggcctctgagtagggtccgtaatctgaccacttcttggtgcctgcaaccctataaaagccgtggctgattgaaatggctctgggagtgccatggcaacatggggagggcgggcgcagagggacaaggacaggctgtcccagcatccaacagggtgctctggggcctgggctggtggaaatggttcttcctgaatgttactttgtctttcagcagacggtacccgccacctggacttaccttgcaagcgatcctatctggaagccccctcttcggtgggggaggatcactatttccgttccccccctccctacgaccagcaaatgctgagcccctcctactgcagtgaggtgacccccagagaagcatgtatgtactcaggttcagggcccgagattgccggggtgtctggggtggacgacctgcccccacctccgctgagctgtaacatgtggacttcagtgtcgccgtacaccagctatagcgtgcagacgatggagactgtgccgtaccagcccttccccacgcacttcaccgccaccaccatgatgccgcggctgcccaccctctccgctcagagctcccagccaccaggaaatgcccactttagtgtctacaatcagctctcccagtctcaggtccgagagcgggggcccagcgcctcattcccaagagagcgcggcctcccccaagggtgtgagaggaagccaccctcgccacatctaaatgctgccaatgagtttctctactctcaaaccttctccttgtcccgagaatcttccttacagtaccattcaggaatggggactgtggagaactggactgacggatgactctcacgtctcctccatagccccgggaccgtgttgctccagtattaacctctgtgggtggcctgcactctaccaagaaacacaggaaggtattccagtgtgtgtgtgtgtgtgtgtgtgtgtgtgtgtgtgtgtgtatacacgagcatgtatgtatttggagagcatccatcttctgacatacaactgaggtcatgacaaggaaaaaaaacaccacatttatctaagaagtgattttggctgcaggacctgggtctattgttatctgacatctcttgacatgcccgtgggtgggatgggagtggagggttcatatgagttattgagagggttttataatggttgatttactcaggggccaggtggggagttctctcccatggggaaagattctcactgctggggtgggaagattctcgctgctggggtgtgaggactctgtgcacaccttagagttcctggccttctctttgcaaggggagctgagaatctggttttggtagcaggaggcccactcctttgacttctggagagtctgtgagactgcctgagaggtgggctcagctaagccacaatgtgtactttgatagtacagctggctgctcagtgagtggcctagacattgatgactggagctctgaggtctgagggatgacgttcggaaagggtcatgggctaaatgtcacctgaggggtatttttaaagggtttttttttcccttcaagaggagggaaaatgcaaccagtagcatctctgtcatcattcagattttgtaataaagtacagagcccttccccctaggtccccaacatacagtctctcactctggtgtgtggagagtcagcctcccaggcaccataccatctgcatcctatgatgatgggcaattatgaaacacgcctcagctggcatcatccccaggaggccacactggagctgatgtctggcatctccagggcctgttctgctctcagaaaatctacgcttctggagcgagaaaggccaacagaaataaagatagttgaaaaaaatttgtttcttccagtaaattcagccggtgagctcagaggagcaaagagaattctccagtgtggcgctcacaaagtcctcagccctgcgttttagcattgaataccaccaggccatcagtgtggctggggtgaactctccatcaaacttgggaaatcactaaactctttgcatgctgaatagctatttatatattatataaataaataaatatatatattatatatcgctctctctcacaaatgcaggccacatgtcaaattcagctttgctttctacaaatgaatgaacttaataaaaataaacgttggagggggtatttggaaagacatctatttaaatttttattacatgtttgatattaaaaactaagaatggtttagataaaacatataaataaatatatatatatatatatatatatataaacacacacacactacagataaggcttttttagaaaacacattagctaacaggtgatatggaacttcaagtgttttgttatatagcatggatgttttattttgcatatcggaacataaagccattttacaactgtgaagtgtgtggatgctctttattactgacttgtcatttcttggctctgcaacggcctctgcctcttttttgctggtattctttttctcaagtgtcaggtaaggccctcagtacctctgaacatgtgtaccgtggagcctctgagctcacagtgaagtcacctaggaccacagagcaattgcacctttgatctcatgctactccctgggttatgaatctggactccagggtccacaaagaccccagaagggcgggcaggcagtaaagcaggaatctgtctcctttcagcagtcaacacataagctggccatttgggggaagtggtctcgtaagtagggaattcctggtgggatttatgcagctgcttcagaaaaggaactgaagagcaggtttgagtcagtgcggggggcttcctggagcagtcaggggcatgagctcatcaccaccatcaccccagaatgggtgagtcaaggcctggcaaagtccccattcgcctgcacctttgccaggtccctaaagcttggccacaagatggagagaggaaaagcaaggtgaaatccagcccaggttcaccctagattggaagaggcaggcataggaaggcgctgctgggtctccctccttacagccttgccacctgccctgcccctcattgctccttccccaaagctgcttacccgcatccaccatctccactgcaggctggtctaggaacccaggaaaagagaaggcaagggaggcatgcccttgaatccttgccctgtcaggactgagatgagacttcctgctgggtaaagactcaaccttgtctcctgtttctccagagtccttttgtggctctaggctgctctctggctggacttcttcctgcagaacaggaagccaagctccatcctcccttagctgctggcgcacaccttgggattcttggtcatggagaaagatgttaactgagcttggctcaggggacagggaagtgagagggctcttcctaactcccacctgctgcgctcttttctttctgggtgaagacagcacatctgggacactccacaccttctagagcccaggcagagggctgggggcaacgcggatgttcccaggttctctccaaacacatggttggctgagtctgacatgaagaaagccacttcttaaaggggtattttgcctcgaggcagcccacggcttcctgccagcttcctgggaagcgtgaggtccctgggcttccccacctgggcatggccagagccgggcctgcagtgggatttgtggaactttcctgcgcctctgaatcaacagctcaataaaaagggggcacatgggatatcctgaaacaaagggcaccattcaggagcgccaacaggtcatacatcatcggccagaaacctgccacatgaaaagggtctgcttctgctgtgccctgcctgggaaggggacaaaagccaattaacgttcagctgcatgtccacgggaaggcagccttgggggctgtgctctccag

SEQ ID NO: 606 - DNA, 57512 bp, Homo sapiens
  source 1..57512: mol_type = genomic DNA
cctactcatcattagggctgtgctcaagagtcacctcccccagatggggttaggaccccttgccttatccctttatgccattgggcactctgtctttgtagtaatttccaccactgcaatccactgaggatgcacataatttcctaagggctatttctctctctcactaaatcataagttccaaaggacacagcccctctctttttgttcactgctgtgtcgccggtacttaccacatgtccagtctaaagcaagcacccaccaaatacattataggactgtaacaatgtgcattgtgtgccttgccatggttttatcaacaccatgatgaaactacattaactcttggacattgcatccttaatcctactgattcagtgaaaagatccactataacaatcatttagaacccaaagaggttaacctgtattggttatgaaatgacagtgtcccttgtctgatttgtgaaacttgctgtgaacatatttttaatgattttccaatggtggcaactgtttgagtggtggggtggggatgcagattcctaatttggatgatgttcctctgaaagcataagactgactgttgtatagagttgataaaattagtttcaaaggcaatgtcttcaaaggcaactttttttttttttaaactgaacccatcagaataaatatctatttggagcacagtcagaacctgttcagtgaaactttactaatgcagtcctttgggggaacaggaaagccattgacctagtttctccattgcacttgaaagaagctgaattgtcatttctttataattaattcacacttctcagggcttctttgcctgggaaaggtcccaggggacctgattaaatgaataacttgtaatcaacaagccaattgtttctttttcaaggggatgtggcatatttgatagctcttgataatttgagggatgcgggcatcaaaattacaaaaacagaacaaatctgctgcacaaatgtactcaccaatttgctgctctcttctgtcccatatgtgttttagagctcaagttcacaaatcctagatccatggatttaaaatcaatatctgattcactgatggttcataaagttatttgcagtagaacccccaaaacgcctggctccaacaattaattcagagaaagagattcttgaaaaacccaaacattaggtgttacatataatatgaccgataccattttaaataggttggaattcctaaagacttttcttctccagtgcctacacaaattccattaaaacaagtaacctcattccaaggatataaaccagtggatcatatattcagcttcatcacactcaaggacaatggatcccaaattctcctgcgatgggcatgagaaatcacgtgaggtgagaaattcacatgcaagacaacctcttcctgtttcctccaattcctatcccctctattcagtcggtagaaagaacaggaaaaaaaaaaaatgggtgttcaacttccttgtacttgtttaagcacatggtatttattaggcattaattggcacacaaatataaggcacgagtacttaatcctcaccctccccccttagcaacgtaaagagacataatcgcatagggacactcacttacaaacacactcacactctctcacgtacttaaacacactcagcctcacatcttaccctgttctctttattagggtctgtttataaaaaaggaaaaaaaaaattctttttaatcaaaaaaagcaaagcacattcgaaagaggaaaaaaacaaaaaaaaacaaaaaaacacaaacttggttttgagtatcaataaaattaaaagctcttggccagctcctatgctgggtttcatttcatgttattacttaattagaattcctatttataaataaatagtaccagtaaaatattacatctgaagaaccctaccataacactttacttacacactttttttaatactgttttcggctttcagtaaacacagttttgtgttggcattggtgtgggcgtggtttctttggcgagatatcattggtgactgtgtcttgcctcttctgtaggaattgtgcattttgcttgacatccagtttgggttgttggtgatggaggtttggaaggttggggctggccttgtttttttcaaaaaaaatttttttaatcaggaagaatatttattttggctttttgtccacaactcttgtcaacacagagcttgcactgttatcacagtcctgcctacatgtaaacgggggctttttaagtttttcaaagcaagctttccggaagggaagctataggccacgttttagcgacagacagctggaaagacagagctggcaagatggtagggctgaataagataggatgccagggagcgtcagtgttatcctgactccatgggtaagtagaggcaaaactgagcacgtgatattggagaaggcaggacaaaaccaaagcaaatggggacatacagaggcttttcagaaacatcacatggcagaggtaggtgcttttcttagtcaaggggaaacgtgaatttaggtttcagggatggtttacttgaagggaatcccgcaagtacatattttgaaatatacttgcctcagacctccccccaaataagggactgggtcccattaagaaaattgaaagaaaaaaatatattatcatttattatataacaatgtcaacattaacaccaagacagggacagactccaactacgcactagggaaaaacactcaatgaggcaagactttctagagcccaaaagaaggaatgggggaagagatctggggagtagcgtgaatgtggctggttgatgggtgtggtggtagtggggggtgggactcatctttttgtgtttgtttttttaagttttgagacaaaacaagaaagtcacatttttaaaattgtggtttcaagctactgattagatcagcatccagcgaccttgagtgcagatgtgaacattgggtgaaatgaaaaatcttgtccgtggggttctcttggctactgtctctctccttctctctctttctcctctctctctctctttctctaggaaatgtctgttgtgaagcaggcctcactttagctattgtcgctccactctggcaccatgccaactccgtgcacagagtggtactgatgaggggatagagtccttggcacgccatgagagtagaggaactcagggggctgaagggtgccaggggactgcaggccagtctgaggcccacactgcctgaccacaggctggtgggccacggaggtctggtgctggaacattccctctcccagctgtggggagccatggttggccatgccagccagccgagggaccaggggccccgaggtgaagtgagcggagaagtgctggtagggtagcctgtccatgggctgcacggtggtgacggtgcagctgctgtaggaaggcatgcttggccacgtgttgcagctgatgtcctctaggctgggcacaggctcgctggggggcgcagagctggcatacatgcaagcttgccgctgtgccgactctgtcctgtaggaggcacccaggccctgctgctgtggatagctagagcggtagaaggaatcttcttcactgggtgatgtctccatgtagggcttcttatagggatggtctgtggtggaacattcttcctctgtgaagacaggagagacagcagtgaggccaggagcaggcaccaggcagctaaaagtggagacagttatttggccaaagtactgaagaataagtcctgagagactgttagccctaaccgccattctgaatacaaaaaaagggggttggattgtaatggttaagaccttgggctatggagttctatgcaaacagtttgacctttctgggttcagcttcttcatctgtaagatggaaagggtaggaaatagcacttcctacaaagggcagtgttgagaattaaatgggaaaatacatgaagcacttagtccagagcccagaaacactcaataaatagcaactaaccaggtgcagttgtgcacgcctatagttccagctgctcgggaggccaaggaaaaaggatcacttgagcccaggagtttgagaccagcctgggcaacatagtgagaccccccatctcaaaaataaataaatagcaattattattatctttcctcttctccagcatgtaaatttcataaaagcaggacattttctgccttatccatgactatattcccagaacctagtaaacacctactattaacaacagcatcaacaataagtcaaaacaaacatatacagtgtgtactctgcgtagcacgattctaagcactctccaggaagtaacacatttaatcacaacaaccctaccaggtgggttttactattatcctcatcttacagatgagagaaaaaggactcacggaggttaagaaacttgcccaaggtttcacatggctgataaacagtagagccaggattagaatccaagtagtctgaccacaaagcccttgtttttcactgtcttgatacatagagaaagcatgcaataaatatttgtacgatggatggatggatggatggatggatggatggatggatgcatggatgcatggatgcatggatgagtgggagggagcttgaatgaatgttcaaattctttcctgattccttatgtaagcatgtgcctagttagtatttgttaagttggtacaagttaatgtgttgctgtttcctgctgagcaagtcccttcccttccctgtgtactagtcatttcctagtgtagggaagtggagatagttttgtctctgaaagggggtctcctttcaccacttcggggccactggcccctttgaaaacaagaaaaagtgctgggctctttcctagaaaactgcattgaaacacaatgttttgaaaactgcatgtgcatacaaggctttgcatacaatttcagggggttcaaagactccctaaaacccagaccccaggttaagaagcctagacatgtctggatttgaatcaggctcctttacttaatatctgcgtgataccagcagggcatctacgctcagagactcatcatcatctctgaatcaaagtgagtaatacttaccttactgggtagctaagaactaagattgagcatgtaaagtctcctgatttccgtcaacatgaacagctcttgttgcagggctaacaccaccagtcaggctcatggcagacataattcacaataataccctcaaagtattcccttcaggggaagcaatacttggggatatctaccaaagtataaacctcaacacagactcattacttatctgaaattttaccttccaaactgaaaattctctttcctcatctttctgtctctttctagtcaataaatgttaagaaattatgtctgtctttggagaagtgaagaaaaatgaaacactggggcatccatgcaactcactgtgatggctcatggccatgaaaacagaatgctgaactaaataacgagaggaaatgatcagagctattatttattgagtacctactacatgaccttactcttcatctcacagtaattcctcaaggtgtctgctgtaatgcctgtctcataaaggcagaaactaaagctcagagaagtgacttgcccaaggtcacatggctgagaaggaacagaggctggaatctaagccagattggattgactttgcctacacaccttgcttccaactctctagatttctaatacccagtgccactcatgcaatcatacagcagataattactgagctgctccaaagtgctaggtattgtgccaggtgctggagatagagtggtgaacatgatcccgtttttggtgcatgtcctcaatcccagtctatcctaccatgagcagtaagtgagggaggctgacactctgtgactgagaggtggtcctcagatataaagacacaagtaagccattgactcaagactaaatcctttggctttggactggtttgtaaaatagctcccaaacccaggtagagtagcttgggtttggattccaccaatcagctccatttgtatcaatgtccaagtgacacccacagataagccaaaagtatccacaaacaaaacatatctcttagggttgtgcccacttaacagcaagtaaacttatttccactagactctttctgggccacatatgggacttataggataccaaaaaaatttgtaccaaaaataaaaaaaaaagaaaaacacactcttccaggtgttctatctacatcatgccaaccatgcagatgtttgaaaacatccagatgaatgaacggccacatttttcaccttttaactgtgcggggttttttttgtttgtttgtttgtttgtttgtttgtttggaggcttgaagacattgctatactcagcttctttttgtcctcaccacctcctcccttgattcctttccttcaattcttccttccttcccccagattcataaacctgagtgtttccattgttgctggaatcataacctttgggttttccaattaaccagggtgttacccttttcaataatagaaagtacagctgcagggcacccttagcaagaggaaaaaaaaacaaggcaaactaactattttcaagtttctgatccccttccagatttgttacaagtaaaaaaggaagaataataagaaaacggccggaacacattttggaaaatcgtaaaattatacattccagtctttaataccccaaagatctaatgcagagcactaagaaaaactcaatcttggcttattgatgaaagcaggtcctgaacattctcaaattcctctcaggcctcatcacattgtaaagaaattccaactcaaggatccaaatttcaggtcagtcatgataaatgctctggatgtaatctctgtgtttattttggttatggctcagtttctttcttttttctcttctttgagagcccaataactgttcaacagcaaagacctatctccagccaagtcatgattaactttcagggttggtaaatgggctatacttaagtatcaagtcttctgatgagatgagtccacaactcggcttcagaaagttgcatattaagagtggtcagttatattgcaactatcctaaaccgaaatgagtctcttaggtaacagtaaattcttcctgattctgaccactcattatggcatggcactgtagaaaaccctagtactttggatttttctagatatttttgattccggataaagtgaatttagtaatgcatccaaggcacagatattaaggcacagagttacagctccaatgctcgctcgccatgtgactggatgaatcaccaggtcattccaatctcagttcttgattgtaaatggagataatacctgaactttttatgagatttaattgaggtaataatgagggcagttgagtttttatcttccttgcacataaagcattcaaatcttgtctgtccaaatgacctgggtccattctcttttccctctttctcttttggaagactggatagatagctttctgaaagttgtcccatacttaatagtatttgggtagattacagagctggaaagctcacagagtgcttttaaatactaatcctattgagcaaatattttcactattcccaaatgggtcatttctcttgccaattcagttcattcagatgaagaaccattggcgagtcttcccagacagagaccctgaaactcagagtagtaatctttctagctgagtgaccttcagcaagttgggaaggtggctataattcaggtcttctgactcacaaagcagtgctcattctgacagatggccccaggctttccatttcacgcaaccctacatgctcagccaacatgaaaaggtagcaaaccttgactcttatggatgagtgggtggatgagtagatggatggatgggaggatagatgtatgggtgggtgggtgggtggatggatggatgaatgaatgagtgggaggattggtggatgagtgggtggatggatgggtggttggatgggtggatggatgcatggatgggtgggtgggtagatgggtgaatggatgggtgggttgatggatgagtgagtggttgggtaggtggatggatgggttgatagatgggtggggggatggataagtgggtggatggataagtggataggtggggtgatggctggatggatgagtgggtagatggatgagtgggtggatggatgagtgagtggatagatagatgagtgatggatgggtggatggatgaatgagtgagtgggtggatgggtgggtggatgggtgaatggtgggtggatggattggtgggtgggtggatgagtgggtggatgactttttgttgttgttgtttttgttgttgttgttatttgtttttggtgtccccatgctcttagcataaagtaggaagggttggaatggtattgtgcgaagattctcaacgagaaatcaaaagactcagtttgaaacatcacctagtcactacctgaaaccaataaatttacttactggcttattatatgtctcatccagtaagaattcaagtttcttgagagcgggagccttttccaccatgtcctccacttatcccaagcacctagcacagtgtccattatacattaagtgctcaataaataaagattaatctgatgcatccatcccagatctgccaatcatcagccacataagcttaaaatctaaccctgtctcttggtcctccattagatccctgcaaaatagagatgggtggcatctcccctagtccaaagactgctgcagggaactggagaatcagcaaaggaatggatgtgaaatcgcattttaaaacatagcactcagaaaatgcaccctgcaaagcccttttccatatcgaattccccttcccctctcaatctctaactttcctttgaatatctgattcagctcatggctttgctagaatctttatttgggttgcttttagtttctaatgcgagtgggggtgagagtcaggggtgagagggagaaagacagacaagtgctctcccaggccctggggtcctggatttgattgagtggcattgataaaagaccttcccagcttttttggctcagtccatcgggagagatagtttggagacagccggttccaaacacaaggagccctccggcctgcctggccctgtgacatttcattgggcctgactcctgggctcattggaaaggagacagacaatgaggggaagtcagatagtggggcaggcaggggccagggggaaaaccacccatggagttatcacttaatgagaatcccaactggaaggaaacctcggctgattccttatcactttacagtgtggaggctgatgatgaattgctatttgttgtctcctaggcaggacagagagccctcggttggaatgttccctgtcactgggagctcccttttgggggtggagggaggtgagaagggcagagtttctggaaaggtgaaaggatttctccagggtgcataccccattcaccctgagcccacaggcctcagtatacatctcaagctgggccactcacgagctgagtgactttgggtaagttcctcagtgttggtttccaaatccacaaagaagtggggtaattcttcaccttgttatcgccaaccagccactaaggcctgattccacccacatctccagcttctccccacaccctggtcggagccaccatctcctgtttcagaccccatgacagcctttcaatgggtctctggtgccaactaaatagtcctgtgctatcatagcacagtgactgcttccaaataaagaacttaggcatgttactcacaaatttaaatccctccaatggacgtgcactggtggtaggataaaatctgacatctttcattaaaatggcttatacaggctggcatctcactggtccctgccttcccctctagccctcatcccccaccactttgcccttgccttgagtgccaacatctcagccttctgttcactccccagggggcaggctctccctcagccaaggggcttcatgcatgctttcctctatgtgtggataccctcacacctcccccttctcctatccagcactcagtctcctctgatctcagcctcaatgcttccctgattgcctaccctagactgacactccagtttgatattccttaacactttgcatatctcctttatagcattcaatcatttattttattttatttatttattttttgagacagggtctctctctgtcacacaggctggagtgcagtggtgcaatcacagctcactgcagcctcgaactcctgggctcaagcaatcctcccatctcagcctcctgggttggctaggaccactggcatgtgccaacatgccagactaattttttattttttgtagagatggagtcttactatgttgcccaggctagtcccaactcttggactcaagcaatcctccagcctcagcctcccaaaatgctgagattacaggtgtgagccacagtgccaggcttcacaatttcaattaagcaatttataattacttgtataatgtccaacctgcttgcaaccgtatgagcttcacaagggcaggcctgtggcaagcacatgttcattgagcacttgtaggtgccagacactgttctaggtgctttctgtggatgatctcatttcccctcatcacaaccgtatcaagcaggtgctattgttatcctcattttgcacaaaagatagttgaggcccagaaaggtaaaacaacttgcccctgggcacacagctgccaagtgtcgtcaactgtgagtattactacagtggatcagcccccaactccagcttccccagtggccactccaagttgattttaagctcatccaaggatccaacaaacagtccatgaaagtcaagtcataacctaagaggtttgtgaaccgtgcattcaaagcctccctgccgcatccttcagggatgcatttataaggatgctgctgtaaatattgaacctaaaaagcaccatgatcctttttaacttcttcctgcctgtcttttggtctggcattaatttaatcgattagagctcccgaattcaaacctggtgagctcttaatcagcatgtttgacccagtctcaaagacagatcttcagtggaaaatgaaattttgagattgtagcagatgagcaaaggtaaccaagacggtatagagtagtggtgaaatgcacacgtatagaatctgcagaccaggctggggttcaagaaccactggcagtttttgtttggaacctttctgagcctcagtttccccattgataaagtgggttaataatagcatctactccatagtgttgtcgaaaaagcttgatctgggacttaggaagggcacccttaaatataatataaaacagaatctctattcagggacctgtgtcccataggacattcttaacctcctgctcatgcctaaagaggcagacatatttgcaggcatctggtctccagtccatccggcagcagacgtgccgggagtcacgccagggggcctgttggagtgatattgttcaggcctttgagattcaaggagtttggattggcttcaggtaagtctggaagtcaggcctcatccaggtcagctcctagccccatgtaaataccaatgacagctcttccctcctttaaaacgcaagattggtaaatgtcaaatagtcaaactatgttactttcctcatgtaaccccagctccagaaaaagctaccaaagcatccattcccattggttgttagcgagttattttttcctaaagggctaggcactgggcactggattcacaaaggcttgtgttgaccactgaggctgtgaggttcaacaggccactttgtagattaaaattagtgtcttttagagcaaaacagctactactttctgagtcaaccctgagataacatatgatgtgtatgattttttgacatctctgcaccaagcctatgagacaagtcgtaccctgagcccatatttacagatttttaaaaatgaggcttggaaaggttaagcaacttgtcactacttatgaaaatttttaaattgcaaaggtgaacttcatcctgattgattctacagaccacagatgtaaactttagcctaccccatcccttctgtatctgtcttctcaagctctcacctagagaggcagtcttctctgggaagactgattaaattaatgccagtccaaagacaagaggcagattcctcctgggaatcaccttctggagcgatatctgccacatacccaatcatggctgccacctactgcgtacttgctaactatcagatgctttaggaaacatatcatttacaaagtgagaaactgaggctaggagaggctagaacacctgagtgaggtcacacaagaagcagggagcagagatgagattcaaacccgcatctctctgtccccaaaggctgcagtctccccaccataccatctacagctcacaccaagcaatggttctatcgagctgaactccaccacaccacctgtgccaaacacttctattctggctcacaagaagggccaccagaaaattctttctttagcttagcccctttggacttggatgacttagaaaaaaaaaaaagccatttatttctcatgtggcaaagaaaactgcggaatgcctcagcttagtagatttaaatgggggatgagacggggaaaatcatttgtgatgtgtgtgtgtgtgtgtgtgtgtgtgttggttttgatcaggaaaaaaaaaaaaagagttcaaaatccacctgggagaaacactgacacatatgccagagaagcattgatagtcacaaggggttttcctgcatcacggcttgtaataccatcagggaccactcaagcaacctccctgcctaccagagggagtgacaaaataaactccattttatcctttccagtcaattcttcctccttagcagttaaaaataaaataaggcagtctaggttcataaaaagatacccaaaacacattctaaagtttaaaagaaaaaaaacagcaagttgcaaaatacatacagtgtgatttcatctatattaaaagtttttaaaaaaaattttgggtgtggtggctcaggcatgtaatcccagcactttgggaagccaaggcaggtgggtcacttgagcccaggaggtttagacaagcctgggcaacacagtgagaccctgtctctacaacaacaacaaaaatttagtacagtgtgtgaacgcatgcctatagtcccagctactagggaggctgatgtgaaaggatcacttaagcccaggtggttgaggctgcagtgagccatgactacaccactgcactccagcctgggtgatagagcaagatcctgtctcaaaaaaaaaaaaaaaagaaaaaaaaaagtaaaaataaatctagttctttctctgcactcgccacgtgtatgtgtgcataaatgaatacaataggtctgaacatttcaaataagctttctccaaaggaggggctggaactgggggtaggaacatgtcaagggaactttttgttttagctgtttggtttaaatttcttatctccatatatttttgtgttgtttacatttttaaataaataaagtaaataaatgaatactcctcaccccctcacccccaacccaaggaaaggaaaaggtaagaaagaaagcaaattgaccaggggtgatcacactcacctttcctcttggtacaatggtaaatttggctatgctcctggggcagtgggtatgggttgggtggaggcaggaggtcctgggaggggccggaaacaccattctcacactggtattgggaccccaaattggatgaggtggagagagctcgagactcgctgctgaaaggactgtggttggaggccactttttgcctcacggtgctcctggggaccacgggatattctttactgaaagagaaaagatgggagataacgcctatcagtgccctgatacagatttcctgagtggctgaaccaggtgtgagagaatccaccagaaaagtcacagaataaggaaaaaaaagaggtctttgatgaataaaatgatccagttatattcatgtccatcatatttcacaaatgtatatttgggtactaatttttcatgccttatacattaggcaagtagatttaccaacagttctatacctcagcagaaaagtaaataaacacccccagttaagaaccccttttaacaatcaataaacacacatggtattttgaaatatgtcaatttagtctatgtatgtctttaaattccctaatttgaaagctagttaatctgagtatttatttagacttaacctgtgggtgtccatctttaaggtggggctcaggtcattgcccaaagttagtaaaaactggtagctgacaacctaggaaggtcaggtataatcctaagttactctcatctggatagattgctgctagtgtcagaatttcctcctgagcttctgtccttgtggccactgatatacttaacttctccataccttagttttcccatctgtaaagtagggataatgaatgtccccagttcaaagggctgttgatagaagaaacgggttaatgagttaaccatgaaaagactcagaaaggtacatggcacagagtaaatgctcaacaaatggcaaccatcgtcattactgttattgttttgggcagagagaatagagggagggaaaaaagagagggaaagaaaatgagaaagaaggaggaacaaggacatagaagatttaaaaagaaagaaagaaaaaagaaacaaaaaaggaaagaaagaaaagaaaagaaaaaatcagcatgggatctaagattacgcagctcccaattcaggccccatccctatcccttacaggctgtgtgtccatctgacacacaaccctcccctgagcttcagggctcacacaggcaaagtaagcataataaaaattccatgacatcataggtatagcatccctcagtgtgctcaaaatctggcccctcacactcttaggactggtcctccacattcccttaccttcagatttcataccaggtgttcccattttttttcctcagaaggactcagtagaaacctctcctgggaagaaggaaagtcgtgctgtgcagcagcaggaggctcaaaggaaatgagagaggtggggaatggatgggatgtggaaggttgcagaggagtagagagaaggtgggggtgggggtgcttcaagatagaagggacaaagagagaaatatccaagtatgtgagagaagaagagcttgacccctaacatcccatatccagcatttaggatggggatagggaatcttgggcatggcatttacaaactgcatatattgctaaacagccatttaaaacatattttggtaactatatttcaaatataattggcttctcttgtaacctatgtattctatttcatgcatttaatcatattattcttagagatgattcataggcttcaacacactgccagagaggcccatggcatcaaacagtttaagaacccctatcctagaaggagcatgtgtcagtaaatcccaaacttcagtcagacacaattttcaccatgacatacagccatctattctttaacttatgacattttaaaaattaatcatttatctaaataagttaagcttcactataagtgatcatatctgtgaaattacaggcttgtggtgctaattatagttattttaatgcaattaagacgaatgtttatgtgcctatggtcatagcaactcaggaggctgaggcaagaggattgcttgagcccaggagtttgaggctgcagtgagctatgactgcaccattgcactccagcctgggtgacagagtgaaaccctgtctcaatcaatcaatcaatcaatcaatcaatcaatgcttaactattaaaattaaagagtatacctgaaataatatcatgcgcaaagagctacacgtaacgcattttgaaggatcttgaattcgtccatttcatcctttctatgactctatgtgataggtattatctttgatcccattttacagatgaggaagttgaggcccagggagatgaagcaacttgttcaagatcacagagttagaaagagacacaactagaattctaatccaatcatttcctcataacttttgcattgtatcctaatgatgtctttcaatttttagaacacaatatgcttttaggggagcagggttttggggtacaagactctttctacttctaccccctcaagtgtgtgaacatctccaccctatgtccctgcctttgtttgtcatgtgaaagcacaccagagtggccaggcaggaacacagagcatctgccaagtttccatgagtctacagacaccctcaggacacccaggggtctcctagcccagcttccctgtgccatctcagaaccaaagctggagccatccgagcagccgcaccagtcagaatctccccctggggccaggaggctgaagggaatggaattagctttacagctcttgctttgtggttcaagctacgtaatggaaaaaaaaaagaaaaaaagaaaaagaagaaaaattataataacaataaaacattataaaagttgtcaaaacttgccgacaattctatttagatctatttagttccaatattttgctgtcagagctccaagaggaagggggaaatctcttttggttttatatttttaataggaacagtttttctttttaattaaagaaaataacctccaaaaaatgttggctgagagagtttacaagagaatgtatcaatggactccgtggaattctccgttccagtacagccaaattgcaaaattgctctctggaaaggccaagtcctgcttttgattactaacacagaagtgggaaaagcaatatcatcccaataaccacttgtccctcacagcttgtttccctctaaagagcctgaaacatcatccccaacaccgatcgtgaacatctctgttaatgcctgaaatacgatgtccccaaacccctctgacaagtgtcaaaatatgggcatggaatggggaagtgacttctcaatcattatagaattacacatgcaaaggaaagaaaatgttagaatcaaacaacagcggggcaattttcacagagctcatccatggatcaaaggaacggtcaaccaaagagacgtggttagtatgacagaaatctctaaagtcctccagatgagaagataaaactattttcttctacagcttaagaacatccatgaagaagcaaggacacaagagaattaaagtgaaagttgaaaagcccttctgtctctagaaatacaggcagcaaaaggagcctgctctttttttaatcatcatcatcatcattctcatctacattgttcttcaatgcctcctaatgttccagccaccgtactgcttgacttatatgcttatcctgatttgatcctggcaagaacctcatttcacaggtacagttacatttacattagagataagaaaatgcagatgggccaggcacggtggctcacacctgtaattccagcactttgggaggctgaggcaggcagatcacttgagatcaggagttcaagaccagtctggtcaacatgacgaaaccttgtctctactaaaaatacaaaaattagctgggcatgtacttgggaggctgaggtaggacaatcacttgaacctgggaggtggaggttgcaatgagccaagatagcaccattgcactccagcctggatgacaagagtgaaactctgtctcagaaaagaaaagaaaagaaaagaaaagaaaagaaaagaaaagaaaagaaaagaaaagaaagaaaagaaaagaaaagaaaagaaagaaaagaaaagaaaagagaaaagaaaaaagaaaagaaagaaaagaaaaggcaggtacagagaggtcaagtgacttgtcccagaccacacagctaagaggcaaagctgagtctcacccagggtcaatcctattccaaaactcacgccacctaatactttaaaaaaagcacacacacagaaatgtattttctcatagttctggagatgtgggtgctagcatggtcagtttcgggtgatgcctgtcttcctcgcttctgatggccgccttccctcagtgtcctcacatgccaggcagggagggttagagtgggggatgatctctccctctctctctctctctctctctctctatctatctatcttcctcttttttatatggccaccatcctgtgagattaaagccccacacttatgacctcatttaacctttttttttcctatcagttatcatgtttatttttttcacatgacattttaaaaatttttttgttttgggggaataggtagtgtttggttacgtggattagttctttagtggtgacttctgagattttcatgaacccatcacccgagcagtgtacactgtacccaatatatagccttctatccctcatacccctcccgcccttccttccaagtccctatatcaaggggaatggtggaacggggatgagtgataaaagtccccataagcccattatatcagccacctaactaatgcttaataataagcaattgttacctccataccaactacttggcaaatcccactttataaagcatgctggtaatgagagaattggatattggctccacccgggcaatatcaagatctactgatctatcctactctttgcagaaactttagtttgcaacagtcaaatctcactgctctctgctgtatcaagcagctacacctgcatcccatggacaagctctgacaagagtctgggacccccgaccccaacacgagctgggggtcctgagtacctcagctggccttgggtatcagcgcccacagaccagcttctccccagctctgcccttctctcatgttctgttccacgtgagcgagtgcaatgaatgacgccattgtcgctgggtctgggttgtaaaacgttacaagggaatattgaaatccacggccaaactgcatcctcagcctccctccagctaatgaacacccgggagaacgttttccactacagccgactgaattggccttttcatgggagcaggtggcagggggcgctggcatgttcagatttttgtgtttttttttttttttttttcctggtgatccttacccaatttctggcagcctttttcaaacaactaaagcagtgcactggggcaaggcgagggactgtgaaatccctcttctcttggagcaaattcctcttctcgatagcattttaatctgtgattaaaattaaaaagggggccacatcaccccttgagagctttcttgatttcttaacattctaattctaatacacttgaggaagttgttctgatctaacatgcacggacacggcagggactgcagagggcacacccaaggctggatttcgcctagtgcaaatagtaaataatcactggcttcttcaagtctgcaaagtgcttactcagtttacactacaccagcaggagaagggcgctgggtaccatgttgctgatgagaataaggggacacaatgttctcacttataagtggagctaaagaatgtgtacaacctgggcgtggacatagagcatggaataacagacattggaggctccgacgggtgggaggtgggtgagggatgagaaattacttaatggatacaatgtacactattaaagtgatacttacactaaaagcccgacttcaccactatgcaatagatccaggtataaaagctacccttgtactctctaaatttatacaaatttcaaaaaagaatgggggtgagggcacaaagaggttataaaactttcccattgtcggtttttttcttttgtttttaagacaaactctcactctgttgtccaggctggagtgaggtggcatgaacatagctcacggtgacttcaggctcctgggctcaaggggtcctcctgcttcagcctcccaggtagctggaactgtaggcatgtgccaccacacccagccaatagttgtattttttttttttttagagatggggtcttgctatattgcccaggttggttttgatctggcctcaagtgatcctcccctctgcctcccaaagcactgggataatagacatgagccaccttataaggcctaaatttcccattgttgactcaaccagggctatatgatttgaggggtgccaagaaactcaaaggcacttctctccctggccttaagtacccaccacttgtaaaaattttggtttggggccttgggtcccacttgttaaatctgtagataatatagtatcagagtggtagcatcaagctcaggctccgatgtcaggccaggtgaatgtgccttccttcagtatccaggcacgaactagaccactccattgctggctagtttcttcctttacccaagcctcagtcttctgtctataaaatggggataataaaatagccacctctttggggttataaaatgaaatgatgcatggaaaggcttagcgaatatatatacatacacacacacacacacacacacacacacacacacacacacactggggacacattgctcaataaacactattttgtaaatatacattattatattttggagcagaggttcttacccagcaagggcttcaaatgggtatgaatacccaaaaatgtcaaatatttagagctgatcactttttctaggaagaggttcacatttgcattggctactcaaaaagggtctgtgattcaaaaaacggttttgactcaaactatagagatggttcggaaatcatggagaaaagtcctgggcaattcatgacattaccctttgtctcagtttccctgtttgcataacggagaacaagaggcctatctcacagggcaggtgtggattctgcgggtaaaagctagatgtaaaactacagacaacaaaggacaattcaagctaaactttgtaaaactacagacataaaaggacaattcaagctaaagtttgtttgtttgtgtttgtttttgagacagtctcgctctgtcgcccaggctggagtgcaatggtgcaatctcagctcactgcaacctctgcctctcaggttcaagcgattctcctgcctcagcctcccaagtagctgggactgcaagcacccaccatcatgcccagctaatttttgtatttttagaagaggcggggtttcaccatgttggccaggctggtctcaaactcctgaccttgtgatccgcccacctcggcctcccaaagtgctaggattataggcatgagccaccgcacccagcctcaagctaaacttttaatgaatttatggtaataattcatcaaatagtctagtactgaactgaacagccaatattttagtccagtcttgtaaattaaccatttaaaccagcttaactatgacttaggtttagtcttttcttttacatgattttggaacaggggtagggtggtgagaaggagtcctccaaggcctcaatccttctggaagctggaatgctacagctttctcaaactgctttctgtaccaaagggattgccttggggcatcctttgttctggggaaaatcatgtggaggccactgatgatccagaagtaagccaaggacttcctggtgaccttcgcttctgaggatgaccttggcaaagtcacccaaagcaactatttctgaaggaatgataaatgttttctgtgctaatataaaagtctgcctccttccctgttcagaacaactacaaggtagcaggtctcttggaaaataaaattttaatgtgaggatgttaattagtggagttgggtgattgggggacacggcttagggtggggatggacaaagacgaggaacttcctctaggggagttggtttcaagcttggctgcataccataatcacctgggaaattaaaaatagatatgttgacacccaaactcacccccagggaatttgatgttatagttctggggaacagcatggacactgggagtttttaaaagcttcccaggagaaagaagtcttccacaaagagtatacactggatgatcctatttatatgaaattctataacagacaaaactaacctatagtgaaaaaagtcaggacattgattgcctctggtgaagagaaggaggcagggagtgacaagggggcaggaaatgagagaattttctggggtgatgggaatgttctatatttggataggggcttgggtttcacaggtatgtgcatgtgccaaacagtgagaggtgtacttaacatttgtacatttcaccctatataaattcaacctaaaatacaggagtgtgaacaaaaattgagtcctagttaatgatgtgcacactgtagtgtttggggtaaaatgtactcatgtctgcaatttaatttgaaatgcatcaataaaaagaaggagggagggagagagggacggaaggatggctagatgaatggatggataggtgagtggatggagggatatgtggtagagcaaatatatagcaaaattttaattgtagactctaagcagtgagtacatgggcactcatcgtacaattcttccatgtttctcacacgccttcgatttttcataatagaacactgaggggaggactacaggtaattctaatgttcagtgtgagttgagtactaagtagagaaaagggttgccttttgtgtaaaatggcccatacatgggctttgtttgcagaaatacaatcacgtgttcatctgcattctctagtgctcactcattctctagaaccaagggattacccaagtgtgaccaggggacacctccatcagagccactggagaaaactgttgaagggcagtttctgacccatccctgaagccactgactcaaacctctgagagtgagacctagaaatcttttttaacaagccccccaggtaattgtgatgtctaccaaaagtttgagaaacactgctcaattgtggatgaactcaactcaatagtggtgaaaaaaatcccattaaaaaatgggcaaaagacctgaatagacatttctcaaaagaagacatacaaatagataagaggtataataaaaatgtacaacttcattactcattgaggaaatacaaatcaaagccacatgagatatatcaccttacacctgttaggatggctattctcaaaaagacaaaagataacaaatgttggcaaggatgtggagaaaaaggaatccttgcacactgctggtgggaatgcaagttggtgcggccaccatggaacacagtatggaggttcccaaaaaaattaaaaatagaactatcagccaggtgcagtggcccacgttctgtcatcccagcactttgggaggccaaggcaggaggatcacttgagctcaggagttcaagactagcctgagcaacatagcaaggtcttgtctctactgaaattgaaaaacattaacaaggcatggtggcacgtgcctgtagtcccagctacttggatggctgaggtgggaggattgcttgaacccaggaagtggaagctgtaatgagccctgatcatgacactgcactccagcctgggcaacagagtaagaccttatctcaaaacaaaacaatatataaataacagaaaaatagaactctcatatgacccagggatatatgtatatccctcttctagatatacacccaaaggaaatgaaatcagtatcttaaagagatatctacactcccatgatcattgcagcacgattcaaaagagccaacatatggaatcagcctgagtatccatgagtggatgaatggataaagaaaatgtggtgtgtatatatatacacacacacacacacactagaatactattcagccttaaaaataaagaaggaaatcctctcgtttgagacaacatgaatgaacctggaggacattgttaagtgaaacaagccggacacagaaagatcaacatgacatgactcacttataggtgtaatctaaaatagtcaaacctgtagcagtggagaggagaatggtggttgccagtagctggggagaagggcaatggggagatataggtcaaaggcatttgttattcaagaggcagttattcaagaggcataattcctggagagctaacgtacagcaatgtgaatacagttaagagcacagtattgtgtacttaaaattaactaagagggtacatcttaaatatttatatatatatattaaaatatatatatacacaagaaaataaaatggtaactatatgaggtgctgaatatgttaattagcttgattatggtaattatctcacatttacgtatattaaactattaagttgtataacctaagtatatacactttttgtcaattatacctcattaaagatgaggaaaaacacagatgggtgagtgagtttctcccaaccctgttcctgaatagcagatatgctggggatgggttaggtgggggtgggggtacctgagtgggaaagtgggaatgtggcggggttgggttctgagcatccatgccttgacaaataaccatgacccaagatgagatcctttcagaaaaacatctcaattttacagcttcacttaggctggctcagctccccagacacaaccccgctcttgttttacataaatgcactgcttccctggaggaagccatgtggctaggtaaattacaaccctaagaggggagttaatgccatctccagaaggttgtctaatgttgtctcgaaaaccacttctcattaattgggcattcagattacctttaaccacaagcatgagaacacaagagtgctaagccttcagtttgaaaaatgatcatttgaggttaagagctgaaaattaatttaaaatcaggaaggaagtaatagaagagggaaggttcaaatagaagaattttaaccttttaggagacctaggccttatacatcccttgaaattgaatttttttaattgagacagcattttgctctgttgctcaggctggaatgcagtggcataatcacagctcactgctgcctcaaactcctgggctcaagcaatcctcctgtctcagccaaaagagtaactgcaactatagacacaggctatcatgtccagttaatctttttttttttttttatctttttctttttctttttttttagagacaggatcttcctacgttgctctggctggtctcaaactcctgatctcaagcaattctcctcctgtctcagcctcccaaagtgctgagattacacacatgagccaccacacctagcgactttttttctctattcatatattgtgagtctttcagagggtctcttgctttaactagattttcaaaaggagtcttgcacccattttcagaagccctaccctacaggaacaaggtagagagggtaaaaataagcacccacagaggcgggtgaggttggtcagttcccaatgtggctgtgtagagtcctttcaataatcaaactggagctgagtcatgggtgggcttcagtctggctgagacatcctggactccaaactttcccatccactctctggttgggtggctcagatcccagtcaccaaaagtagagcctcaagttaccccttaggttcagggaccacgcccctgatgccgtctgcagcacactaagagagcaaggaagtaaagggagcttcatttcttccatgaagaactctgaggccaaccaagtcccccaatccatcatctacttagcccctgataatgctccataaatacttcttatggtgaaaagaccagtcattgctcatggtcattctgtgtgaggtgagctaagaaataccgagatgaaggactttgctattgcttgttcatattctggggtttatggttacaagaagatgagcagaagcccagtttagtggaaagggggttctctccatcctgaagaaagcaagcttgcagccaggcaggccccttcatccaaactgtgtgaccttgggcaagtcaacctggcatctggcttcaacagaacatggaccgtgtcttaacacctaccagcgatcgagcgtccctctgggccagacactgtgctgtgtgcttccatgcctgctgaggcagttttaaaatgcgtcgacgaattccttgacactccttctaggtagaagagagaacttgtcctcccttcttgaacctgttttctgttttgttttgtttgttttgttttgtttttttcgagacggagtttcactcttgttgcccaggctggagtgcagtggcacgatctgggctcactgcaacctctacctctggggttcaagcaatgctcccacctcagactcccaagtagctgggattacaggtgagcaccaccacacccagctaattttttgtatttttagtagagacggggtttcaccatgttgtccaggctggtctcaaactccctgaatctgaacccacctgagtgagtcacattcaaccaaaagaatgcagcagaagtgacactacctgacatccaaggtgcagtcagcaaggaccaggtggcttccacttccgtgagaaagtctgaacaccctgagtctgccaagctagagaggccacattctgatttttcagtggacaacagctgaggtcccatccaaaagcagcatcaactgtgggtcacaggagtgtgccaagctggacatcctgcctgacctgccttccgttaccggtagcccagccaccatctgatggtcagcaagaactgcacagctgagtccttccaaatagcatgacccaccaatcacagacaaaataaaagtgcctccctggtgcttcctgcttccccttgcacacaacggcgaccagcaaaggcctggtcttttcaccacaagcagcatttatgggacattactgggggctagcagattgcaactgtagggaacttggggactttgatggtctgggagctctttgtggaagtgtatacttccttcctctgctagaagactcccaatgtgttgttggggaaagttgtcgcaggtgagccactttggctggcctggatttaacatcacacacagagaacagatgggatagtttggaagccaggttgtcccagccagcccagcttaagcttgggagtcatttgttatgcagcaataataatcagtacacacacgttacctcatttcatccttgcaacaggcctggaggtaggctctgtaatgacttcctttttacagatgaggaaacagacactcctcggtcgagtagaaaagccctggagctgctcagcgcggcagcctggaccccagctcctgggcctgtttccatccatggaccctggtcccctgtgtgttgattcatccttgtatgcctagtgcttggcatacagcaaacacttaacaaatgttttagttgcataaacaaatcaacagatcaaaagctgaataagtaaatgagtctctgggcctcagtttcccattctgcaaaagagagcaggtggatcagatgctgtctcctggaatcccttctatctctacaattccacacttctaggagcagctctcctcatacctgtcatagagtcactccagctggctttcagagatcttcagaatctgacccctactccagccccctagacttttagacccttgcccacttcttccttgcttcagcccagaaaacccttcttcccaacagattcaggtcccattctctctacgaggtctacttttaccctctccataaagcctactctgccccagtcccagctccagcccctttggctcctaggaagttcagaacttgtttgaatacatcttgaagactgaagcaaagtccaaagaaagagttgttctataaaaaaccagggcctagatggtttcaaacagcaatggcactctcaagcctttctttgtaggtggttgagcttttatgtgtgtttctcaaatttctgtgctttgcatattatcttgacaatgttccccaaaccttgatacgagccgttctgctattcagttaatatttcctctttaatcagccttaactcccctcccttccttgcttccttcttttcttcctttcttagaactcagtctcattctgagcaataacatctatgaaatcacaggactgatgtgtccatgggtctgtgcaccatctaaaacctgtaattcccatgatttagaaggccaggacatgaggattgcttgagaccaggagtttgaaaccaacctgggcaacatagtgagattccgtcgctacaaaaaattagctgggcatggtggtatgcacctgtagtccagctacttcagacgctaaggcaggaggattgctggagctcaggagttcgaggctgcagtgagctatgattgtgccacttcatgccagcctggatggcagggaaagaccctgtcctaaataaataaatagtttttattaaaaaaaaaactcctttgtcaccaatctaagggttcttcaatttggggaaatattagtttttaggattagattttttttaagacacagattgattaacctttctaaataaacttggcacaccctttaattggtctgcttgagacaggatgtttaaatgactttatgctttgtgctttcccatagctcccaaatttttataataagcagtgattgctcctgtaactagaaaccattaaaaaatgttggaaaataaagaagacatcatctgcgttttccaaacacagggagttgggccaagaggtagatgggggaacagccagacatttgccaagcaaatccaaaagttatttctgtggaataagtgcaaggtaatgcttaactctctgtaatcccacctcactcccttctaccaattgttggaattagaggatatttcatccctcctgcttttctcccatagccagctgtcaccgggtgtgtaggggacaggaaacagaattacaagattagcagtgagcctgccgttcctgcctggctgttatcaaggctgactctggagagccatattccccacttgtcactactgactgcaacctgggggttgggagaatgacccaaaataaattctgaacaagggcaaaattgggagtactggggagctttcctccaaattagttaaattttactgaacatatagactaggaatcaagcactctataggcatttgctcatataatttttacaggaaccctagaaagtagaggctatacttatctatgcccctcctgcagatgagaatactgaggttccatgaggttaaatcacttaccccagggctcatactgataaatgtagaacaagaattgaccccaggtttgtctgactccaaagccttctgtgggaaccactcttcttcactctttctccttccccaaggacatgtccagagaccttggccaatgacctcatctactcccccaacttcatcagtggttagttcagccctctggtttccagggcaactgctaacatggccacaaagacacacatggctcttaggctgagaggtttgactcaacatgtcaattactgactttctaccaatgactagccacacttttcctccattccatctgcaaagttcctacccatcaaggacacctagtccaggcctcaagcaatctgcaataccttgacagatggttaggacagccaattcaggccaaagaagagtcatctgcctaaatatataaacagttgtgtgaccagcctgggcaacctggggagatcctgcctctacaaaaatacaaaaattagctggatgcggtgctgtgtgcctggacacccagctccttgggaggctgaagccagaagaccacctgagcctggaaggttgaggctgcagtgagtcatgatcgcaccactgccctccagcctgggcaacagagcgaggccctgtctcaatcaatcaatcaatcaataagtaagtacacaaacaaatgaacatgtgtttagaactttaggagagttggccaggggctgtgggtaatgtctgtaatcccagcactttgggagcctgaggcaggtagatcacttgagtccaggggttctaggccagcctaggcagcatggtgaaaccctgtctctacaaaaaatacaaatttaggctaggcgtggtggctcacgcctgtaatcccagcactttgggaggccgaggcgggtggattgcctgaggtcaggagtttgagaccagcctggccaacatggtgaactccgtctctactaaaacacgaaaattagccaggcgtggtggtgaacgcctgtaattccagctactcaggaggctgagggaggagactctcttgaacccgggaggccaaggttgcagtgagcggagatcgtgccactgcactccagcctggatgacagagggagattccgcctcaaaaaagtaataataataaaataaaaacatacaaatttagttgggtatggcagtgcatgcctgcagtcccaggtacttgggaggtgggaggatcatctgagcctgtggatgtcagggctgcagagacctgagatcgtgccactgcactccagcctgagcgacagagtgagaccctgtctccaaaaaaaaaaaaaaaaaagagcttttagaaaagactcccttgatgactgacatctgacatctgagctctcacacacctgcacatgcccacctgtctctactttcatagctggctgtcatctgtccaatcatcttccaaagttccaggcctgggtcggacacagaaaagcctggagggcaactggtaaagtttgaggggctgattcccaggaggggtcctgggggagacatgggctgaccacacagtctatggccagggaaagcttcttgaaggaaggaaaagctacaaggagactcagtgatggttgggagatggcctggtgagaaggagggaaaagagtttgacacagacgaaatgtgtgttcgaagggccaaaaataaaggaaagaacacaggtttgaagcctttcctttagcatgattgacacatattagggggacactggtgaaggacaaacctaggggggtggccaggccagatgggaaggtcatggctaaccaggcaaaagagtccaaaccttatagtgatggcaacaggagacttggacatgttctccactgcaaagagaacttgcctgatttgtgttttacaaagatctctttggtggctgcctaaagaaagtccctggaggagaccagaactgaatttgggtctccattagttaggaggctggtggtggctagaattagcaccctggcagaagggggctgaattccgagttatgctggaaggtataatcagtaggaggtggtaactggtaaagtttgaagggatgattcaacacaccttaaatctattattcaccccctgcccttgaccttgtaaaaaggagggaagaagtaagagatgatgaaaccctttgattgcaggtgggaatgggtgatctcccttcagctcccacctgcacagcaggaactttgcctgtaggactgagaggtgactttgtgtggcaatgactaagccaccttaacggcaaatcaccatcagaatgggataggaacagaaagttggcactctgagcccagggccgtgaattattgaacctctttcagctaaaacatgatatttgttgtcatcttttccactgaccctatggcccaatcaatttcaaaatgtagatgcttaaaaccaaaaataaattttaaataacaaactcagaacttgcctattttagccacaaaaagtaccttgtgagtccacaatcttgaaggaaaccaatttatgaaaacaggaatgtgtgcacagatgtaccacactccttgtttttttaatgtttggaaacagggtcattctcttgttttttttttttaatatttggagacagggtcttgctatgttgtcccaactgcagtgcagtagtgtgatcatagctcactgcagcctcaaattcctgggttcaagaaatcctcctgcctcggccttctgagtagctggggctgcaggaacatgccacctgggctagcattattttttaaaaagcttgcaaaatttgacctgataagcccgctatctaaaaacaatttttccattgcatgtatttctaaacctaatattaaaaccacagatttaaggtctttctccctttatgttcttaggtctcttatctttctttgaatgaatatatctgtctatctgcctgactctcccttttcacatcttccagaaaggataaggaaaacatccaaaaggatctcattttattttgaaacactaaacccaccaaacagaaaaaaagaaaacacacacacacacacacacacacacacacaacacacacacacaaaccttcttggtcagagggatcaagatgtatttctaattcgcttgccatatggtaagttattttggaagcacatcaagaggtagagagaatgttccacaaaattggcaatgcttgtacaatcctttcaaatcagaccaaattcccactatgtacatttgctacagcccgttctattcatcatatcagcaactatgaccacaggatatgtaaaaataccgagcaatttttagcaccagcttccaatcctccagtgccctggacaccacatggtgtcaagtttgtctgtatttcaccctcaggaaatcaagtcattaacttctctttcatttaccaagagctgttgccaaaaaaaaaaaaaagcattcatcggctgtgacttatgggaagaaaaagagaaagggtttccctacagggagagagacagcagagaaagaagagaaagctgtgccttttgttccctgggagaatggagaatgccgaactcttcgtaccttctctccactagaaaatgtattctccaggttgcccaatggcgccaaccacatgtgaaggttatcagaaaatgggacagagggggctcattctccccatttccatgtgcctggcattctacgggcaggaaggctggtggagggaggtgctgggttgctgctggcttacctgggtaatttgaggggtatgtggggaggagaaagttgaggaatccactttcctacctttgcattcttgacattctgtgcagctccatgtcatcactgccccgaaatcctttggcaaagggattattctcaatctttaattgcgtgatctgaaggaaagaggaagagagaacaagctggttttcacttgattgctgcaagaccacctcaggacatgagctaataataaatatcatggaaatgcagcctctggcaaccaaaagaagcaaattaagccagtcacgtcaacgggacccaccacttcattcaagtggaggctttgaaaaatgtcctccattggactgcttttaaaaggggaaaaacacctgggtttggtttgcccattaattggagtcatactctgcatcattccagctgggttcttttttttttttttccaatcttgcattttgtgttttaaacaccatctaggcctcaatactcagtactccctcccctttggaaagctgtgcatgttgacatgatcgttgcacatcaggcagcgtagtcatctccattggaagggttgaccccatcgtgtgtttctgcagaaaacatgtcttgattattgcattcaaaaattctattatgcctcatttcatgttcatttcatagttttgcagatagcgtttcctagttctggtggaaaatggtgcctaatgaaataaacgccaatatacataatgataacttatataatagctattgaacagcaccaaacctctttaatgtcctaagcaaagaagagaggtttctctcttggaaatctgtgttgcaacatacaaggcatagttacagaacagggtctttttgcacgttttggttccaggcccagaactttaatttaatccatcaacgcattatattagtgtgaatgtacagtagcagacccaggtgacagaaggcaaccatacggagtttgccagaagtatttcctaaaaattgcgtgtgaactgaattttcatagagaacatagagaatcatgttatagacatgagagcagcatgactcaaacttcagtcattcaaggttttctttcactattattgccatatctatacagcacctgtacactggcttaatatttttatttaaatcaaaccacttttaatttgcacttatttcacacaaatatgatatcacttctttgtatgacaaactagaatcacttgctactcaataagaagaaaataaatatatgtaattgtctttactcatatccaaagcttgccttctctttgttgcaagtggaaattagacacttttagagaactagttaacacaaaccagtactgaactgagactccctctctaatagaagactagaaagataattttaaaaagaacaactttcagccagccatggtggctcatgcctgtaatcccagcactttgggaagccaaggtgggtggataacttgagatcagaagttcaagaccagcctggccaacatggtaaaaccccatctctacaaaaaatacaaaatttaaaaaaaaaaatagcctggcatgatggcaggctcctataatcccagctactccagaggctaaggcaggtgaatcacttgaacccaggcggcagagattgcagtgagccgagatcacaccactgtactctagcttgggcaacagagcaaaattccgtctcaaaaaaaaaacaaaaaacaaaaaaacaaacaaacaaaaaacactttctctgtgatttcatcatattcaagtatccctaaaaatcatctcgagtctttcccagtagtatagttacagatttgagaaactgtgcttgataaatgaatgtaccctctaatttcttcatttgaagagaggaattcttatctattctgccttctggaagagatgacctatgaggtttacctctaaccccaaaattattgaaaataaaattattatatgtatgtgcacctatgtgtattcaccataaaaaatatacatacaattaatattttaagatatatgattccaactatacaacactctagaaaaagcaaaactacggagtcagttaaaaggtcagtggtggccacaggttggaaagagggagggatgaataggcagagcccagaggatttttgggtttgtgaaactactccctatgatactataaaggcaggtacacatcattatgtatttgtccaaacccatggaatgtacaacaccaagagtgggccctaaggtgaactatggactctgggtgatgatgatgtgtcagtgtaggctcatcaactgcaaaaaatgttccactctggtacaggatgtccatggtgggggtggctgtgcatgtggtggggagaagctataggggaaatcttggtatgttctgcacaactttgctgtgaaactaaaactgctctaaaaaatgaagcctttttgttttgtttggatatggggtctcaatctatcacccaggctggagtgctgcagtgcgaacatagctcactgcagcctcaaactcctgggctcatgcaatcctcctgcctcggcatcccgagcagctgggaccacaggcatgcaccaccatgctgggctaatttttttatttttatttttagtttcagttcagatgaggttttgccatgttgtccaggctggtctggaactcctgagctcaagcaatcctcctgccttggcctcccaaagtacagggattacaggctgagccactgtgcccagccaggttttttgttgttgttatggttttttgagacggagtctcactctgtcactcaggctggagtgcactggcacgatctcggctcactgcaacctccacctcccaggttcaagcaattctcgtgtctcagcctcccaagtagttgggattacatgtgcctgccaccacgcctgagtaatttttgtagttttagcagagaagggttttaacatgttggccaggctggtctcaaactcctgatctcaggtgatctgcctgcctcagcctcccaaactgctgggattacaggcgtgagccaccatgcccagctgagccaagtatttttaaaaattatttatttacttattttgagacagggtctcactctgttacccaggctggagtgcagtggagtgaccatagctcactacaacattgacctcccaagctggagtgatcctcccaccttggccttccaaagtgctgagattatacacatgagccactattcctaccctaaagtttattttaaaatatttttaaagtatccgtgtgtgtgtgtgtgtgtgtgtgtgtgtgtgtgtgtgtgtgtacacattctccctccctcaacctttttttttttttttttaggttttcggagtgacagagtctcactatgttgcccaggctggtcttgaactcctgggctcaagcaatcctccagctcttggcctcccaaattgttaggattaaggtgtgagccaccacacccagcccatttttgtttaactgtgtctattcctgtagctttcagattttttatttatattttattttttgaaacagagtctcactctgtcacccaggctggggtgcagtggcgcgatcttggctcactgcaaactccgcctctcaggttcaagtgactctcctgcctcagcctcccgagtagctgagatgacaggtgcccaccaacacacctggctaatttttgtattttagtacagacagggtttcaccatgttggccaggctgctcttgaactcctggcctcaaatgatccacccacctcggcctcccaaagtgctaggattacaggcatgagccaccacgcttggcctcagattttttcttgactcttctgaatgagtagaaaaatctataaaatccttttggaaagtcatcttaagatgtgtactcctgtattcacttgtattttaagagtctaaaaacccaacatctaatgggacttttctttctcactcagcttttatcacaatgaaatttcacccagttgaccataaatcatctcttaatggacttgcaaaaagttaaggagaaatagatcatttaaaagtggatgaaggccgggcgcggtggctcacgcctgtaatcccagcactttgggaggcagaggcgggcggatcacgaggtcaggagatcgagaccatcccggctaaaacggtgaaaccccgtctctactaaaaatacaaaaaattagccgggcgtagtggcgggcacctgtagtcccagctacttgggaggctgaggcaggagaatggcgtgaacccgggaggcggagcttgcagtgagccgagatcccgccactgcactccagcctgggcgacagagcgagactccgtctcaaaaaaaaaaaaaaaaaaaaaaaaaaaaaaaaaaaagtggatgaaggacaccttttcctcccacctcccagcctgccccaccgcagtctcagaagtaaatgtcgaagatggtgaggctgtgacaccagaatttagtgaggatctcagcatgagaattagtgctcagtccatgatgtccatgctccaccaagaactcagaacaaaaaattgccccaaggaaagaagaaaagggtgaattttatgttatcagcaaaaaccttttgctcaaatccattccttgcacctcaaacagattggctgttacccaatcttgcacttaccatcatagcttgcaaaaatatgattgcacaggataagcacaatttcttatatattcacttaggtatgttgatctttacacgtaacttcttttggaaactgattatagatgcctatatgacctaagaattacccttgagaaatgtcaacatacaacatacattgtctgcaggtcaaaatatctgtccactcacatactgtaaccatgtttataaagttcccttcctaatatgctgtgtgttagatcatgggcacacaaactgatacacctggatttcccagttccaccaaaaggcttcactgaaactgacttctattcaccatgcaaatgtactcccttcaaaatcaacataaaaccggatatccgggagagatttgggagtgggggaaaaacaaacataaataccagctccaactgagacagaggttgtaaaaattaatgagaataattgttgtgaattcttgcttttgaaaaaaattttttaaaaccctcacgaggaccaaaaatcttaattatgtctctctattaagggttcatttcctggtctgaaccagaaagctcatacctcataaatatagactccttacacaatgatttaagcaggaggaaaatgccttttaatggcaaagttaagttaatatctggggatagacattgcttgcatacacagccattgttgcaagaacagggaaatgaaatgcccacgtgacctttttttaacacctaaatatttctagggattgcactgggagctgctgacaactgcagtgaaaactttacaaaaacgtgtttcacagaatgaacgtcgctggggaagatttgagtttttaaatatcttttttaagctgtcaaccatctggggaaataagtcccaaatccagcccgagatcacagctgggctgaggaaatgtgtctcgtcattaggggcccagtggtatatgggtatgtgattgcagcctaagaaatgaaccatgtagcctacctacctccacctggtacctacatccaaatagagacagatcattctgaaggcactgggccctttgaccataaaaacggtggcccttatttttccaaattgtcttggcaatttaatcacatgcattgcttttcttttccctgctcatttatccaaggcaaaacgctagacaaatagtccttgaattgataacatgatcagggaatgagccaactaaaccacaaagactaatatttgcagttgtttttcaaccacaggaataagaacttatttaaattcccagtctttcagattctaaactagccaggaagttagaatgagtaaacaaagagttttccgaagtctgtgttttggatggagtcgccctgttaataaactgatctgctaagtagtcaatcaatggtccatcaatcattactaatgctctgtgctagctctctgccaggtcccacatgacacacttgccgggaattatctcattgaatcttcacaacaacactatgaggtgagttctcttattatccccattttacaggtggggaaatggagttaagtcatttgcccaaagtcagataggtttgaacccaagcagtcagcttccacagtcctccaccttaaccctatgcgatggtgagctcagctggcttctacgcatgaagtcagaagtctcaacacccagtccaggtgggacaataaagtagcaagactgagtccacaaatcacatgcaaccctggcccgcttatttaaatcacacatcatatatccacgtgggaaatgtttgcaggggccctgcacttgactgggaaagtgcacagttttggatttgctcctgaaaaagaaaataggtgtctttggtgctctaaaggaagaagtgggggagggtaacagaaagttgtctcccatgaaatttctctcccggatgtcaaggaatctgtcaggctggctaaacagaacattatgcacagctcaactgggctccctgactcaatcaatacagaaaaaaaagcaattattgtgtgtgaacacttagtgtggccgtgaaatacgcatatatccaaatgcgtatttggagacacacattcttagacctgtgagcattcagacacacgattccctggattgcgctaaaaaaaaaaaaaaaaaaaaaatcacacatacacaccccattgggcaggcaggcattcatgcacatcaatcactaaatacgtgtattggggaagaaattttttaaatagcaatgtaaagggtgttgggcatattcacaaatggctgcagtgacagtttcacaggtatacatatatatacacatgaagcttatctagttgtctgtttcaaatatggcagtttattagatgacaattatgcctcaataaggctgtcaacagaaagagggagagagggagtgagttttcccacatctatccacacctgatgagtcttaagaacataactacacagaatttagggtgtttcttccaaaggacctgagaattcagatggttttttaagccggtcacttttatatgtctaccctttcctatcctcctgtatgaacctgggctttcttggggtagagggggaaaagatctcatatatttttggaccccagtctggtctgagagcatgtaagtatatacatatataggaagaattgagcttccttattgctattttttttttcctgtgaccgtcaccgcaaagctaaacacaggtttacagcagccattgagggaaacaggtttcaaggagacagactcaaattggcctgaaatagttttgcatctttcagggcattcgaccctcggttttgctcttgctggttcaacaggtggaaggatactcggaaaaatcctcctacccatttaaaaaggaatggtgtcttgaggggaatgagttttctttccgagggcaggaagctctctctcgacctgggttcccagacaggctttgtggcctggaaaggactgtctatcacagcttggcctgttcacagacaatctggatttggagattagccacagcattttggaacagtcccggcctcagttggggtattctctgccaagccagcctgcactggaatgaccttcgaggggtgaggggaggatttggggtgctaagccttcctctcatccttctccggcctctcctgtccagtccccagctcctgcagttccccctccaccccagccttgctggtggggactgtagctaagaaaagggaggggcacaccatctccacatccatctaggtgacctgccctcacagatcccatatggacccccctcccactttgcccttccagagccttctaagcccaaatcactgcttaatactcctaacagtctacaaccgcacgagggcaggggcccctcccccagcacctattgctcgcctctccagattctagaacttttcataccaaggcttagaacattaaatccctcctgccacccacaataaaatgaatccacatgcactcgggtatctaaggaacagaggtgaatcctgacaagtcgagacaaactttctcctgaggaaaaagagaagatcctcccccaccctccaacctgccgctataggcagcctgctccaaagtcattgtcaagctttgaaatgccaaaaccagtgcctggattttgaacctcatggggtctgactttcacacaatccatgcgacagcataccgcccctacaccaaactgcagccaccttctcccaagcaatgcaggtctgcctcccctcaccaagctgtggttctgcaggctctttgtctaagtccagcttgggagtgttatcccaagctgctggtggtgcaggttgctctgttttcattttaacaaggcaaacctttcccaagaatgtggtctggagtcagtgatttctgaaacaattagggaagcatcaggaaagtccaatcctaaggatcccggcaactttgccacctgtgctgttgccagttgagtggcaaaattgggtgcagtggctcatgcctgtaataccaacgctttggaaaaccaatgtgggaggatcacttgaggccaggagttcaagaccagtcctggcaacatagagagaccccgtctttacaaaaaacaaaagttaaaaattggctgagcataatgatggtgtgtgcctatagtcccagctactccagaggctgaggcaagaggatctcttgagcctgggaagtcaaggctgcagtgagccatgattgtgccactgcactccagcctgggtgacagacagagtgagaccctgtctcggagtgaaaaatattaaaaaggcagagaggagaaaactgaccccagcagaaacagttgcccagaaatgaaatggcagcaccagagccattaagcaacctttcttcccactaggcatttcataaggtcagtgggatgccttcttgtggtatttgagtgtgtggcccatctatggtttgacaagtttgtttctaactggtgtgggtgcatatgtgtggtggtgactgtcaagccaagctcgtggatatagtaaaaacagctgaaactcttaggctgcagctttgtccccaccccagcaccctggggtcgaagttggtgactgctgccattcagaggagcaaagttccagcaggaaaaccttgcagattcatgcaaaagaaagagcagacggccccaggcactggttcctgggcttcaggcttaccttgtggttctggtaggaagtcactgctataaacgcagtctcaggaaagacgtgagtgcagaacgctgtattttttgagccaaatccattattttcatccgctttcacgatgtgtaatctaggctggtatttgtgcatggaatttagaataatctaaaaataataaagaaaatgagattgtaagaaaatcaaaactccctttgtctccagataaaaccctgctccccgccctctaaattcgccttgttatatcggctctcgaaaaatagatatttttcttctgttttgaaaaggggccagggatttcattaaaaagaaacatttcaaaaataacaatttccaaccgaaaaagccagggtaatattccaggaatctacccaaggcacacagagcagtaaatcagaattcttaataaagtttgcttaataaattaactccctgcatagggcacttcccacccccaacgggagctgagcaagtctggatcgaggaatccgcgtctggagggaagcctcaagggcacttttggattgacaggtggtgtaggggcacggggacaaacaaacaacaaacatagaaataacccccactccccaaatctctaagggatgcaagagaagatatcaagtgtttggaaaactgaaataagtaaaaaaaaaaatcaccagttctctgcacagcctttttctgaggcttagggtgggtgatcagacctcaaatctggggcctttgtttggagaacaagcaaagcagagttcgtgaaaagagaagatatttgggggtcacgggtgatctgccctccaaggatgtcggctcataaggtgtggggaggaagcaccacccacacccctcaaagaaggggctggttgccttggaaactccctttctccagctttatcacgtttcaggatccacaaccagaattatctccacgcttggccccagacagaacggctacatctgctttttcgggaatattctctttctacttcctatcttccccatatttaggggtgttcccagggacaagaggggtcctaactgctgtagttgtgctgtaatttttacaaccaccattatcattaggaagaggaggaggaggaggacttccaggctgcacgttcttgctggagccagggctagtcacagatgagcatcctcaccaataaaactgggtttgttgttctgatgacgctagtatttaccagaacgctctgacacatccccaccgaacttgcgaatcgccgcgtttaacagcctgaaaatctggcctgctttttcccgggaactgcggaggttgtctctgtgactttgattatttgcattgatgaccctggggcaagattcttggaccaaccctggagtccggccccgatcgagtggaggtagttgggggaggcgagccgcggccgggggcgggggagggacgaggaactcgcgggccccgcggctgcccgaccccgggccgcgcgtctctaatctccggccgccgtggcccggccgcctccccggccgatagcgacgccgaccggggcggcgtggcgacagagagacgcagcggggccccgctggccgccacagtccccggccggcggggccatcggcccggcttagccaaattgctttgacggctggggacagtgtggagacatcagcgcgagggcgatctaatggctcctaatttcattaggccggctctgaattaaaagtccggagtctcgggtgggaatgcctggcttctaggcagttctgagcagctccgagcccctctccccagctgggaacgtcctgaagctggcagggatgccaggaatttggtggtggggttgtgcaccttccgcaggcatccgccctagagagaccccaaaggcactccagaggagcagagaaaaagctaggagctgaaatgagcctggggaaccgtcccacttcccagcgtcaaggaccacgcaggaccccacccaagggtcccatcctccagaaggagccagcccagagatgcatgtggaacctttagaaatggctccggttttccctggtgctggtaaggcatctgctggggactggcagatacacagccagggcgggtcagccaatgcctacacaagctgaatttacagagcacctcctgggaagcccagcaagaaggactcgtgggcaaaacacccgggtttaacagagtggctctgcatttgcctgggaatgccttccgagcgctccaagcaggctgcacagagagtgaatgattctttttcctctccacccacgtgctgagagctgcatttacccatcagtgtggacccctgagatcctcttcccatcccagatcctggggacttcagtgcttcagccccaaggcctcaaaggagcagatttctcgtttggaccttcataaaccatcctcccccgcccccttgaccaaattcattccctcccagtcccctcctttccctgaaatcggcgaccatgcgcctatctgttgctcctctttgaagctacaaccttccaggacagggaactccttttgtaattagagagacctagccgcaaatctctgctcccaaatacaagctgtaggaccttgacaagtcacccccgtcccctggactctcctgtgcaaaagctatgcctcccgtccgccccctaggctgccgtgagaatcaaatgcccaagacgaatgtacccacttgtatggcagaatcatccagctaaaagttctaaacgtgaatacagaatccgtgttctgttctagtaattaattatcttctacgatgagatttggggacattttttcaaaaatcagtgttttgtgttttgtttttctttggggaagaggggtgatgaccctactaagaatccactaaaacctacacattcttttgggtggtgagcaggctgcacattcaataccctgcattcagtttcaggaaattcaccagtcccctctcttgggtccaatccagactccaagtttaggaccctggtttacattcgcctgctctgggcacagtgtggaaagggagaaagctggttgttggaaaaaaaacagatctccccgggagtatcaagctaaaaagtggcactggcaccatagttctcttatgagttcatttcccatctggaaaagagggggcaggtgagctgggctctccctctcccctggaacatcccaaaattaaggcaggattgagaagtggggagggaaggtatatggctttcattgtggtccagcctctgtgcagtctatactgggtatccactgggctaggaggtccatattttctgcaagactgaaacacagccctccactcctaaccacagatcgaattcacagactctccaggcctggaatgagcagcttcaatcattcctccatccctaggcaaagggagagggtttgggccctaacggcaaggatgcagccccagaccaggtgagccgggggccatatctccagccaccaaggaacgacagacccagatctggggagtgtggatcaccgggaggactgcagaggggcagatgtctgtgtaggagagtagtggagacagaggatgaaatagtaggaagaaaaagaaagcaaagggaaagcaagtgagaaggtgaaagaagagaaaggaatgagagaattgagacggaggggaggaaaaggaagaggaaggaagtccagatcaagaaggtagaggcagaaagcgacgaaagtgggggaaaatggaggaaagaaaaggagaaatgtaggcacacagagccaagaagggagagaaacccagtgagaagaagggagagaggacaagagggagacaaggcggggaatccaggccacggtactcacatgcccaaatgggtccaggtggttgttggtgagcttgagtttctggaaggagacgagctgcctcatccaatgcgccccggtggcgggggagtctgggtgcacgtacaggcggccaggcatggcgggctcagctttgcccgtcacagacctagatgaaggagaggtgtactagaggcctggctcagagtctggaggtagcgcactgcaccgaagcgtgcttcagttcacgcaccaggtgagggttgttgagtagtagctgggaataatctggaggctctcccgtctcccttaggtatctgcaatcccagctgccccagaatactttgtgcctgcgcccaggcaagcccctggcccagccctttcttcttacagcctctcgcatcccacaaaaaagtggcgggttctggaggtctggacgtgcaaaaagccttgaaaattccttgagggctttcaacgggggtttcatcgtcaggcccctgcactgctggcagccatgggaacgattctacccaagaaatgggcctctcctaactgtttaactcgaataccacgagtcgattttgcaatttcataaaaatgcatgttcaaagcaggtaactcataaaaaataactgtaaatggttttatgcccccagaaatacctccagcacttggtaacaataccctttgtaaaaatccacaacctgtgggtgcagcaatagacacaggcacctcacttcctctgagcctccgctttctcatctggaaaaccggagctaattgttgtagtttctttgtctgagaatggttagtaaaaagcaatgggataggcggacagacgcctttagcacacagtaggaactaaaaaaaaaaaaaaagttcactgatacaacttttcaactttttgggagaaggttccacttttctctctccccgctccacctgccaccccagtgcctaccatttattatctgcgaatttgtatctgtgatcgtcggcaggtacaatgtccatgagaagaatgtacttcgttttgggattaaggcccgtcaccttcactttgtaactgggaaacatccgcctaagagagagggacggagggagagaggggggcgggaattaatgccagtattttaaggcagcctccatccattttaagggaaaaagcaattcctggagaaacgtggaagcggaaactagccccgttccgctctccgcaagatccatcccgggtttcccttgaagttatagggaggagaaaggcgaagggaggaggtaacagcaggcgggcaactgtaggtaacctaagcggaaaacaaaccaggacgcatgcgcctctagagaacgggttttgaagatgcttcaaagggacctccatttcaactcttgctaaccgcccttttcggagccagacacctattattaatatttgtggggagaggaggcttattaggtacaatgctaggcgctgatcctagaggatctgtctagccaggtgcttccgccgatcctcgcgttgctaaggtgtcacgtgtacacaaggtgtgtgcgccccagagatgcacacgcgtgggtgcgcccaggcttcccgaccttgctttggtcctctgccgctggaggaaggggaaggccgcggttcccagtataactcggttaatgacctctgacatgggtctctagcaggagtttattcctgaatgcccccacaacttctccaaggcccctgaaactcttcctcggagagtcgaaattccttggccttcagcaaagaaattccagacccttccagatctggtttcagaaaaagctgaggcctgaactaagattcagtcgttatcaagccgatggcccggaactgtgccgtctctgctgcctttctgcgccctggcgcactccaaatttccctccaccttctgaggaacatgccccagaaagcaaagattctcaaggctggcccggggcgaaaagacaagttggcagatctcggctcactcagcgatggcgggaacggtcgaatggaggcctctccctccgagccccggagccaaagcctcgcagtgtttatcagcctgagcgagcgcgcccggaggcggaggcgcagaagacttcgcaggccttttatagttaaatcctcacggctcaggctcggggggaaagagggactcggacgtgtctttccttcctgggggaataggaagaggactgcagttcgttgatataaacagaacgcgcctcctagttcactcaggccttgggccgagcggggagcagactttgtttaattttaaataataataaatgtcactgttgtcagtttattgagggaggcttcggctggagaacgggggcggggggcgtctggaaaggcggctccaccctcccccttcacacactcggtggcttgggcctaccgttcgcctgctccacacgcctgctcggggcatcctctggctttttgctttgcgggacgcggaagacccgtccagcacgggtagggatgtggccaggacgtccccaggcctgggcgcgcgcgtgcacatgctcacacactcacactgacatacagagctgcaccactctccttcctcctcccccagaagtctagcatttctagctaaaactctgcgagcttttaaggggaactccggggcgagtgtcttggcgaagctgccgtgtttattggtgtctgtatatagagcccggccgagccccggttcagttttaaaggcttcgcctgctttctataaacaatgaaagaggtagcgaatacatccaacgattcagagtttgacaatcgggtgggaccctggagccactccaaggtcagggagggtgggaatgaggattggagtaaagataaagtccaagatccctgaaacccaaaaaccttctagactctgtcttctctgggtctctgttttctgttttctcctttccctcttctctctttccctcattacgaatccagatagcacggcctcccaagctctttattctttctatatgtgaggtgggagaaatgcccagtttccgggcttgaacttctggagtatttcctccatcctaggagagatcaatggaggaatctccttgtgcctctttaaccaggatctatctttcgctctctctctcctctcctctcctttctcttctttctctatattccctctccttttgcccctttccttccttcttctcttccaagccaccttttcttcttcacctctcccacaatttctcctcgtccctctctctacacaacaaaccatctcaccttccagccttggttatgatcatttccgtgcccacttcgtggaattttagccacagttctctttcatggagaaacactttgattccctccatgccctgcaagaaggagaaaaaagtcacactaacaagccctggcagtagtgggcattccttccccaaactcccccaaaacacagagactgctcctccttcccgctggagcctgtggtctcagagagtaaaaagtggcttcagcccactgcagaattatctggagcacccaacagcctctgcccagggatccctatgtaggctgaatccctgagggttgcaacaaccacttgaacccacagtgctgtattgtctgcttctaatgccatcagcacaaggctatggagtgatcacccaccatcagggtgctccggaatgtcactgaggaggaccggaataagaaaaaaccaaccaaacaaacaaaccaaaaaaaaaaaaccagagccaatttcaatccacttcacctgagatgggtgggggggatagataaaaaacctaatttagaaaaactaggaacctaatctagaaaaccactcagaatattctcatgtagacactcagatgcccacacatcaaacatacagatgtgcaaatacttgcttattctcgaccatggtgagtgcaaacctgaacatacatgaattttgaaacctaaaaatgtttgtattatcatatattcttacagtccagaaggataattaatcctaaatatctatattaacaaaccttccaggctctctctacaagtagttccattcacatccagctattttgattataggacacgcctgatgccatttaacattttggctttcagctaaaactaaatttacagaaccgatgcaaatgtatatatatacatatatatacatatgtgcacacacacatacatgcacacacaaactcttcattttggaataatttacaacagtctaaaaagtgggtttgcttttccttaaaagaaaaaaaaaaatccctaagtttcctaaactgtgttcacgctctctgcttctctacaaatatacacacgttttcctgaaacttaaaggccaaagagagaagccgggaaaagccaggaagggatcgaaatcccaaggcaggattttagccatgtgtaagtgtctcttctggtcgtcaccccgtttcaccccatgtgacaccttatttaaaaattaccaggatctactgaggggccgacttgagcgcccagtgcgtcctgggttttgggcgcagagcgcaaggtgaggctcctccctctgcctgggcccaggttgtagcctggcgaacccgaggctcctggtgccctccgggcagagctctgtgcgctcccagcggccggtgatggcgcgccagccagccaggccccgaccgcaagacaaatggtgcggcgcgcgggtctagtcggcggcgcggaggaggcaggaggaggcaggaggaggcgggaggaggcgaaggctacggaagatcagaagaggggtcaagccatcgctcatgccggcctgaatcggccgctgacctggcccttattaagatgctgggggccgattctacacatagtgcagagggaaaggaattatctaggccattgttagctgaccccaaacggccggataattgagatttctcgaacaatttaaatagatttcaaaaatcctttggccgtaaagataaccgtcacaataaagtagatggcaatacgctagcatttggggagacagggcagagaaaggtggaactgagtgggaataaaaaggaaaagggatgattatagtcgttgggttcgttttggggtttttttattttgtttttgttctgtccccgcaagagaagccgagcaggaaagccagactctgactttgatctctgcaaagggacccgaagcgcgaggtctccttacctgctgggtgaaggcggcctgcggggacgacggggacttgctgggggccccgagcgcgctctcgggtttcgaatcgcagggcaggtcttttgcgtcaggctccagaggcgtgtgcgccaggccaaagccctcgtctgcgtcggccatggtgcgcccagggccctgtgcccgcgcaaggttctgctctgaggacaagaagcagggggagatgggggtggggaggacagagagagaacgagagaaaggttggagagcacaattctagtgacaggagggagcagtttggcccccagtttccagctaccagcacctccgttcccagccgaaggtgactgcagaaggccctagaattattactgttactagtattcctagtagtattactattactttataagcaggcacaacttcttgcaaaagacccgcgtcagacccggagaaggtgaggcccgcatctcccctgcgcaggctctccgtgataagcaagctgcccgtcaaatttgtctggacttctggaagagccaataaagataaggcgtgggtatttttggaagccactgggtaggaaccaaaaacaaaacaaaacaaaaacccagtgtcctttagagaatttctttcttcgccaaattacaagatgccgtcgaaactctttttattaaacctcacaagaggaatagttttctgcagcaggcagaaatgtgtgaaataacccgcctcttgcaaaaagaaaaacacagaaggggaaggttgtgcagattgagactaggttcaaaagagaattcatatacaccttttaccagttacaggccttaacattaaaagtcctttaaaattaaacatccttttctttatcccaaccttaagtaagattcgttaaaagataaaaagtagccaaacagaagactagatgaagaaagtcaccgtgcagccgttccgaggaaggctcgtcactgggtgcccgccaccagcgctctgatgccgggcgggggatggcgggcattttgtggagtgaccaggccgaaaggggtttctctgaacttcagccaggcctggcctgctaaaactgcaggctcaggctcaggattggcgaggacaaaatcattctcggataagtcctaggctggagacattgaatctgcagcccgggtccccgcaatgcatagaacggcccgggtttgcaggcgtatgagcttagaacacacaaaataactgccgcagagctgttcaagcccgatgagcctgtctcctgctctctgatctccttccaatctcttctatacgcaagtaggaattccccctagaacgggaagactttgggaagcgggcacaagcgatggtcccccaaaacctcagcagctgcttaagcaagcggccagatcccaccctgacctgctgtggccagagatctagaaatggggccgaggagaaggacagcttctgaggcctgacttgcaagcagctttcttcgcctcgttctcggggcttcagggaggcggcgactggagccccgctgcctactcacaacaaaagaaagcagggctggcgcccctacacgcgctcccattcactgccggccgcggggagaatcctaccccgcgccctcgccagggtcccggggagctctgggctggcggaggcgaacaagatgcggtttgacagaaccaggccgtgcttctgcaaacctcaatgccgctccgccagccgcggcggcctcccagactccatttgccggggagctccgagccgcgcaaaatctctgcaagctgtgctctgcagaatgcaaagccgggctggaatccgccattcccgccgccccagccgactcggccgacgagctccctcctgagcctcccgggccatctgccgggacggttacctcgttcggtgaagccggtgcattcaccacatcctctgctgctcctagcagggaagccggcggtgaggcgggggagcaggcatggtggctccggggtttatgcggggtttactgcttacccagaatagcggctactgctgcctactagggcgcacctaccgctggagcctccgcggcgactgcccacctccaacacacacctcctctgctgtgcgcttgctctccctaaatacttcccagttggcaagcgccaaagaacacaaaatagcctccaagagcaccggcaaccatataatctcagtgccccgctcctcctttacacccccagggagggaaagttggaagcccagtgaatggtcgaagtcctttctgagcgcagctttcaggattaaagttcccggattcgaggtaagagtcagtctctctcactctctctccctctctctctctctctgaaatacaagccaactcagctgagcacagtgacgttgggttgcctcgatgctcacaaagtactgaaatcgcctatccaactagctcccactgcactctgtcgccctcccccttctctctccctcccaccctcccgtcctcccttccccccaccccaaatttccactagatttcccgaacactcaaatcacaatacgactctcaacacagacctgcaataactccctcctctctacccctttcccaacctccatccatctctgcttctctgagcaagcggtggctgcaaaaactcctgcacaaatcatttcaaacgcggtcggcttctaatcgggaagtaatctcagtgacgctggcggtgcagagaaccgagtctggacgcacacacacaaacacaccgcgggcctccgcagccttgcagacattctctccaacgctgacctcgagaaggagagctgcctgaccccgcctggccggcgctcgccttcctgacatctcccctccaccccctactcatcacccctactctcaacgactctggggtgaaggcagggtgaaggtgcattgggatgggggccgagatcaaagatgctaagaaatcgctgcgggccctcaccccccacccagtggggccaccagacgtcccctgctccaggtgtacacaaggcagtgcccagttttattaaaataatcaaacagtcactggggactggctagggttttcatctccactggtctcctctccttgccctttccctctctgagatgtattttttttttttagggtgagttgaagaggtcaataaaagcacaaacacagtcagtaggtctcagtctgagcagacccagattgggacaccgaatattggtgcttggagtaaatgtcaggagtcctgttctgtttcccatccttacctcctgtacccccatcatactgatttttctagggttctgataagagacttgggcctgcaagtcaaggtctggagaaagggatggagggaggagaaatgccccgaggtcagcagctgtgtaaccctctgtgactgctctgctaaaatcccaggccaggccattgctgcaaaatgccaaagtggagaatctccaaccctgaatgtggggcaaccggggagaaagccagccctcctttgctatggtgctcactccaccttccaggtttgtttgcaaacagatattttccctttgcccaggcgatgtatttatttgtgaaaacaccctcaccctccaagtcagcttggaggcctttaggcttgctggcaaggcgaccctaggccgaagacacgaaaaacaaacatggcatcggaagaaggctgaaccgctacatctccagtagagggaaagggaaatccagaaagaccttcccaatccctttaagttctcagagatttggggataaaattaattcccataaataatcttcaggcccctccagagaggaaaaatctggactctcccaggtaatagcccagccagatttgcttagctcattgagcacagatggtctgggccaccaagcaaaatagggattttcaaacctttcgagagaatccattcttgccaggtgacacacgaagccattcttatttcgttcatgagaagtagcagcacagcaagagaagattcagcaagactaagacggggtgaaaagccaaggagggccaagtgcaaagagaaacctatttcccccctcagtcctccagggtgaaactcacctccaactatcccacctcttctttggagcgcaaaagccaggagtgcgcctcgctggagagcagggctcaggtgaagactttgaaaaggaccaccaaaagagacctctttaggccaggtcttcttccaacgtctgtcaagaagagcacgtacctcccagctcaaggttggtttgtggtctccgacaaattaaatattactgtttattaccaggcataccccagtaaaataaagaggcaaccaggcgatagcgactatctcaccagccgctgcacctataggacttggagacgtcacgagtcacgcaaccggcccgcgcgctgtcacgtttggctggggggcagcggcgggaggtaaatttctctccgtcttcgcctatcagtgccgggtctgcgcagccacaggttccggacgtcttggccccgggaataaataaagacataaaccaacccggctttctccggaggaatgagggtgatgaacataagacacaaatagagccaagatcgactttcttaggaagggggagaggagggaactcttcacgaagggaggtgggagtccacctcagacctctattggaaggaaatcgagttgttccgggggactgaggtctcttgcataaggcatgggatccttattattattattattatttttaaatcccccgcggaggagctctgggcaaatgaataccgaggcgccgctctagctggttaggcttgggatgcgataactcagtgccctcttgcagacttgcatagaaataattactgggttgtcgtggaggggacacgagacagagggagttctccgtaatgtgccttgcggagagaaaggtccaagaatgcaattcgtcccagagtggcccggcaggggcggggtgcgagtgggtggtggagtaggggtgggagtggagagaggtggtttctgtagagaataattattgtaccagggcccgccgaggcacgaggcactctattttgttttgtaatcacgacgactattatttttagtctgatcaatgggcacaatttctaagcagcgcagtggtggatgctcgcaaacttttgcgcaccgctggaaacccactaggttgagttgcaaaacgtaccgcgtagacgcccctggtggcgccgagagaagagctaggcctgcccagcacagagccggagagcgtcgggccttccggaagggtaagttctccgccaaggggtcccgagggagctggacgtctgaatctggacttgcccccagcttcggggttcgattctgggttttgcgcgtccccaacccccagggctttccgaagcatggcctggctccaggcccggtcctgtaaggactggaacggcagcaaaatgtgcagggaggcagtcggccggcagagctgcggcgggagccaaggtcaggcccgcggggagagcgggcagcttccagcgccggccacaagctcccaggccagctgggccgcagacccctttgcttccagagagcacaacccgcgtcctttctctcagccaggctgcagtggctgccccgagcttcgctttcgtttcccaagctgttaataacgatatgtccccaaatccgaggctcgtgtttgctcccagatgccaagaacgcaacccgaaatccttctcccaaaccctaggtcgacgagatgagttcctacttgacctctgagccgaggtgggccggaaaccgaggcctaggccccgccggggctgcaaggaaaaggggaaactccgagcgtagcgtcttttccttgtggttcctttctccggcatcccggactgcgggccctgcagccacctggaccggcattcaaaggattctgcaagtccagcttcacagactggctttcccagacgctccgaagcccgcaccacgaacagaataaaggagagacgagagatcgcaactagatttgagaatcctcgttcttttccccaatcgttcgggcagtaaactccggagccggctacagcgcgcatcctcccttcctcctttcggagaactgtcgctttcccgaagctgctcccagctgggttttctcccgaagtttatttttctcattttgcaaaattcctgccctgattttaatactgcaacaggacagcagaggttc

SEQ ID NO: 607 - DNA, 273315 bp, Homo sapiens
  source 1..273315: mol_type = genomic DNA
ttccagcacttcaggaagccgaggcaggaggacagcttgagcccgggcgtctgagaccagcctgggcagcatggtgaaactgcatctctacaaaaaaattttagaaattagctaggcgtggtggtgcgtgcctgtagttccagctattcgggaggctgaaaagggaggatggcttgattccagggagtcgaggctgcagcgagcccagatcgcaccattgcattctagcctaggtgacagagcaagatcctgtctccaaaaataaaataaaaaaaaaattaaaaaaaaggaaaacaatgtattagtaaaagttatgttttgtagaaatgtgttgcactcagtcacagtctagtctcctcagttacccatatatagggatatagggattcctcgggcacaaaatatgttgttatttaatcctgaggcctcagctggaaaagagagccaagtgcctagaacgaatgaggtccactgtgcgggaactgctttgcagtttgttaaataattataacaatcacccgaaactttagacggttctgtccccagtgggtcgattttacccgttttctgatttaccgactgcgtctatgtcacttttgcgtcactacctccaatggcagggttaaaatgattcctttaataatgaaatgaagtttctcaataatgaaagggctaacttaaagtcgccggatgcagcatttcaaagtttaggaagttacttttgaaaagtacaaccggcagagatgagtgaacttagttttttaactgacttggagaagaccttgctagcagggcaggtttattacgaactctgtaattatccttctttgctaagctaaaggttttcctttcccaaccgtaagacagatttcgacttgagtgagagctgtgaacttttataaaagtgaaagggaagagaagaaatggcaggctgggaatctggcccggagacggcgtccaccgcgctcgagagcaacaatctgcatcaccagaaaggcaacttctctaccctacacttgcagacttccgcgagtccgggagcactcaacgcagtcacccgcgcttccgcgtcccggactagggaaactgaggcacggtaggcgcgtcgcgcgcaactcccgcctcggcgcctgccccctggaagaaacccaggcttccagagttcttcgcgcgagcgcagggacttccaagccgcgcagctcccgtccgccccgccccgccccgccccggctcgggacaaagcccggagcccgcgccgggagacggagggcggctcccgcgcgagccacgctcccccgtgggcgcgagactccgcccagctgccgaaagcccgcgccccaacggcgaagcagccgcgccggtccgccccgattccccatgacgtcaccggcggcggcaggccccgcctccagccccgggcggcaggccgcatgacgtcaccgaggccccacccctccggagcgagttcggtcctggcgttcatttcattcctgtcctcattccgaacattcttagcatcgctcgcgccgcgccgcgccgcctgagccgagccgagcctctgctgccgccgccgcggccccgccgcccgccgcgggcgcccaccaagcactttgcagactcgcttccaccctgcgggccattccgcgcggcggggcccgggcccggggcggccgcgtccaggcacaggccatgcagtgacgcccccccacccctccacctttgcccggagcgcgggcagcagcccagcgcgccagccggccccggggcaggagcggtgctaggcaggggtggggtggccgggcccagggaccgggagccggggagggagccgggcaccgagcagagggcgggggaagcggcgccgaagtttgcctcggactcgccgggcgctgcggtggctccctgggccgaggtaagttggcgcgcggggcggatgctggggtgcggggggcgcacggggcagcggggggccggcggcgcgtccctcgcgggccgctctttctttgcgggctctgctttgtgtgcgacggcgggcgggcacgcggagggccgcggccgggcccccacacccgcctccccgcgccccctccgaggtgagcggccgggcgccgccgcgcgacttgccaggacgccaagttgggccgcgcgctgggagcccgcgcggcaacaggcggcccccggccggccgcgccgcgccccccgcgcgccccctctcccgccgcctgcacgcgcacacacgcacacaccctcgggcgccttggacggggtgcgctggggagccagaagttcggagcgagcgcgggcgggcagagccgccgcctcggagcccggagccggcctgcacccccctgctttcgccgccgccccccggcgccgggtacccccgaggccggcccgggtctgcgcagacttgtgccgctggcggggggttcgctccttcttctcaaagatgaaaaagggcacggtcgtctttgccgcttctccaggactgttgctgccgctgccgccgccgcttcattgcacattcaagtggaaaattttcaggagtcagcagaaacattgtgtccaaaaaagactgagtcgcagttaccaccaaacccaggaggagactctccctggaaaacttcccttccctttcggtaggaaatactgggggatttgtttgttgattggaagagaaatgatccccgggggggagaaaatctgggtacacttctagtctttgttcgtaacagcaacacttgttttcaaaagtccagagtcccgctttaaagaaagtttaacttctgtgacttttcttctttttaaaaaaataacttttgtatttttaaaaaatcaaagcaatatttttaatgagtcgaaaacaatgaggactcacacctcccctctcatgaaaataaatgaaatccagatcagaattttctttgcttttaaattgccttttttaaaagatttatttaaagttggatagtgtcactatataaaaatatttatgaaacaatgaaataccagccaccagcgtttctcaggaggcttgttaacttcttagaagcaagtggcttcctgtgatttgcagaaatgaaaattgacctcagtgagccctggaaacttagagacagatgatgttccaggagcagggaatgtaaaaaggccatgtttaaaaacagtgcgttggaaggagcccaggtcttgggatagaaaggtctgttaagcctgccacatttcaaaatagtaaaaagaaatactaaaaacactacacgtattgcaaaggagcagaaccttatcagttcacaacaaccacagatttctttctccccgctttccaccttggttgtttttggaagttcaggtggtctgatggcttggggtgcgctggttgcctgcaatggttacctgagtagacatatccctcccttcagggagatgtgatccactgtgtagtcacagccgggagtgggctcctttctctgcaggctgcagtgaatcttgctggtcttctacggataggggcttctctgaggcacagattggggaacagtcttcaggctacgcccggtgcttcaccctttcactgttgggtttgtgccccgcttctgtaaacagcagggtcttcgggtccaagcatatctgaatgcttacaaggactagacttaaatccaacttccttaggaatcttttcctctttagaaggaaatagtagaactaattacaaagtgactcaggaaagacaaatggattcgttgaaccttttgtcagtagtgaggttttgaattgttgaatttttggggaaaggcttatttttctaatctcactgtttccataaatggtcacagatatttttctttagtgtttctttgtgcaactctatgttgaactctcaggtttcaggttttaaacagttaacaattcttttatttattgttggtataaaaaatgaactgatgataagctatatccattacgggttcttgctgatggtatcaaaatgccaaggtagactattttatttttactttaatggtaaatattatttgatctgcagttttaggggaatattagaacttttttttttaaaaacgagcttgaaacaaaaccagtatgacactttgctttgacaatatgggtaaagaaaattatagggaagaatctgtaaattcctcctctgtgtgatcctttataaagtaatgaactgcggggaacatgcctgagagagattattggagggttggagggttttttttcttttcttttcccaaaacaaaaaccaggactcaccatgacatatacttaattaaatttaatttaaagggggaggacatcccaatttagtttgagccagactgataggaatttctcactgagaggcttttccttgccttgtggtacaatgtgtgcccaggccccagcagcaaactaattacacataagggcgggtttgggagggcagcctggggggagtcggcttcctcctccctttcccatttcctctctccccccacttactttatacagcaggaattatatattagtatactcacttgggagactggagtccccttttatttagaaaaaggaacaaataagtcataaggaaaaaaatgttcgagtttttttccctgcttgagcttcagcagtttataaacaattttgtgttttgttggttcttagaatacagagcaacaattatgagggcatttcttaacgggaacgtttgggaagaatatacttttatcatcggtgtttagatcatatttgtccttacattttcagcagaaaagtatataatacgaacagtttaaagcatgtagatcccaaatattaaatagacttttgaagaaatgagctgtgacattaacaatattttaaggttggttgcttcagaaatggattgatctctcatacgtggtggtcatacaagagcctgggcatttgtgggattacttttctctctaatctcatgtgttatgtgttaattgtgagcataattatgctgcctgcaaatgaaaattgtgtcttatcactcaaggttggtgcaaataactgtatgtatgatctggtggacttaaaaatgaccatattcacatacagacagtaggtggataacacttttaagctccattttaggcacttgtacccagtagagagattgtgaaagggaaaataaataaatatgaaagctgtgtttagaggtcgaatctgtttagtggtaaaactttagggtctgttttctccaaagactgaagaatgtggccaaaagaagtgtccagatttctctgtagaactgcaagaaaatgcaagccaaccttgttaaatgcgagcgttacagctgcccctttggagtttagtgactggaactgcaaactgctaatgtccaacttttggactcagccagaaaaatatattgtaagcttattcccctttgacaaacctaggctgtgctgctgctgggctgcttggggacagattgatggctggcacaatcttttatagctgcatggtgctttttcttattttataataaggcatagattaccttgtggtatttaagttgcatctagagttgtgtttgaaccacatcagtgatacattttattctttcatattcataaaagtgataaaatcaggtaattcaggtccatcctacgcacttcatattcatggttgagctttttgacagacaccttatttagaccttgttgtattgcaattactttgtacctctgaaatcagggaagttctggggcttccctcttcttgggatagtttgtggagtgctagtatatttggatctaaatacttggagtgtttttctgtgggtttttattttttgtttcaaagctgtgaactcttgagtgtcctcaatctgtaagattctcattatgagcttcgtggtccatatttgaatttggaattgaaatttgaccattttttcaaatacattccagttttgtagtggtacagaatagggtagctttgaaatatgtgttttattttagtcaaagtaaaaatgggatgccctggtgggtgggttttcaggatgatgtttcttacaagggtaggttactcttagcttttaaattctcctttggtccactgattttttgcatagttgagaggattctcaaaaaaatagtttccaatagtccgggagtcttggctaactgtgaaactcactcgtttcctcttcttgattggataatggtagtagtggtggtggtggtggggagtagggggaaggtcctcgtaaaaacctatcttttttctacctttgtggcaggccaagggaagggtgtgttacatgcactacacccaccccgccttgtttaaaactggtctttactatcctaatgcaatgctttctatcctttttcgtgattcacatttgttttgaaggctctgtcctaggatttcattagcagttttaatttgcaggcatgggaccctggaaaatgggcttaaaagaaaaagctggcttattgatgaacaagttaagcatccgtcatctctaatgggaaattctggttgcttttaggcatctgacaggtttagatgtatgtgtaaagtgactgaaacactcttgactgggaatatacaacactgttgttcttactgatacataaactgaaaaactgctgctaatggtgggaaatgttaattatgtgagaacatattgaacttatattctctggcatgaacttttttaaaaaaatgcatcaactgtgctgcttttttttttaataggcacagctttctaattatcataattcagttcagctctgctcttggatggtgttcaagtgcaatctcaatttaacttgaaaggggatttttttttttaaacttggaatgtttaagaaaatttgaaaagttcatccaagaatgttgtctgcttaggtgtgagtaaatctaggggaatgaaatgagtgcctttctgtaataattcaatagatccgaatattaagaaagagactgtttttttgctttgctctgtatccaagcatttttgtataacctgatgctacacactgctgagttctctttgaaaaccagtgtttttctaatagatagtaaactaaataaatgaatattttattaccatctgcaaaaatgggagtcttctaagagagaaatacgcaattgttatgaatgtatttgacagaaatcattgttaatcttttataccaaccaagcctttagaaggtaattgctttatctgttccttctttactctgtgacttgatggcattttgtgaagggagtcgtctttgacggctttcatcccagtgtctgtatcccttaatttttctttgactttaatagcttttcaaagaaaaaaactaaatgaagcccaagcgcctaatcctccaggaatcaattttaattgtaagaaagaacaacttagatgggccttccgactttcgtccagcctgactccttctgctgagatgcggagagcccgcggaaaccaaatgacttcatttgctctggcacttaagaaccgaattcacttccgtggtggtgaaataaaaggagccaagtgttttaaatagccactccccgaggcccgcccgcccgagcctgttgagaaaagcgcattgtctgcttgcagctctagctgggagcctgcctggctcgccctcccccactgggcagctccatttctgaagttgacatctggttttctctctgttcacctgatctatccccgtacacgtgctcacatgcagactgcatgcatgcattctgcaggtaacagggatttgtgacattaagtgtgtgtgtgtttcaaatccctactgggatagggggaggaacaaagctaatggcacaaaataaaatgtaaacacagtagctgccccacatgccgccgctgctgggtttctgtctgatggtgctttctgggtaggcgtgcctattgttatggcagcaacaggcggcagaacttggggcaccatatggcggatgtgggcctcagataagctgtctggtaatttagcttatcaatagcattttgatatgcttcattttcagatcacccattactgtggctgggggtgtcttgggggctaactgattctgaaaccattgtgagccgatgcttcctttggtggaatctctttcaatcctttctccctggctgccttttcatctcaaagcctttgagagacaatgctggttagagttagagctccattagctgaaggaaccatcagccccatcttgaaatcctgggcacttagaagaccttgtcatgtattgtcattgagagaaaaacagaaaacagatacttaatagcatttcatattgtctgagccgagaaattctcttaattcaaagttgcttttgctttaaatattgaaggagtaagtttgatactgtttttaaattttgatgaaaggtttctagttttgttatgcattcagaatacctccctcatttcctttcatctttaaattttaccttagccgtaaaatgcaaaaattattaccatttatataatttgaaatcagggaatgtgccatttgtaatttggaggcaagaagcagcttccttcatgcttagaacttgtgaaagtggaaaatgcttccagaacaccactcaagtgtccagtgaagctgaagcaaaactaaaatctcccctactgatggattggtaggggaactcttgcctcagctggagccagcttagggaatctgcacttagtaggtggctcagtggaagtctgatggtgtgcatgaccatgtgctcatcacccatgtgaccctcattcaccaaatacttgtgtctctgatatgtggcaggcatgggggaagctagggcgaggctgtctgccccgctcctgtctcccgctgcctgcgtgttctcactcacctttccaggccctgcaccttttctcacattttgccttttgggtttgtcattcagggcacatagatccatttacatggctaactcaggatggttctgactgaaacccaggtcagcctctttctgttcctgctccaggaagctcctgccacatcagtggttcccaccttagcatgtgcactgcagcctccatggagcttttacagcctgggcaccacctgtgtaggcttaggtgcgttgtggtaggtgcagtgtgtctgtatttctgaaaggccccatcataacatccgctcctggctgggaaccattgatctagatattctaatttttgtctgcagatagaatcaggttaaatttggccacttcaaattctgaatgtgattttcttccctcaatatttgtgaggcagtgtacctaggaacataggctgaatctttatggaattcactaagatgttcttcattggttttaaagataagcctgcacaaaactaaggtctcacctttcgatccaggggaagcaataaaatgaaccagaaccaccttctctgctcggcattcatttacctcgtgggagtgtagcagttgtttccagatgtgattgtagaggtgtgtgtcacggttactggtgaggggcttgagaatggagttctgtctggctgcttatagaggttttgctttctgagtagcagggatgctcctagaggtcgttgggtggtatgcctggtgttgggaaatgaggggtaggaagggtaatcctgacggctttctggagatgaactgtggataaaccaccctgttgttcattttttccttccttgtctcttcccttcaccttgggcactttgaaatccagatgctcctggttttcacggagctactgcttgccactgagcgtttaaacatttatgggtgctactgtgtgccagggatttagtaattaggaaaaggtggctaatgaacagcgatcagtaaaactcccctgcccggcagagtttacagattagcaaggaaaacaggcatgtacagaggtcatggcaatccagtgggaaagttgtgtgtatggtatttcgtgagttccaaggtaacacatttttaacatgcttgaacatttttgaaattgggatgtgtttgacaatcatggctggccaggtggtggtaatgacccttgatgttgcatgcgctcaccaaagcctgtggagtgaatgcagcggagaggaaaaaaatcccagagtcagtagtgagcattcctaagaatactcttgttgttacagagggtggtagtgtatggacactgatcactctgagaagttactttagcttatgttacccgatttatttagcttgtattttcctttttatgtaggcataagattgatagagagtaaaaagtttcaatatgtataaaataatatttctaagtgataagcattgtgacatcatttgtttcacagtagtacgtctgaaataaaatcctgctgcatcttatcggcagtcatgtcttagggttagtgaaatgttgaaacaacacgtttgcatctctagtcctaaggatctgggaggttatacattgtggatgggtgttgccttgagggttgctttgagggagtggggttttttacacgtttatattttttaggagcatggatttccttatgtaacatcagaataaaggggaaacacactcactggggtaagccctcatgatacatccgaagagctgtgttgccctgtggtaggaactgaggagggctttgcggaggaagtgatgttggagttgggctttgaaggaacagggggattttttccagatgccattttggggggtgagttgggagtaggttgttagaaaataaacaaaccttgtgaaatattctcctgagtaatgaacttaaccctcgcatatcgatacggtttgttgccagtaatgggctactacagatttgaaacttggctgtgaggaattaattgaaaggagtaggaggggggaactgattgacatgaacagtgggctgtttcctgattttggtttggaaaaaggataatgtgggttcaaaatcacagatttggaattggacacacgttggctcagctacttgctagtgtggccttgcacaaattacttgttctctgcaagcctcggtgtccccatctataaatttcagttgtgcccactatataccagacacatggtgtggtgaatgctcagtaaatagcaacttcaaatgtcatgttgcataatagatctttaaggattttctgccaagtcaccctggacagtgacccttgaggaacacccaaggctgaggcatttacttagaatctgagccggattcctggtctcaggcaaacagatagaaatctaggagaggctgaggcaagcccataaagcccttgaccattaatcgctttgaaccacacgtcccttattcataaagtggaggaaatccatcagtaaatacgtaatatttgaggtcattccttacccagtatgaattaaatggaaatgcttcaaaaactggatagcatggtgcaacttcatctgtctaaaagaaaaccttttccttagcttcttgcttgaaagccacactcctaacattggggttgggttgtaaaagttcttttgtaagtggttgaatggaactcatcttttcatagcaaaacaatgcttagggtcttcggccttcttgtaaaaccattgcataatcccccctggggtgcagagggcattcagcttcaggtgcggagaagaaaggtacttttgctgccctcattgcacctcttaatacctgctttgggctagctgcttagcttctctgtgcccgcagtttccccatctggaaaatggggatgatgttatctacttggaagagttggagtaaagtttagattaggtaagtgctggctcggtaggctagagctgtaggtgtggctgctgttaaaacctaggccatttgtttctctcagtactgcaagctccagagataaatctttgcccctctcctaagactcgcttcctctgggccttaaatgtcactcaaataataattcacactcatgtgaatgaatggttgcccatctctttagccagtgtatttgcatgtttaagaggatggttgtgaattccagtgcctaactccaggtacttcctgggtagatgagctgagttccttctggaagctggtgatagaaccttgtgttttcgaagtcagctggcttaagctggtcctgctctgctcacattcccagctacacttctgggtgtgtcaatgtccctgtgtttttagatctgggccactcctggtgactggtctgagcagttaagattgctttgtgtgagcctgggccagggaccacctgcattttattgacatcttttccttttgtctcttaagcagtgtatagacatgtgtgctaattaatctggtttcccagttctttaaaaaaattaaaatgaagacttattgagggaggagagtagtctggttgaggagagagacttagattcaggcaggctgacagtggatgaggggagaaaatatatttaaaagcacttattcacaaccctgggagtctactaaaattactgaattacatacttcaaaagggtgaactttatggtatgtgaatcatatctcataaagaaataaaaccctggatctagtcaccacacagaacagcatcttgtcatgctcaccatggtatccccagcactctggctgtcatgtttttcggtgatcgagtgattaaaaactgataatcagacctaataagaagagtttctaccagttggttttagagaggagccaggaaaaaacatatagttcgtttcaaagataaacagtagtagtatttaaaatgaaacttttttactttagaaataatcagtttcaataatgtggaatgatgtgctccctaatgataaatgtttaccatggtaacccatccttatggattgtacttttaaacaatccagtaactaagtcataaaggataaagtgggagatcatgaagaggagacacctggaaggcatgggaggccacaaatcagtcattgaatctgatttgcagattgacttaagaatgggagaaaatggacctagaatcaggttaatgtgtacctcaagtttcaggctctgctctacctagcttttttcttaattttaacctggtcttccttgttcctgtgtccatccaccagatcctggctgccttcctcctggttactgtttgtggcagttttgcctatttgtattttcgacagggctgccctttatggttccccatggctgagtacctgtttgcctggtataatcctggtttatgttgcttgtcttggcataatccttaaagaaccctcctttactatcaaaatgtcccagtttggatgataaattatatgcctatggtactaataggaaattgtcagggaaactggcagactagacttttctagaatggagagaaaatcccaggcaggagggctttgtggtgtcttggtattgagctcatgacagtattacttttgaaggattgtcccaggccatttctgaggccacagctacaatagaggggaatttcaggaaacaactttcccttcaaacctgtgctatttcaaccaaattgtttcaaaccttgttcttttctgtggatgcactcataagtatttttttaaaaataattctcatcattcataggaatgattcagcattggttcatttccttttagaccaaaaaagtttaatttagaaagaagttttttttttagtggtattctgaaaggttggtttgtactgtatgaaattgggggatttcagattatattttagaacctgtggtcttggcactcttgacattcttaggtttcaaactcacttacctttgttctgagggagactgtgtaatgatgtcctatgatgcacctaaatagataagccagagaacattgagtggaattttagaaattttaaaagaaattttagtacttttagaactttgcctaaaaccaaaagtaattggaatgacactgctcagttcctggtggttcttttgacaccactgtttagttattttgtgatgtgccttaggcagtgacttcgggcaggagtggaggtgttcagtccagtgtttcagctctgaccaaaacaatggcgtctagactttgttgttgagaactctggtggagaactgttaccttgttggggtggttcactgggagaaggcatttgagggtcctccaagtgctgggtcttggtctctccacttctagctcgtgtggaaggaagtcctggttgggaatcctctgctatggctcttcctgtgaccttaggtaaatcatttgaaaatctttggtttatctttctgggaagatgatgctgtactgcctcttgcccctctagctgttttttgtgctgtgcttttgattaaagagagaaaatgtgtgagcccttaggcagaaaggtcctggaaaacttatcttatcataccatccataaccctcaaagacaggttttgtggaggaggagcagtactgctgagttcacttttagttgtgctcattcctgggcttcttggataggaagggaaggctgacaggccaggttctgtctcaagcccatataagagttgagttgcaattgtagttgaagaaggtgaagctcagagaagtttagtgacctacccaacatcacacagctgcactttaaaaccagttctttatctgtgtgactccacagctgtcaggctaacaaaggactgcacatcaagtcacctatccggttttcttgtggcatttgaagggagttaagatagattgtgacattgaaacaaaggtaggcttctcatttagtgtatttgcccagaaaaatgaggacacaatacttgtgttttcttggtggcccattttactccctcttacaaacatatggctaaggtcttgaaaagttgggtgtgtctcagttgagcctttcagagattacttatcctgccccattcacctctcccctgtggtttcagtcctccaggactgtggggaccagtacccctcacccccgtgactggttatactcaccgttgagagagagggggcaggactcctccgggccaggctaatccaaactattctctaggtgggtgtagtgggtagggggactgctgtagtttggaagtttggaactggacctgccagtttatctggttttgctttggaatgtgctgtgttggcaggcaggcagaataagttagccccctccatcaccctgtaggcctggatatggaaatggcctcatgctggggatagggtttaggcagatgaccttgacttcactttttgagaatgggagtgcttgggaacctgctgagatggggtgaatttctctcttcccacccaggtgaccagcttagcctgtgataggtgatgggcagtgatgggggcagctggcagaagagagttaactgtgcttgcccagagcccttcataatcaggactctgaaaaagacactgggtctttgaaatggggttgtttacagggttgatacccctctttgacaccttggttggtttttggtgggaggcagtggggctggttgatacaatcttttcctcctgtctacctgtttctggtgtctctcagctaaaaggtgtgtgatcactgattgccagtttttaggactctgtgctcatgactttccccgcttcccaacttgcttgtaccttcttagtcttcatgcatttcttaaattcttcctaggtggttctgttggctgttttggtgttgtcctaactgtgcagttcttactagtgcttggtgtattcagtaaggtagccggaaagcatggcttggaggtcagatcttggttgcagccccagttctgcctattggctgtgtgattttgagtaagtgattaactctatctcggcttcttgtttcctcctctgcaaaatggagaaaataatagtacttctccacatgtgagtttaaatgaaatatagcgaatgacccactgtcagcctctctgttggttcccccaacccattgagaagtctcttgcttcctccactctccagtttctcagttcagggtcctgaggttttcctcccgaataacataggctggtctgactgggggtcatttatttgccttttcgtcttcctcctttgggtttagttttaagctttgccccagcttcccctcttgctggatttcctgctttgttgtttttctgtttttttttttgttgttgtttatttgtttgttttgtttttaaatttttagtttgacaggctatttcccttttgttttcatattttctgttgtctctccctcctccctggaaaacacatccacccttcctgcctccacttttcaccctttctcctctgctcttatcactttaagatctcagagactctaccctgcagttcactacatttcaccaaaaatggtcatcagaaaagcaccacttctgctctctttaacactggattgaatctgttggcttatagagttcccagcactcttgatagttgttactattttggaataacataactcattctcatccgcattatgcttatgaacttgtggaatgacacaggtttccttcacttatctgtttgaccttgggcaacctctttatccttctgaagcacagtttcctaacccctgaaatggacatagaagtgccttccttatgggttatagtgcaggttcagtgagggtgagcacagtgctgactcgcggagaagtgtctcataaatgttagctgctgctgctaattatgattgtgactaccatcatccagcagctgtgaagtagagtgccaagtacctcttctgtagcatctgtctctctttttgaaggagggggtcaggagcagaatcttatttttattttagattttcagtgtctttgctttgggaaagtttagtacagtagagggcaattgaacccctgtgcacccattatcacccagcagcaatcatcacctcatggctattcttgtaaactcctggctcctctcccaccagattatttggaagcaatcctagttgtcataccgtttcatctgtaaattagtacatattttaaaaatatgactctttttaaaaaaaaacaaccaactattgataccgtgatcacaccagcactgtaataactccttaatgttggccgggcacggtggctcactcctgtaatcccagcactttgggaggccgaggtgggcggatcatgaggtcaggagatcgagaccatcctggctaacatagtgaaaccccgtctctactaaaaaatacaaaaaattagccaggcgtggtggcggccgcctgtagtgccagctactcccgaagctgaaggcaggagaatggcgtgaacccaggaggcggagcttgtagtgagctgagattgcgccactgcactccaacctgggcgacagagtgagactccgtctcaaaaaaaaaaaaaaaaaaaaaataataagcccttaatgtcaaatatctagtcactgtttggatttccttgattgtctcataaatgttttttcatagttggctggtctagatgagggtcccaaaccagatcaacaggttatatttggttgctgtgtttcttaaaactctttaaatcacatccccacctttcttgtaattgatttgttacagaagcccctgtgtttctcttctagactgcctcgttctggattttgcagttgtatctccatggtgctgtgtattttattctcttatcctctgtatttcctataaatgggaaatttagatgttgacatttgatctaattcagggtttttaaaaacttttttgatgcaaatatttcatagctagtattctaccaggaggcacacaatgtacagtgtcactttttctgtgatgttagtgccattgattgatgatctctgcctgtatctattatttcatgtagtttttgcaaactggtggttctctgatactctagttctgtttttggagacaggtctcactcactgtgtcacccaagctagagtgcagtgatgcgatcccggcttgccgtagccttgacttcccgggctcaggtgatcctctgacctcagcctcctaaatagctgggactgtcagtgcgccaccatgcctggctagttttttagttttttgtagagacagggtttcatcactcaggctggtctgaaactcctgggctcaagcgatctgctcacctcggcttcccaaattgctgagattacaggcgtgagccatctcacccaacccattcctctttttatggagaaggtttctcttagcaactatatggttaacctagcatatagtttgtaaaggaaagatagtttttttttgttttgcatatcattaggcaatcactgattttaaattattgaatgcgtttcagtccattgcagttcctcctcttactgatgctcaaattgtttcatctttggccagtgggaatttctttagttggctcctgtggccttttgatgtgaccctattaatagtcttttatagtttccttgctgtccaacctcttgtgtattctgggagatagaatgaaccatttctgcagagtttgggttccttttagtgagaaatggagtttctaggctatgatgtgtgtgctaggttctctgctttttttctcctcccactccttcagttgaataatctgctcacctttggaaatggatcctgcctgccatgtcaactctaatcgtggtaaaagctttccttgcacacttgctcatgcctggcctctttggctctcatttgccactttcatgcttgtgcttgtcatcttgtcctttcctcccttaagaaaaagaccaaactgaagaattaccatggatggtttgtggtttgacttgcctcctgaaggccaaagctcatgttaatgtaggcttcacagaagtctttagtcattgccttcatcatgtctgcctgatagtttgttctattccttgtatacataaccaggacatgagagattccttatcttattaccaccgtgagccattcaggctgcaagctgtatttcgatggtattgttgggtacgtttgtactcatctgtttcaataaatattgattgaattaagctttgtacttcttctccaaagtgtttaaaatagaatgtatttaatgtcctagtcatttaaagaatttatcactagtctattatttttataagcttaaataagttaaagatttgtagttttagatagatttatgcattggatccctagttgtaacatagctattgttttagtgctgcgggcctatagtagtaggcctgcaagtctaagatgagtgttttttatttaacaagtctgctattaaacttatttttagtattataatttctgtctttgcttcttggaaattgttttatgcccatgttggtgcatcatagactatgcacttaggccaaccaccccccagtccccccagcaaagcagggctcattttaaagacacgctctaatgctttcttcagagtttccattcagacctacagttttagcttcagtaatacttttttgttttgttggtgaaacaaagctgtatgcgttcacagtgcagccaacacagtctcatgacggcacaagtgaatagtcctgaaattatcatcattctccacaccactgagaagttaaccagcatcctggcctgggaaattttggatacacatttaatgcccctcacccaccaccccggcttttttttctttttaaagccgcaagcttaatgtaatggttcctctgtattaaaggaaagtacagtattgtaggggtttatttcccccccgcccccgctttcctccgtgggcactgagagtagggggaagagccccgtaattcacaaggcaggcttctgtgccccgcggtaaactcagtttcacaaagggaattttcattatggtcctgtggctccctaacatagtggaggcttcaggaggcaagtggtaaaagctaccaaagaaaaagctggactggagccactgacgtcatgtcagtaaatctgctggaggagcccagccatgcagcgcctgccagccggcccctgcactttggccttgcctggtcaactgttcttactgcttcctccacccccaccccacagaacagcctgtgttttttgtgttcttttcccccttttccttctgtgcaactgggctgtgttgaaacccataaaggcttttgaaaaccacccctactggtcctgtgcttaatgtcttgtgtggggatagtggggagaacccaacaatccatgaatgagggaggctttaaaagttttttctagtggggacctctttgtgatgaataaatccacagggaacatcatggaaagcagccagaggtgcgagcccctggtgcttagtacttttaaagaacttcgcttttaagtcctgggctgtgtgcacatgtgtgtgtgcgtgtgtgcatgcgcacagtaaaggacagagaaggccagtcagcacatgggtggaaatacagaatttcagccttctagcagaggatgatttaagagaatgagttccaatgcgagtcctttattacccattaatcattggtctgctcactctgaactctggtttgcaactggaacagttaaatcttaagctacatgcttctgtacatcctggatatttagagtcacaaccccagatgggcctgaattaaaatattgctgtgctaaatctatttttacatctaggggaatgacatctaaaaataaaccttatcccacctgttatccacttttgggaagttgaaacgctgttaagtcgcagcccatggattaagctttgatgacggcttcccatgtgatgcctgcattccacttttcctgccactggcatgatgttttcattgtttcggtaaccgttgtcctcctgtttattttgctgtgaatattcatttgcaaataagagtgaagcataggttcagactggttttgattttcctgaatcttagggtcagaaacatattaaaagcagtatcttatccatgaatcatgagatgagtcagttcctgaaaccactacaagcctcatagttcttggctacaagcaaaggcaggaaatccaggcttcaataacttcctttcccagtcctggctatagccgcgttggtggttaggttctgctgcctgcctttgtaagcggtaggaagatgtatgtctgaggaacaaaggcacttgagtcaatttactgaaactgtttataatttgtggtcttgatctgaatgtcaggctgcgttggcacaccctgctctgctgtgcggcccggcacaactcagccaggaaaggcggcaggctgagtccggggaagtgccccagcaaacacatggcaaatgtttcaaggggctttagtgttccagtgaatcctaaaactaggggacatgcaagccgacactaggcagaaagctctggattccatatgtatagttgaagtatcgactctttgtttgttcttcacttgagagaaaggagagaaaaaagagagagaggggagagagacgagagaacaaactaacacactcgccagcctgccaagctctggcctgtctcttgcttttacttgcagtttacttccttatatacagggtcctctttttttttttttccttttgcagtgtttcacgccagtcttcctgacttcagaatcagttttataactgttttattaaatattttaaagagtaagggagaaacacgaagttgtctcccaatgttgggtctgctgtgactcgtatttatttttctcctttatgagcagtgcccactttgtgtacgtacccaagtcagagcagagttgggttggtgtttctgtgtgaagttgggactcactgttgctttgtgctttacttgtgaatttatgagctttttcaatcttgagaaaaattaaaattgagtgtgactcattttcatttaccaactcttaccttctttttctacgctaattggtgttagctagcgtgggatttgagaaaatgggactgaaatgagacccttctcccccctactgtaggtttatatggagtcattggaagttctgatagaagtctaaaaatagcatgggtagacaaaccctgtgaaaagacactgaggaagatggaaaaaaatttgagatgatgagcagttagatattgatgctaccttttaaattgagcttgtttccaattcatagctggcaatagctcagaaaggtcaaattctatttcagcctttgtaaagaataaaataaaagcaaatgcaaaagtttgcctggctttttaatcaagtgtggctaattcagcgcacagccaggctggcgagggccacttcgttcttacttgtcgtttgtattttgtgtttgggtaattttctgttcaacttcaggcctcactaaaaggctctgataagctgttgagaaagtcgggctcattttgattttagaggcttgactgagagtcataatttctggctgtggttctccagatttcaggctggtacaaaaactccttagtcttaggtgagtttctttggaaatcactgtgaaaatatattactctcattaacatgtaaatagtcactgtctaaacttggaggagatttttccttatgttaagagaggtacaaatccagttatttttatttgtccttcattgatctgacagttaacttctttttcatgtagatttcaggctgggattagagactgaatcttgaattgcttatcgtctctagaccaagttgttcggggccagggattgattaattaattaaaatcaatgtaaatggatttgtaagcctcctgtaacagattatcctattagcaaccacacagagcacagcccatgatctgtgaggaatgtttgttgccttaagtgaaatggacccagactgatggactctttggggttactttatgaaaaacccagtggcttttgtaaggaaggggcctcacttaacctttacactgaacagatatttcctatagatggcagattattttattttctgagcctgccccagaaggcttgagttctgtttgtgtgttgtgtgagtttctactgtgcctgtgtctccccaacccttgcattcatgccgtccaagaccttgccatattttagccaggttctgccccctttcaggtgagattcctgctaagaactcttctctgaagaaaaaaggaggaaccagaaatacattcctatttgatagcaacaaagtggttttttcctccaacccaggcaaccaacaagcaagcaagctacaaagaagacagttgcttgttatttgaggctctgactgtacagctgtgcctccttagagtggttaagaagacaagatgatactttaggaaaactttgtggatttaacaaaggtcggagttcattcagtggctgtcatgtacattgtgtgtgtttttttgttttgtttttgtttcgtaattgtgttggacaggtagatactttctatagtaggaccagctcacccaccttttcttggatcaaagtggggctatctgagccaagttgagttaaactctgtctcctgcctcttttgggattgagatagcaatcccagtttgtctttgatgctcacactgtagttcagggagaccctaactggggagtagatgtttgacccatgggtatagagaagtgtggaataaagccactttgcagagagacaaggaaacacagttgtgctgaggacgagacaagagaccaagggaatagtctcatttcctgatggttttctatttcctggtttccatctcttgtgagggttggctgcagtttctgattcaggggtcttcagatggacgccttggccttataatgaactcgtattcccttaccgttttttcctaccttaggttagtgggagtgggtttctgttaattgaaaccaaatggtgtttggccgactagtttgttgggaaatacaccctgcgtgctgtcctagggaggccccgttcagcaaagggagctccatttggttacatgtgccttctgcttggtcagccatgcagggctgctcccctcagcagatagagctgtcctggaccctgtgctctcctgtgtattgggtttgagggaactgactccggttcctggactgtctagctaactggggaacaagaagggctacccacttccaccctgtctcagactggaacatttcaaggcttgacttagtcctttctgctgcctggtgtgccctgtggatttaggctgtgtggtgctaggttcaagcatggcaggtgaggaattttcccagtcgtgcctgggggcactgaagagttctggttggctgagcacggggaaagcaagccaggtgtgtcattagacctgagtgtcctgcctggtggtaccacccctccctgcccgcccatccctgagcaatgtggaaggcatgctgtcagtggcctttggcaagtgcttccctgtgataaatctgaaaaataaaaagtgcacaggtgagtacttcctctgttagggaatctcgaaaatcagaggattttattagcaaatggattatatagcaaatgcctttctcaaggagaccagtatggttggggacccaaaggggtggtgtcagaataaaagcctgcccagaagggggtgcggtggcagtgtcaataagcagggaggaaatttagatgagacttgagaattttagataacagagtaaaaattattttagaggatagatttttttggggaggaaaacccctacaagtacattagcagatgtacatacatgcaatattagtttgttggcatcttctacaaatttgaagccatttttacttgaggctcaatataacatgttttacttgttttgttggtgaagtttggtttgtatatttaggaagtggaaatatggaaactctgtgctttaaattgagaggggtacagtgaaagaaggggggtatgtagaaagttctcagaatagagggctgggcgtggtggctcacgcctgtaatcccagcacttgggaggccgaggcgggcggatcactagagctctggagtttgagaccagcctgatcaacatgatgaaactccgtctctactaaaaatacaaaaattagccaggcatggtggcaggcacctataatcccagctagctgggagactgaggtgggagaatcgcttgaacccaggagtcaaaggttgcagtgagccaagatcacgccactgcactccagcctgggcaacagagcgaaactccgtctcaaaaaaaaaaaaaaaagggccctcagaacagggaccagaggggtttagacttttataagtgtgtttcttctggtcatcacagatctaataaaaaataacatgttcatatgatgctttagagttgacagagctttttcagtcgggtaactctttgatctctcacaacttggtttgtgcaagtgaggaagcggggaccgggaggtgaggagccttgccgtgaagccatggctgaaatgcttcctgccatgcctgctccttccttgctgcgctctctcttttttggtgggaggattatgtgttaggacaaggctaggggaaaggtgaagtgggggtggaggatggagggcaggtggggtctggagatggtaaaggaattgtttaaactaccagagcagatgggtctctctgcagtattcagagcacaggcagagcaggaagggactcagatgtggttttcagaccagtgaatatttttgtcacttaaagagggtttttttttttttaaatattgattcctgctgttcatcctggatcttctaaatcttaatcactcatggtgaagcttgggtgattgagtgctctgaaaccttaccagctgatccttaggagtcccatttgattctagccccgtgtctctttaactagaaaagtttgagaatttaggtctcagcatgtcctgggagcttattagaaatgcataatatgagatcccatcccagacctgctgaattagaatctgcattttaataaaattccaggtaattagggcatgcgcattaagttttgagaagcattgctataagatgcttcagggaaacttcagggagtgtagctggggtaatttcacatactctttccaggtttgttatttgccttttgacttaccttatataactttttcatgcagaaattagttgtaagttggatttatcagtacttcctttatagtttctatgttttttatttgcatactaaagacttgcctattcagaaattactggagaaaagtcctccaatttaaaaaaatgaaatcatggtatattttatataattggatacgtctccaatttgtttggactggtataaggagcgaggtaggaatctagacccagtggctggtcacttgtctcatcactgtatctttcaccatttattttttttcattggtttcttcatggatccacacactaaattcatacatgttttattatccacatgttgaattaattactgtagctctataatgtgtatacctacctatttctcattactcttcttttaaagatttttttttccctagcttttctcatcggtttatttaatgaattgtagaaaccgcttgtctggttaaaaaaattccagaagctgtttttactggagttgtattacatttgtagaatagtttacctcattctgttttttaaatagttttaccttttctaaattatatacaccaatagtacttcagagcatttttcagttagagtcatgccagcctttgcaatggaattttgaaacttatatcttctgtggggttattcatagagactttccacttattctgtatcactgcatcctgtttatttctctcaataaaactagtgtatctgatttactcactagattataagcctcacaagggaagtttccatgtctctttatttaccagtgtaattgctcagtgtctagaaaacctctggtacatagatgcccaatacatatttgttgaatgaatgaaatttcggtaaccagagactctagcattgcagttgaagatcgatgacatgtcgaattgtttggatttggatcccagtttgaattcagtgcaccttttgagattattgtgcagtcttttgggggaagtgttccttctctgccattgaattgaggatggacctgggaatgttttggtctatgagacttgacagttggtgtgaattcattgtgaaagtggagactgatgacccagcacaggcgttgtcaacccacacattatttgggaaataatgctgtgaatcaaatcccacaactttgattcaacagcatctcccttttaggtcattctggtattaatttttcttttaattaggaaaaataaaatatttctgcaaagaactttgtacctttttttctataattagagatcccttagataaattagcatcacccatttaagcccttttgttttaggcacaaatacccaacctgtgtgctacttatggacaggaatggaatcttcattcatttttataactcttaacaactttggactttttcttccataactagagatcccttagataaattagcatcatccatttaaacccttttgttttaggtacaaatacccaacctgtgtgcactttatggacaggaatagactcttcattcatttttataactcttcaccaggtactcaaggtttaaataataagagaaaccaaatcataaacatacagtacattctaaaattataaattaaaaaatgatgttatacctgtggggtgcagtggaaacgagttttgcgtatattttagtttctgctacccttttaaaagccacattgatcttagaaacttttttttctatgataggaggatttctagaaattatgcttcttaactctcatttattttccctcaccgtggtatgagaagtgtgggatatttgaatggagttggtcagttatttataatactgttgcttttgcttcctaatttatttcagttttatatttggtgtaaaatgaaactcccctaatatttgaggcctttaatgcatctggtgccaagtgacttgattttgtagattataagtagttcagtcgactgcttcttcaataaaaattgttttgagaacgatcacagtcgctccactgcagattttgtggtcctccccttagctcgctgtgatggtcggtgagagagattattttgggaaagacaaagcacagagtctcctctgctctagcacagtcatgctttagagtttagattttgagcaaagccatagcagaccccctctgggacccctttgaattttgtgtttgattcttcatgtgtacagtgtacaatatttggagagtgtttgtaagaccgttgtgttttctttaataaaactgcatttatccttgtgtggacagattgtgttcttagagtctaatttcttagagaacactgggaactgtttacttagattttttttttctttctttaaataaaggcttcctctggttatcagctttaaaactattgaaagtcagccaaaaaagttggttgaagggaaaaggcactattctggagtgtcttaaattttagtcactatatgttgggggtgattagggcttttacttttccagaacctgtagcaaacaacaaaacaaaaacttagacgtcaagcctaaattttgcctttcttttgatcttggaaattggagttttggaaaaccaagcagggtaggcttaattaaaggagatgctgttatcttgaagtcttacctgagtgaaggggaaagttgagtaatcggaagggtcatgccggtgggttttcactgtctttagtttccaaaagatgctatgaaatttcagttcattgtttgcgagtgtctgtgttgggtggtggggattcagagaagaaaaactgcaggctagtgggaaaagggagttgtgttaaggggaccattccagtctaaaatggtgagtgatgtacgggaggtgtggggctcaccagataagagactttaagagacttagagctgggagtcctgagttccttttgaagctaaaataaataaaaattatatagggaatagaagctgctggtcattatgatctcctggactacactgggcataaaaaagatgactttctataagaaattctatccaaagagtggcaggattatgcaggaaatgtcatttggttatagccgaaggcaaactgatgcagagctgcctgccacagcactcgcaggctgcttgtctcatccccagccctctctggctggctccagggccctttgatctgctcacagactgtgtaaatggagagctgaaggagatagagccaactgatgttacttttctgtgtactccctttatccatggtgtgcccagaaatggtcagtttccctctcagcactcaggggccgccccttgaaccagatcctctctgcattcaacccttggtgccatggcaggctcaggtgtcagtggtcctaggctggtatcaggccacagcggtgcagggtaagaatgttggaaattgaccctgcgtgttactatctgagaacatcgtggacaacgttaagtggagtttgtctctctggctcactgtccagaccagtccctcgacaccactccctctttatagcttcatgacttccatctgtagaatgctttatgtcttaaatgtaccgtagccaagttcatggtcttatttgagcctcaggacaatgccgagagtagaaggataagaatcgttagccccattttagagatagaagaattgaggctcagagaaatgcacctgggtgtgcatttctgtcttcactgagtgcttttgtggctgagcggctcctccagcagcactgcctttcttcaggctgcaggcttccgtgaaacatttccctttcccttccatgttctcccaaatcagttacttccttcccattccctggaagctacttccgtccttctctcgcccggattactctggcagcctctcaggtaatcttccaatgccattgtgtctcagcaggttaattaatttgctgcatcatcatcaccatcattatccgataatgcacttacatagccattcttgtgaactggcactgttcttattgctttgtgattcatttaattttcacaataattctgtgaaggaggtagtaatatcagcctcatttaatgaggaactggaggcacagagaagttaagtaccttgtccaaaactgcacagttcttaggagccacagctgggattcaagcccaggcctgccggctccaggttacttgttctgagccactacatcttatcctggggctcccattctcaaagcctcctccctacctgcttcatcacccaaccaatgagcgcattccccttagcctggtgcttgagacctcccacagtgtggtctcagtatcagtggagcatagcatcccacagatggaatctttgtcacttcctaaatgtgctgccctactcataacattctctctcccaaaaaagcttcccttagcagaggatgggggctttggtttttggctctgccactgacaatacatgtaacataggatgagtcaatccacctcccctagctggactcccctgctcggtacgtggagatattatcataacactggttggttgtgagatatgagtgacacatagcaagtgctcagaaatggggatgaccttttccatttgttttgcctgcccaagcctccctatattttcttaaagcacctcctttaggaagttgtcttggagttcctccctcctttacctggagggatctttgctttctttagcccataagtgtcttacagccactttcaccatcatccttcgttgttgttcttcttcctcctaaactctgagcccttgcgggatacaggctgtgacttgcacatctttatattctcagtgctttgtttataatagaccctcaggatatatccattggaatgagtgaatttggggccactggaattcagttattgcatcccttggaaagcttggtgagtggtgcccagcatgaattgacctgcaggagcagccatctattgcctgtgctcttgagttctgctttttattaaaattcttccctgctatagttggagatccccctcacctctttttataaaacacaggctcatggggtagtgtaaatttgcacaaccattttctaagcaaattggctaaaaccctaaattccctagaagcagaatggccctggatgtgcttttaaaaaacagcatggattttagaacatggaaaaagttatgttagaagaactagactcctaccaagtcagagatacatatatttatttctttttatggttatgtttattttctttttatggctgagttggcgttgtgtttggtttgtgttgggagctcccctccatatacctaggctagaggaagatgacgaatgtattagacaagccttctgccaagcacaggaagaatgcatcttagccgttcagtttggtatgtgaaatttgccggaggggccactgttttccttctgagaagttagacagagttgaagtgtctgaggccagttcaccccagtcatagtaactgtacagctgagaaagtcttggttctctcttccagcctcctggccagtcaaccatgttcttctgtctcagccacttgcagcagcctttttgcctctgtgcctttgcttccaccggcatctgcctggcgtgccactcctgacgttccccaactattgtccagctcttgcttctttctgaagagaggaatgtacatcattttacagaagccttcccagctccaacagcataagaaaaccaagccttccttttattcccttagtcctccatactgctgctctgtgttggcattaatcacgttgtcgtctgcgtgttggatttaccctattgtctctctctgagcctcttgagggcaggaactggattttatctttgtatcctgcttggcatgcagaagctctcaaagtgtgcttgcacaagtcaaaggattgggatgggatgataatagctaacatttaccaggtgctgtgctgttttattcatagaactgggtcttggttctggtattgcttattcatttttggcatcttcagattagctggaagggtattgctacactgtcaaaaataaaatacagtgaaatttatgctaatgaaaacatacaccgtgtgtatgcccaactctgtgctttgcaaagtagacattcaatggctatctctggaatgactggattaatgaatgagtgagtggatgattgaatggaaagagactccatcctctgggaaggaaagaagaatggaatgggcttgacagccatactactcttaaagctgaacttgttgcttggctggaaggagggatgaggcaggagctaagctgacagaagcactcagggaattcgcatatcctctttcttgtgatttctgttttagggaaccaacaggtctttggtaccatctcccatttttccagaccacaagcttttatcttgttcttcagaatcctagaattttgccaccaagtttcagcctaaaggaaaatacacttgtagcatgcaagttctcacctcaaaacctgcgtgaaaatagtcggtgtcattgtagagtgatgcagtgcagaaaggggcctgggatgcttcacccggagaatgaaagtcccaaatctggatcccatttgctcttaccatccaccttgataggagtgtgggtgtggcacctgtcaccattctgcttgcatttgtgtgagtttatgccaggcaaacatgagtaaaaccaattccttccaacacttgacacatagataagtgaagaaaattttatcttacattgtgaacacaatggcaggtaagattgcaggaatgatggtttgtgtacaagctattaataaaagttgtgtgttgcatatacaaactttgctttattgtagatggccttttagttcggtgctatacatgtaatattcaaagtgtacattatattaccatgttgtctttttacttttatgagttatttgtaatgtggataataattcttagttcacatcacattttgctgaccactcaaggaaaagttgaactacaaatatttcaaatgaggtgataaattactgttgggttcttaattgtctgacaaagaaactccattgttctaaacctttcaaatatagtgtgattaccctcgtttgtgtgtcttgctcaattttaaagtataaatagagggagttccattaagcaatacaggctgttttcttaccatgcttacaagggctgttagagtatcaatgatgaaattgaaacttagtttgaacttgatatgcaaaacaaaataaatttgactcgtttgaaatattgcgtaaatatgttccagagcctggcaccaagtatctggggatttttagagctgacctcactgaacattgaattataagatacattttaacagtgtttttgaactggttgaagaaacccctcttccattcccttcaagtcaagtatttcctgataagaaatattctacattaaaagagaagtttcctgttgcacttcttcaggtttctgggttagtttaattcaatggattcctgaagctgcaagtgaaaggttaaataggtaccatttgcaactacttatctgtgaatcagaattttttgaatattgtgtatgcagaatgaaagagaaacatacttcgtttgtgatttaaactatgttcttgagaacatactgtaatttacataattcagataaattatctgttttgtatattgtggttatatataaggtttcctctgacagagggtgatttctgctgctaaagttgtttaaagacattgcccttgatatttctagctaacagtggagctcccaggtgcaacctgctgtggttgaattggaaacttgtcactgagctcttttcttacctggctccttctaggactttcaagatcctctggtgtggccgggccagatgggctagccctgatgcacatgtccttctacggttcatgagcgttccaagcttgagtgggagagtcagcttgggcagtgggggtgatagtcatatcctctcaccatctccataatgggcctcttcttccaggcaagagcaggtgttatccccattttacactgaagagaaaaccaagctgagaaagggcatgtgataggcccaagggcatctcctgaccttgactagcactcttttcaccatgctgttttaccctcgtatgtctcagttgctgtgcctaggagaagagttccagtttgtaaaactctctccaaattgatggccagttggagatttttcggaaggcttaagggaaagaaatagcacttgtgggactttttttttttttttttttttttcagaagcatgatgccagcagaagacttgtttacttgtggtgctatacttgtgcggctggtgtttatctcactttctatagaggaacgcagttgatgtcttcttttaaaaacactagacccgagacctgggatcacccttccactcctcctcatgctgtttgctttggcattcagccagctgcctgcctctatgtgtcaaaaacaagatctccccacccaaggacatgatagagctatctgcaagccattttaaggcacatattcacgtttaatggtggcacttgaattagttttcacaaagtctgtgcaccagagcttaactacctcactctcaggccaccttctgaaacttagtgacatcattcctaggtgattctctcaaggctctgcctatttattcttcatgcctttgcaattctaaccttttaatttctgcttcttgtagcataaactgctagaaagtagggaagagggtgtctgctagagagagagagggtgatagctgataacacaggaaaagataaacactatagttggcacatttaaaaggtatattgaactgggctctttagccctaattgcctttctttttttggaaggtcagtactattgtctggcacagtaggacactgggcacagtatgattgtgatgtttacaaagcatcatacttgtgtctagtcaactctgtttaaggaaacaggaagattgttagaaatactaaaaattaaatgaaaagttgtgatgcttgaagtgctgattagtattcggactaaagtatatgaatgaataacaattttttctctgcagagactgcagcatgaaatctcatgctacattgactggtggcagtggtttttatttcatagaactttcttttctgttgttgagatctgtgctgttggtgctggttctgctttggcagttcccaaagtcccttacaggacaagaatgatgagtggggatataaatctcaattccagcagctgctcactcacaggtgtctcggtggaagaattgggtcttgttgagcctgtagcttctctctatatactgctgggagatgctgcctgtgagtgccttgcttgatatccaggtgctagggctaaggacctctttgtggaatagccatctttgcttgaggtctgtgcaattgtgtatgcctgcagtgcagtgcctggtaaggctttcaaactgtgggcaagaatgtaacaatgcctgtcactcgtgaagagacacagtcggtgaggtgagtatggattagtgccaaggaaagttttctgggtcagagactttatcctgctgcaggaattaactccattgatcaaaaacagccttaattgggatggggctcgggggcaaatttcatatgtgattggcaggagtctaaactgtatagcttttctggagggcattttggcagtggggattaaagtgtcaaatgtgcatactctgtgactggacattttcacttcacagaatttatcctaaggaaagcattgtacaagtatacacaaaagggtgttcctccgcaccataatgtttagtgttgccatcacctggggctttattaaaaaaggaaaagttacataaattccagtaaaaccatacagtggaatattataaagctgctgaagaagatgaagtcaacttctatgtactattatggaatgatggtaaagaaattatgtacaaaagtcacagatcagcatgaatagtgtgatcctattttcaatatatatgtgtgtattgagtgcatattatgtaaaggtttatatgcattaattttgggaggaagaatatcaaatgctaatagcgatcatcaaatgctaatagtgattatgtaaagaccctcattttctacttcctacttctctgtattgtttgaactgtttataaaggtaaaaccatagtaatttgggctgggtgcggtagctcatgcctgtaatcccagcactttgggaggccaagtggggtggatatcttgaggtcagttgtttaagatgagcctgaccaacatggtgaaaccctgtctctactaaaaatacaaaaattggttgggcttgatggtgtgcacctgtggtcctaactacttgggaggctgaggtgggagaattgcttgaacccaggaggtggaggtcgcagtgagctgagattgcaccactgcactccagcctggatgatagagcaagattctctctcaaaaaaaataaaaaaaaaaaaccagaataatttgatgtttactttttatagttttgtttctttttttgaattttaatttttttttaaagatgtggtcttgctatgttgctcaggttacacttgaacttctgggctcaaatgattctcctgtctcaacttcctgagtagctgatagtttctttttctacttatttattttagagatgagggtcttgctttatcttccaggttggagtgcaatggtgtgatcgtagcccactgtgtccttgaactcataggctcaagttatcctcagctcccccaagtagctagaactacaggtgcatgccactgcgcctggctgattttttaatttttatttgttttgtagggatagggtcttgctctgttgcccggggtggtcttgaactcctggtcgttaacccaagtaatcctcctgccttggtttcacacagtgctgggattgcagttgtgagttaccatgcccagccctgatagtttctttttagaaagctgatcagcatgggcccctttttacgtcttttagttctttgacttactggaacttttctgatttcattttttaaaagggactcttctaccttttaaaagtcctacaacatctttttcttatttacctaaacagtaatgagaaaagaaataatgaagtcttaccaaattgttaaaaaaaaaaaaatggaattgtaggccaggcactatggctcacacctgtaatcctagcactttggaaggctgaggtaggagggtcacttgagcccaggagtttgagaccagcctgggcaacatagcaagtccttgtctctacaaaaaataaaattagccaggcgtgatgcttcacacctgtagtctcagcttcttgggaggctgaggcaggagaattgcttgagcctgagaggtcaaggctgcagtgagccgtgatcacaccactgcactaaagcctgggtgacagagtgggaccctgtctcaaaattaaaaaaaacccacgaattgtatatgtgttctttatgaaaataatgtgacagatatcattgggcatctactgtgtgccagggatacaaggatgaataagatgtggctcctgttattcagagttcacagtgaagtcaggagtatagttataccagtaaatgatggttaaactgggtgataagtgcaaatagagggcggtacagtacacacagtgagaatagagtggtgctggtaattcatttatttaataaagagggagcatctttattataatttatttaatcaagagcaagcactggccagacactgttgtaggcactgggatgacactgttgtaggcactgggacagcagtgaacaagcaggtaaggtcctgttctcatggagcttctgttcagcaagagagagaaatagacatgtcatgaagagcgtgaccggtgtgaagatgaagaggaggataatggcaggtgggttgttgtgacacgtgagttagggagagtagctcttcaggaggaggaatgatggtatgtagaggaggagagagtgagtgctagcgtctcctggaaggggatggaagagatggagatggcattgcaggcagagggcccagctggtacaaaggcacagacataggatatctgggaggcccccgccattttgggtttacagcaagttggggatggtgtttttaggactgtactgtgaataccatgtttaggagcttggattgatctgttggtgactggctggcctgctggactttaaattgggaagagatatgattggactggtggtttaggaagttccctctgactctgagactggattgaaagagaaagacgagagtcagggtagtcactggggaggccactgcagcggctcgggaagaggtgatcaggccgtggaagagaggtggaatgaagaaattagaatgtgcaggactgggtgattataagccatagaaatcctggctagagcaggagttggaagagattgaggtagtaatgacataattcatatttgttcatttaaatccaggtttgtctaatgccactttaagatgttctcttagtagtcaccagtgatgtcctgaggtcaaaccctggtcttttagcagttcagcatctccctgttgtttgagatcttgcatactgcaaacctccctggagcctcagagaccctttccccaggggtccctggctggtgaaggcctgaagacaaggccaagtcctctcttcattgctgtcaacattgttagtcctttcatgttccctcccctacatctgggaatgcagtgagatgcagtttcccatctcctttcttgtcccataagactagtaaacaggccctttaccctctgggggttttttactgagaatcaataaaaggaaactgctaaagaagcaaggtaacgtggaaggtgactgatgtaataaaggcaaagtagcaaagatagcaaggtaacaagttaacagctgtagcaatgaagcaagtgtggggtccctcaggaggttctgctcctcttacaaagtcactgtcctgattgctggtccctgactcttggttaggctgtatcaagcttcctgatctcatcttttatttctcagggttgaatgtgcagagcctgcctctctcttctctactcctcttctccaggtcctctgcacctctttcttcatgaaagctcctcagtccagtcctaggcactcagggagtgtccatttctgggcccacttggataatttgcatcttttgagggacattctccataacagtccccaaccttatggggcagtctttttgaagtatttcttcatggagtcacccttgtcctcaaatatctccctcttctctgtccgtctgcccgtccatccatccatccatccaataatttgagcttcttattggagcaaatcactgttcttagtactcaggatataaaaataaattgccaagggactctcagttttcttcctaccactctgactatggcctctggaatctttgctggcattgcctcttcctgtgagaaccactgacattttatgtgcacctacacagcttcacctgctatctgtgtgctgctgtcggtgcatgatgaccgccatcccagctctgcaatttaccttgctgtgtggcttcaggcatgttccctaaactctgttgctgccctcagttggtaaaatggaaatgatagtgtacttatttgaaaagttgctttgcagattaagttaaataatgcatgtgaagtgcttggcacattggctggaacagattaagtacttaaatgttattaccaccaccgccatcactactgttagtattgctgctatcactaccattctttctgcccttgggaaatatatcaatcacgtgagaataatagggagtaaaatgagagaccagacttttatctgggtgagaataaatcaaatccagtatctttgggattgatatgcaagcattatggggcaattttgaattgacaattgagaggggagcctgtgggaagacttcattagggataagtgagtcttaaatagtacttgggcctgaattgataaagaagaggcatcaagtttagacccaagctaagttggaaaggtctttagccttctgtctagtaggagggttctcgggttggtgaccaggtacttctcaggtgaacacggtggggcctgtgcatttgtttgtttgtttatttatttattttgagatagtctttctccattgcctgggctggagtgcagtgggatgatcatggcttactgcagcctcgaccttaggggctcaagtgatcctccaacctcagcctcccaagtagctgggactacaggcatgtgcaaccatgcctggctaatatttttattttttgtagagatgaggtcttgtcatgttgcccaggatagtctcaaacacttggactcaagtggttttcctgcctcagcctcccaaagtgctgggattataggcatgagccattgtgcctgtcctggggctgtgcatttaatgtgaggctcctcaaacccgtgcccacattggggattgtctctagatttatttaatatgctgcatgtttataattatgcctgagtgttttcagatgtctaaaatgcaaatctattcaaaacattactaaacattgtattagtttgttggctcttagtcattagatattaaaagtaggacttctattacatgggtggcctgtagaacattttggtgttagaaggggttcccaaacttgaaaaagtcaggaaccacagaatttgcctgataaaaccagaagcagatcctggcagcattctagctggagggtacaacccaattaaaatggctgtgtaataaagcgatcttatatctcataggacaaaaagtccagaggtacagtgatgctagggttagttagagcagcgtctcagtgacctcataggacctggttgttcgccttttccactccgccgtcctttgcgtgtcagctctctcctctcatgttcagcaaatggctgcagcagctcccggcatcacatctccatactaatgtcccaatatatttgttcctggcctcacttctctcagtaaggaaagctttccaattactggccagccttcagacttttccctcatgcctcactttgatgaatggcctaacttgcacattcctagatgaaatagggcctagggagtggaattcccacacacaggtcagggatcccagtggaagagggaacgtgtagattgaatcaggattctgccttcaagaaaggtggggtggagtatttgggtaggcaagaatatctgggcaggcaggaactcgggaggctgccaggcagttcatcagggcggtagctgggagaaggttcccaagcagtcacatccagggctgctctttggctaaggggcagaagcctcccaagcagtggccccagggagtctcctggcacaaggagaagtggaaaggtcttagagtgggatgataggatctgcaccctgtctttgtccccagcagctctgggccatttatcctctgtatagtgctctggggagagactgcaaatgcttcttttggcttttcttttttttgagacggggtctcattctgttgcccaggctggagtgcggtggtggaccacacctggctaatttttgtagtttttatagagacaaggtttcaccatgttgttttggctttgttaaatgagagcccactgtgtcctggcctaggcactgaagatatagtgaaagacaaataggcatggactcatccctctttcattcatttatttagtcattcattccagtagtagtttcctggggctgctgtaacaaagcaccataggctggggatttaagcaacagaagtgtatttgctcatggttctggaggctggaggtccaagatcaagatgccagcaggtttgatttcttccgaggcccctcttgttggcctgcagtaatggtcttcttgctgtgtccttgggtggtctctcctctgtgtgtgtccctagtgtctctatgtcccagtctcctcttgtaaggacaccagtcacactcggttagggcccaccttgttaatcacctctttaaaaggccatgtctccaaatgctgtcacatcctgaggtacttgggattaggggttcaacatacgatttttttgagggggagacacaattcagcccataacaattccgcagttctctaccaagtgtcagtatgtgtcaggcactgccctctaggaatgtagctatgaataaaacacaaaaatctctacccttatggagcataccatggggtcggggagtttagtggtcttcagtcaccgcttccagtttctgtttgggacccatctaacttagtatgattttagcaccctcctctcctccaaattccttattcctgtaaattccatgccctgagaccattccttcaccagagacaaaacccagggatggaaaagcctcgtgacccagtgtaaccagcagaacaggcatcagggacaggagatcctttctagttgagcaggactccttgagggatctgagaaacagataaagcctggggactggggaggaggagagggtatgggtctcgggtgatggctgggcaaggagaggctgtgggcagttttctttagccaagggctggttgccttcgtttcacctgggtggggggcccaggtgttctgctcctggggaagcttgtttctggaagccgcagcaggctggctgtctctctggggagctgcacgtgatgcagacggggctgctggagacaggcctactggcatggagacctaccttgcaggggctttgccagaaggggttgggatcagggagtcacttcctgaatgatttgggttgtagatgggcttatcagattaaaaaaaagatgcccagttaaatttgaatatcagataatcagtgtatgtcccatgattcaaatttcaggtaagcaatatttgggaaaaatttatactaataaattaatttgaatgtcatttttctgacattcacatttaagggggcataccatttttatttcccgaatctagcaatctcacctctaggggttcccagattaacaggtggcgatggaagatgggggaaagaccaacaagaacaatcgtaattcatttttttacagtaaaaatcttggccaaggaatcatttcctagctcaccctccccaccttccccccaagactgagactgtcatttgccccctttgcatgaacagacctcacagagaggtcatagcctggtgacttaggatgggcttcctgtcctgcgcgggctctttgtctgtcggcttccggccgagggatgggagggggagcagtctgaacactggtggaaactccggccaactctctccactgccctccttttctgttgcattggaaccaccggacaagcagaatcgctgtgccccaatccagcctcatctgtcttagaacaggtaggtgtctgcgagggagtgcagcagagagtgtgacttcctaggagttcacgggggggttcctgcagcccttggagagcaccctttttctgctgacatccctcccccctccattgagggacctctgtcattgctgctgaatccctggacctgaacctgtgatcaagaagtaatcctttttattttccccccagacaatgtttagatttttgaggtctcatttttagcagtgtcctggcacttgcttcttagtcaggggtcagaaaactttttctggtataggtcagatagcaaatatttttgactttgcaggtcacctggtctctgccaccacctctcagctctgctgttgtggtttgaaagcagccatagacaacatgaaaaccagtggatgtggctatgttccagtaaaatcttatttatggacacatgtgaactccatgtagtttattattcctttgtttttcaaccattaaggaatgtaaaaaccattcttccttcatgggccatacaaaaacagatggcagaccagatttggcctgtgagccatggtttgccagccctcttctaagtcatcagcagagaacattacagatcagaagcctggctctgcgttcccgacataggcgctgaatggcttcccgccctgaggtcacagcttctgctgctcccaggtgactgactgagctgggatccgaagtagtgggcttggcctctcagctgcccacaatgtgggtaccaactcacataccatagtttgctgtacagagaaaggttcctgcatggatttgtagatcttcagaggatgagccataaacagtcaagtctggccatggaatgtaatgaatgtagttatactgatcatagactataatatccagagtgattcggggctaataagtagccagcagaattgaatgtggggcagttgtatgcctctggtatgctactttctgcctacagttgtgtgtgtgcttggtattgtgtgttttaagtgaaaggatcaattggatttgaatttctgtcactggtagggtctagctacacctgaaacatgagtcaggaggcagggcccttcattcctgagtgtcttgactgatggaagctttgtgttttatggatagaagatgtgctgtgtaaggtggacagtggaattacacctccacagaaatcactcctggatggagaatcaagtttgcatgtgtgccctgtagcattcattcttgccgcatgctgggagatgggtggttattaggttatgtcaaagtagtgtttgccttaatacacgatcttcctgcagtaacccaataatggaagtggaagggagggaggaggggaaggtgatgacctgcttatttgaaagtgggaagcatctggaagtcaaggaagctttgtgtggtgttaacagggagctagtaggggtctgtaccccactgctcaccccaggcccctggcaggtttgaattcactaattctagtcctcaggtgaggtagcatggcttagcggtcagcaggacagcatctgggctcagactgcctggctcctggcccactgtttttcacctctgcctttgggcaaattacttcaccttgccatttactgggttgtacagtgggggtattaatagaagtaccttcctcatagggctgttgtaagagtgaaatgagttaacggatatgaagggcttagaaccatgtctggctcatagtgagcagcacgtgaatctttcttgtggttgtggtggtggtggtgaaggtagaggaggaagagtggttttcttagcctctaacctcatgctctgagggtaagcacagctctggtagtcatcattcagagtccgcttataaccctgtctcctcccaccatgtcatacagagacatgtgaacatctgtggggacgtgccccaggcattctttgtgagtagtggttcacggaggatgcttggcccagccacaacctaaggttttcatgctacacctgtcacttgctggttgtgggacctctggcaggtccctagcctctcagagcatgaaatagagataatcaggtgtcccccggcccctcacaggattgtcttgggggcatgacaagataatgaaagtcaaagtgctttgcaaactgaagttcccctgcagaggaaaggtgtgattgctgctgttggcatcatcttcctcattatgttcttgcattcccttggtctctgggtatccttcctccagcttctgtggggcaagggttttgaaacaatattcacagaatcctggtttttccataaagacatttcgatgtaccgttgcttttttttttgggtgaaattattgatgtaattcaagtttgaagttgtgtaataataatgtgctgattttgtataagggtattatttctgaatccagttccttccttttcttttttctttaattacactcttgtctttagagtagtgttcttaagtgcagtccaaggccagtctagttgtattcagatggctttgttaaattgggttttctgtgacccaggctttttttaaaaggaaaaatttcatcaaatcccaacaactttcatcctaattttacctgcttaaatctcttcctgcaccctaacttgggttgagtggtataaattttactttctgatgctttatgtatatcatcataattgtttaaggacataattcttaattaaatctaaagagcttgaaaactttggggttttttttttaggggggggagtccaagggtcttctgaacaacgcgttttcaaatgtggttggtttctgggattcccaggggttgggaagctgtctctttgatggtgacatttccaggaatcaggacaggactcaagtcctggcttgggtcattcccaagccccctcctccgcagcctgtgtttagctgactctgaccacagctaaacatgagagcagtttggggaggtgatggaaggtacctggggacctttgactctgcctagtggatgagggactgtggtggctgcatcctgtggaaatgattgcgtcctgtggaggaatgctcttgtctcacagtgggagtagggaaagtggcttctatatgctcacattaacaagggtgagattctgtcccatgagcttcctgagagagatcccgcttttgctccacctcatgccttgctgagtgcaggcagctcagccacagtccctaaccacacattgcggctctctacctcttaagctatgctccttgcttaactccagatgactttccagcacattgctgactctcccctttctctttccagtccttttttttggggggagggggggcggggggctgtgtcaaaaaggtcaggctaggggcagggatttgttttgtattgaaaaagacaaccaaggctgaggtaaatcttggcagccttttcagaatttaatctgggtgaagccgtgggttggacatggggtaggggtattaggatattggttcaaactgcgaagaacttggccagctatacaatcttgagctaatagctaaaaaaactctgacttgaaaattatggtttgtgaaaaaacattgagggcatagcctcctgaaagaggggagggctgagtaggaggaacatagtccaggtggcatgatctgtaatgaaaattcaactttgcaaaccggcgtgtgtttggaaatctaatgtttttttttttttttttttttttttttttttttttttttttttttggggggggacccagccatgctgtgtcttgtagatctcatagccagtaatctgctgaggtggagctctggccttggtctctcctggtagtgaggggcatctctcattatataatgttgctctgctaattaagtcaggaataatgtctatggcatatttaatttccaattagactactttatggatcaatttgaatttaatgttaaatctaatgtggaaatcattaaaaagttagatctctagagagaggaataggcacttactctgactattaaaaataacagttaaggtcatgtgttaatacattaagtgtttttatgtggactgggaagaaattagtagagaatgcagaacatatagatacatagatagtctgcatgcttgtgatttggggaaaattctggtgttcagatcaaattctacaatgcttatagtaactgctgcaacagatatcatttactgcaactttactgtatgccaggcccctggtgagtactttaaatgtattatttaattatcagaacaactctatgaggtgagcattattactcccctgtataaataaggaaactgaggcttggaaggtgaaggtctcattgtcagaaaatggtgaaggcaggatttgaatccaagccaatttcatttcaaaatcaactcttgactagattgaggtgctatggaaggtgcccaataattgtaaccagcagagctctgtaagtggtctgagtttaaagcccatttgcttctgaagtgtttgttgctgctgataatttgaagaatggcatcagcactgccattattgctttaaggaacagatatgggccccaaggtgccaagccaagaccctctcccagcattcccaggctaaagggacagtcctcagaaaatgtgactctctgaccatgacttgtctgaggtcagccccgacacttcctctgggcaacttctcagaagttaactcatccagcaccttcagtcttgtgtgtaccttggatttcctttggaccttgtattctttatgggttatactttcttgtattcttttatttttcatgtttgactaccctgtgtttagttagacagaagaatgtggttctgagtccagactctcacttactgcctggtgtattggacaaaccatttaatcgttgctagttactagtctcccatgcagtgtagttgtgaggtttccttgaggacgagtgagtgtagaagcacctggctcagtgcaggtgcaggaagaaagcttcccttcttgcgttcttgttccctcccctgtaggaacagcatccatttactaatgagatgaccaggttcaggagcaccacattttttctggctcttgcgagtgcctactgttcatttatgcaaccactgtgtatgagggcacagtatctccagtccctgttctagcagctggggttactttgtggagtaagaaggatgatctgcacacacccctatccccagcatcctggagctgacactatagtggggaggagagaaggggcaggttaataagcaaacaaagaaaataaatgctgtatatagttggatgtagatactctctgtcagctcactcattcattcattcacccattatttcaacgaacagttctaaatacacattatgttcccagcattatgctaagcatggacatgtgaaattggataacgtctgttagcccaggaattatttcaacagaaaaaaaaagtctggaaaatatagatcactctcttgtgttcttcccttttgaacatcctaactctttagggttaaatactcatttgagcaagtacaagcttctaaatatacccactcctcaagccccccgccccactgtccagcaggttttcctgttgataggacagtggacgtatgagtttgagtgtttggcagatgtttgcatgattcttagatcagtgcttctcaaacatccctgtgcgtaagagttgcctgggaggctggttaaattcagattcaggtgcctcactcctaaatattctgattcactgggtctgggttggtgccagttgtctgagcttttagcctgcagtgcaggtgaattggttgcaggtggtctgtgaaccacacatggatgaaacagtgtcatattcacaccaggctggaagaatgtttaacctcttcagtttaaggaggaaactatttcccagggagtggaggggctctgaaattcgaagctacagtgacaagatgggccaggacttttgaacagaacagatctgggatctcatcctgtctccacatctcctaaacctggtcatctcctcagtaaatggatgctgttcctacaggggagggaagaagaacgcaagaggggaagactccttcctgagtgcacaccatgcactgagccaggtgcttctacactcgctgttcctcaagaaacctcatgcaggcagccttgaataggtcatccggtaacatccctttcctcatcagcctgccttgctaggtgggtaatgctgagagatatggttggaaagacccaggcagagtataggatagagactctagggctaggttttggtccatgctaaaaaataacatacaaattggtttcccaaattcctgatggattatttgaatgtgagttgagtcgctgcatatataccctgtgatttctctctctttctttttttttttttttcacaaaaatacactataaccgcaaaaaagacagtcaaacaaaagagggaaaaaattcatccagaactagctcagtaccctaacacaactgttttcattttaacttttagcccttgtctgtatgcaggcatgtttctctgtatctgtaatcatatgtaggctcaattttgtattctgctcttttcagtaaaccttaagtaaatgctttccaaatggttatgtagtcttcaagatgatttttaatgatcttacaatctatcatcccacaggctgaatttacttaaccattcatctactgttggacatctagatttttttttttctgtagttctgtgctattataagtaatactttgggatatggccttgtgcttattgtggattttttccttagggtgaattcccaggagcaggatttctgggttaaagggcacaattatttttttggctctcaatggatattgctaaattgctttccaaaagggttgtaccagtttatgatgccaccagcagtgcgtgaaggtaccaatttcagcatcttggcttgcactagatagtataatttttacaaaagtttggctcaatggtgcacatcgtttaattgatatttcttggattatgacaaggttgagtatggctttacttactatgttttgagattttacttagtatttttgttttcttacagtcaggacctagctgtggttgaggtcagattttctgtgtagagcttttcagactcttgaattttacagcgaaaaaacaaaccaaactaacaaaaaccaaacccagaattcatctgtaaaataaatactttggacatattttgtggttggattaactgttcgtgattttaacttccttataggtcataagttaatagggcggtatttggagagtagcggggcttttcctcttctccttagattctcctttgttctttccctctaccatccccccatttcctgtttccctcctcccctgtaagccctgttgttgtctttttggagataaaacataaaaggatcagcttttagtcatgctccttcaacttataaaatgtaggttgcctaaattatgtagtacagagtgaggataaagaaaatcacagtattgtaacacattgcctgtaactgctttgcaaaagcaaacgtctcccacgaaatcttagaaaggtgtgtttgagggtgtaatcttggcttgtggtgcaagggagcccaacttgtttttcaagttggtcttgaataagtttgttctttctggaatgctcgccatcctcagtatgacagagttcgcttgatgacaaactcttttactctcctatacataccatggccactgaactggtttgtttatttgcctggggtaaatgattgaaacacattcccctttgcagtggtgctcagcatttgatagatgattcttattccccaggctccttcatggtgatgccaagcccaagtctagccttccagtggcccctgaggccacactgtcccctccgcaacaaacactgagaaagacacacactctcttgggtgtgcacgtagtttattgagctcgtgggctctccgtaatgctgccccactatgcgcatagtaggagaatccgatattggcagaataactgggtctatgtacataaagtagaatgatcgaggctcgatttcaatttaatttgttaatgaaacaagatggatcacattttcccttcccgcacacctctcgggctgtttgagatgaggcacaattaatttatttgtactgtctgtggaggcgtatgccagctaatgtagtgcaagagcttttatctttatgtttgtaatgaagaggggcaggccgctggcaaattgacaaggagtgctgatgactcatcctctgaatgcgagtgctttcttctgaaatcataaaatgcgcgtgcacacgcaagcctagttcctgtttgaaatggacagaacccctttgggaaagttcaggtgcctttgaaacactgcaggggaaagaacaggccagtgaggctgtttctccggctccctggcctgtcttgagggcagaacctcctgctcagtgggggccctactctgggatgggaattcccatcctctccctgccctctcctcctcgcccctcctttccttggaaggctggctcctttgtactggtcttttgtgctccagtaggcagccttccccacctgccaggccaggtgcctggttcacctggcgaggcctgtgcttccggggctgctccctaaccttgatcctgggcagtgccctggggctttgctttatgaggctgtggattctggggcctggttgattttagcctgggagtacacatgggattcctctggcctttgcttgagttccccaggcctgggcttggtggtggctgtgttgtcactctgttgatatgcctcagaagaaatagtttacacagtaactaaagttggtttggccctttacagtgtgtaaggctttctggcattaaaacaactctgaattggatatattgttaccccactttatggatgaggaaatcgaggtgcacagaggttaaatggaatgtccatgatcaagcagctagccggtggaaaggtagtggggacaaaaccttggactttagagtctaaaacctgaccttacaatttctttataacattcattcattaaggacaaaatgaaactttttctgcataagaaatatataaattctcttcaagagtcatgtgagagtttgacagcggactagagtgactatggttaacaacaacgtattgtgtatttcaaagtaactaaaagaaaggacttgaattgttcccaacacataataatgataaatgctcagtgtgatggataccttaaattccctgacttgatcattacatattccatgcatgtaacaaaatatcacatgcacctcataaatacgtaaagtattacgtatcagttaaaaaaaaaattaaaaaatatgtgagtgaatatacagatttctgtagttcagtagaataacaggaaattcacaggatgctttctggagacttaaaagcaaaatgtttgcagtggtctgagaaagaaaccctgaagattgtggtctaagaagttttccttcctgtgtcagatgcctggtcgagctggttgtacaggaaggctaagtgcatatgtcccagtcagtcctgtcacccgggtgtaagcaacacaaatcactgtgcatggttttattgaatttcagagccagaaggaaccatggagattttacaaatgaggaaactatggcctagagtgagagattttgtgttgggaagaattccattcatttacccaaccatccttccacgcgtccaacaaatatttattgagccagttttgggctgggagataaggcttaggctgtgaatgaaacaggcacagtcctgtcttcaaggaacataaaatagcagatgacacggctgagcaggaatgagcatggcatggtaagggcagtgatgagtgaagtcagggtagcttgaggcacataggtggggcacataactattggagtgggagaaggtagttagggaaggtttccttgaaagagtggtacctctggtgagacttgaaggatgttgctgaatgtcattctaaaaatggagaggctgtgttggctgagaattgggacgtcataattctcaaatccaactgaagttggtaaaaggttgtatgtgcttggagaccgcagatactaggctctgagacttaaatgcatgtaagaagtggttgctctaggcctgtgctgtgcactgggggagtcaccaaccttgtgcgctattcagcactaggaaggtggctaatctgggttgggatgtgtcataagtaaacaatgaccactgaatttcaaagacttagtatggggggaaaaaaagtaaaacacatcatgaacaattttgggctgggcacggtggctcatgtctataattccagctctttgggaggctgaggctggccaattgcttgagcccagcaggggcaacatggcgaaacctcatctctacaaaaaatacaaaaattaaccaggcgtggtggcatgcgcctgtagtcccagctacttgggaggctgagcctggggaggttgaggctacagtgagctgagattgctccgctgcattacagcctgggtgacagagtgagactctgtttcaaaaaacaaatgtataattttgtttatattgattataagttggataatttttggatgtgttgagttaataagttattgaaattaatttcacctgtttctttttatgtctgagaatgagtcagctgggtgtggtggctcacaactgtaatcccagcactttgggagcctgaggcgggcagatcacttgaggtcaggagttcaagaccagccaggtcaacatggtgaaaccccgtctctactaaaaatacaaaaatcagctggacgtggtggtgcacgcctgtagtcccagctacttgggaagctgaggcaggagaattgcttgaacctgggaggcggaggttgcagtgagccgagatggcaccattgcactccagcctggcgacagaaacaaaaacaacaacaaaaaatgagtctactagaaactgtaaaatgacaactgtggttcacattatagttctgtgggtggggatgctggatggagagactgacgcaggagaggcagctccattgttggagtgagggggttttagaatgaagagctgtgaatcgggtcctgtgggccctggggcatagtctgtggtaggcgcttcgcatctctgaaccttgctgccctgtttctgacatccccttaactaacacccatcccacagtggggactgaggataaagtcagaatgcctaggaaaagcattttttaaaaatattaagtatgaagccattgtgatccatggttctctttgtaataaaaatttgggattaaggccatatataccatactctgtactgtataccgatagttcaaaagacagacaagaaacctggccagttataaaatagaaggtcgaagtgtgggaaatgcattcagcacagaatgaattacagagtgggagtggatctgtgtgagatgccgtagataagaaaattccttttctgttgcacttggcttgctctactctaggaattccctcacccttacatgcaagtttgtatccaggctttcatagtccttgttccttgttttgtttagtctccaaaggccaacaaggaatatccatatctttttttttttaaatcttcaagtatttcatattgtattcctgaaactccacactcattaaatgcttgaatgaattgccattataccactgtttcctgaaaacctgggtgtgtcaggcatctgctgggctggtaggatgatgatgggcaggacacagcccctgccctcaaggtgctctcagttgggaatgagacagaatgcagtgtgaccaagccgtagtagaggtgagcctgaggactgtgggagacctgaatagtgttcctaactgctaaacgtgatttaaaggatgactgagttaaagacagcaaaggagggagctaagggacagttgtagctgcctggagtgcactctgttgtgattctcttttggtcagtgagactgtggatctgagtttgcataggatcctgccagtccccaggggtctctaacaccgtggcaacattcgatattaatgttgcacctgtatattagttacacttttcattgctggtttatgtacttcaaaggtgtagcacacagatagccctccctgatagagaatgaccccggttagttggaaggctctcagaggaccagtggggcagagacaattcggcagcactgagcagggggtatctgaggggtataaggtagctgtgacctggcatagagttggcaggcagacagtcatttcagtgggagatagcatctgatactcatcccttcgggctagtcttgtaatagcggcagataaataagctgcctccagtgtgtttccagaatatctctgtctgcaaaatgtctttgaggagatgtttgacttgcaagcctgtggttgataaaataaatacattttaaaaatgtaaacctctctgaaagaggttttagtcttttctctccccagggaaaaataaggcccttctttaacctcttttcttccctaagtgtagaattcttgccatgctttataagaaaaaacattttttggaatgtagcacctgtagaaatataaaggggttgtgcccaaaccattggaccatggctattgtgtgggtggtttcttggatgttttgtgaagaggtatcagccctgacacctgcaaagctggaggagctggactttagaagtgcttacattgtttttagctgaattctgagggcaggcagctgtaatgagtgattctctctaatattagaggagccttgccattcagtgacatctgctagaacaggacttggtgcctggaaaagtacctcacacaatgtaggaacttcatatatagttattgaatgagtggataactgaataagtaagtgaatgagtgaatgactagggcccttttctgggctttcagatcatgtggacgagattccccaggcctctctcttgctgcttgagggtagtctgtgcaacagcagcgtcagcatcaccttgttagtgtttctgaatcctggacatcttgttaagcatgcagattctcattcagtggatctgggacagtgtctaagaatctgcatttctaagaaagtcccaggcaatgccatgctggtctatggactacacttgaagtagcaggggtctgttagggttcagtgagatcatcagtaagtctgtaataggtgctcagcgtgcactagggattgtggagaaagatggaaacctaggttctcttgttaaaacttgtaatcatggtgaaaaatcaagactcatccttataaactggagaaaatccattcattatattgtgtggtatgataaatggtcaggagaaagctagagagaggaatgaaggaccttgtggagatggtgcttgggccatggtgtagaatcatgagatgctagcattaaagttgtgtctgcttccaaccctgtgtgatctctaagcctccctgatggttggctatccgacttctgctgaaatgccctcacgatagagaatgcactgggtccctaattctcaaggcatgttgctctcctcatatcttatgagatgccctgaggaaagggtttgcccaggtgaataatgcctgcatgtgttgcttattccatccacacgctgcagattcacagcgcagcatattaaaggctttgcaatgcctggcactaagacagccagtttaactttgtattacctaaggtaactgggtctaacataggtgaccacaacttccctcctgttttattagtacttattaatacatgttagcaagcctgtatcaggaggttcatcatactgagttaatacaggactcatttatcactcataaaacatttattaaacggccatgacgtaccagtcgctgttcagggttatgcacggaggagtaaattgtctcttgcttgtatagcactttattgtttacaaaacactctcccaggctttgtcttgaattgtcagcagaaccttgtgaggttgtataaattttactgccatttcatagttgaggaaactgaggcttctagagattaaagtgacttgtttaagggtatattctttccagtggtgccattgggatttgaaacttttgattcccagttgagtgttttttttttttttttttttttttttcctaacggtattccatttggctccagtttggtgagagaaccgagagaggtaggtcttaaaaacttgattgagaattgaacttgtatgagagaaatagaggtgttgtggtttctagagcagcgatggctcaagcagtgctgaaggaattggagtatatagattagagggaactttaaaggtctttcaggaggagctaagcctgtactccatgactttatggaggcttgcctacagtgcttttctacatagctctttttttttttttttttttttttggagatagagtcttgccctgttgcacaggctggagtgcactagtgcaatcatggctcactgcaacctccaccttccagtttcaagtgattctcatgcctcagcctcccaagcagctggaactacaggcacacaccaccatgcccggctaattttagtattttttagtagagatggggtttcaccatgttggccaggctggtctcgaactcctggcctcaagtgatccgcccgcctcggcctctcaaagtgctgggattacaggcatgagctaccatgcccggcccctttcctacatagttctaacgcatcctggaggcacagatcttttgatgaggagcttactacagcaaaggccagtttatttcacttatacaccattctcttatgttgagcttagatagggtctcttagaatctttatccattaatctgaattccctacctctgctggaaccatacagcacaagcctaattctgcttttcatatgctagcccatttaggttttttcttttgaaaaatctaaaataatttttcttatcagatttgcagtatatgtccaatgtgaaacaatgagaaaatgtagagaagcaaaatacagagaagcaaaaactaaaatttagaactatccgtaatttcaccactcatagattattagtatcacactactacttagtcttccaaagtattttcagtagtttttgatgtgggtgtatattgtttttttgtatgtatgtttttttaaaaaactaaattaaccatatatttggggataatattttgtacttttctggtaggtggaattttattaatatctttaatatcaataaatacttactgcaattaataacaattttaaaataggatatataatttattcccgcttatcagatattttgtcagttccttctcattttttggcagttataaaccatgctgtaataaatatcctcataggttaatttctgccttagacttctttacctagactataagtcgaggtaaactgtttccattacctattcctagaaataaaaaagtaaagcctaagactccagcctgaaaatagctccatggccctcttactcattctctagcctcactgtccccatttctcttaggatatggctttgtgcccgtttgctgtcttaaaatctgctcactttaaaccatttatctctctacagtctctgggatccagattggagatcctttccttaccctgaatgccacatttctaatcaggatagcctgatagtgcgttaacttttacagggccttgtcacactgagtcattgagcttgtgggcaacccaatcccttaagtctctcatatgatcttctccatcctatacttgtgagttgatttttttttttcagccctaagtgcatgacttgacatctatccttattaaatttcgaccttattaaagtcagctggtcattatatcctttgagatagtatcaggaatagactctatcatccttcatagtcactatcccttccaactcccagtcacaggcaaattccagtgtcaaatgattcagcaaatcccagcaatcatttctatctctgtcttccttactggattgtaaattttttgaggccaagaccatatcctattaattctccttaaaaactagttcctacttccattttgtcacatgtgacatagcggatacccaggaaatgttgccatgtgaatatatatttttttgatttaactctggggatgagggcttggtggtggtgggtatcacagtggtgaagaatatagagaagtctaggctgggtctcttgaggagcttccagtgaggaggaagagacaaaaaactggccagaccatgggtaatggatgtagtaaagagaaatttaaatactcctctgagggtactcagttgactggaggcttgagctaattcttcagatgcatttcgatgtcctccagaaaggcagacagtggaggaattccttagtggacagttggtgaatgcccaaggctgtgaaaagtcagagttgggactaggggagtggaaaaggagatgatgtttgctgggagagttgaccagaaaccagccacccagcttttgagaattgtgttgaatagtgattgcatagaatggtcttatctgcttcttttctgcgagatatagaaaaaagattaccctctctttttctttttacattattgagcttgaggcttgcaaagctaatacctacttaggactgattactcttagatcagaggatgaactgaaaccagaattcaagagctctgatttcttctcactctgtgagtacctttaagccagattcatggtatgaaggcagcagcatagcacctccattgacccacatgggggcctgccttgggcttcatcagccctttggagtctcagatccctcacctgttaaaggagagtaatactacccacttacctttttgggttgttgtgaaacacacataagacagtattaggagaagtaaggtctgagggctgggctttggacccagcggcccctaggtagaggcctgttgaattggatgacagtgaactttgcagcatttcctaacctcagaagttcaagagcaggagcctgagtgttttaggtccctggtatggctgtggatttccaggcatgcagcagctctggggcccctgcttcctacccgccagtggttccagctctttgattaactgaaagggaaatttttcttgaggaagggaaggaggtttctttgtggcccaggtctagccatagggaatttgaacacctagagctctgtcccagtggccttgggaatttaacagcttcttcattggtggaaccttggttatttgtgaaaagtgagcttgcagggttctgaggtagacacttaattgatgtctcctgcctcctgcctgtgtgcatggtggtatctgtcacacttccatcagccacgagaaggtgagtttgtatttctatatagatgcatgcccttgtgcatgcttatttaaataacacttgtttgtgtgaatgtatgtacatatagtctagtgccatataatgatgtttcggtcaatgataatcatatgtacaatagtggtcactttataatggagcgaaaaattcctattgtctagtgacatctaatgatcctgactctgtgtaggcctaggctaatgtgtttgcttgtgtctttgtgtgtgcgtgggttccccacctcccccgccccctctaggaacagggtcttgctctgttgcccaggatggagtgtgatcatgtgataatagcttattgcagccttgaacttgtaggctcaagtgaccctcctgcttcagcctcccaagtagctgggactactggcatgcaccaccatgcctaatttttaaattttttgtggaggtaggatcttgccatgttgcccaggctggtcttgaactcctgggctcaagagatccttttgcctaggcctccggagtagctgggattacattgtgagcccctgtgcccagttatgtctttgtttttgaaaagtaaaaaataagaaaagaaaaaaaattttaagtagaaagcttatagaaaaagacataaaatatttttgtatagctgtacagtatgtttgtgtttttaagctaagtgttattacaaatgagtcaaaagttaaaaattaaaaaatgtgtaaagttgcagtgagctaaggttattttataattgaaaaaaaattaaaaataaatttagtgtggcataagaatacactgtttataaagtctacagtagcgtacagtaatatcctaggccttcacattcactcaccactcactcattgactcgcccagagcaacttccagttctgcaagcttcatttatgggaagtgccctatgcaggtgtaccattttaatcttttataccatatttttactgtaccttttctatgtgtagctatgtttagatacacaaatacttaccattgagttacaattgcctacagtattcagtatagtaatatgccgtacagatctgtattctagaaacaataggctataactgtaccaaatagcctagatgtgtagtaggatataccatgtaggtttgtgtaactgtgctctgtgatgttgatgtacgatgacgaaattgactgacaacacattttgttaagcaacatgtgactgcacataaacacctgtgcattcataggcaatcacaactgcatatactgaaacacacaaacacaccgccatatatatttttaaagaatttgaaagatctaagatgatattaaatgtagtttagtttacttttgtgttgatcaagtgttactaagctgtaattaatttagtaaaggaaattaaaatggggatgtggggaaaatgtgactctgcctaattgacaagaatctggggccgtccagaaaagcattagggccaggcagaagttgaaacctttgggaagtctggcccaggactttaaaaatgttttttccgggttagaaatactgagggtttccattctaaaggatgaaaaggatcttctcctttctccttagctagccagtagattctgtcttcctcttatgtcctccagttcctttttggttcattcactctgagtctcgtctgaataagcattaggggaagggcttcctggaggattcgagaagggcaaggaagaagtggaaaaaaagaaatcttatcccactgctgtggttctttgtcatccctggtccctgtccttggcagaatcacacagctacaaagtggtggaatgtgtattccaaccagacctctgtgtcatgctccctaccaaactcccaactctttgggctgatctctgcccgccctccttgtcgcctttcctggttcgattttttttttttttttttgggtgcttactgtgtgctatgcactgttctggattccggggttatagctgtgaccaaggcagacgtatgcttgacatatgttaaccatgaggcatgtatcccctggtcccaccaccactctgctccccatgatttctatacatatatctttctatcacaacagttactgggttgcattagagttatctcttggtgtatctgcctctctcactggactgtgaaatctttgagggaggagttagttacttttcttcatctctccatcacagaaccctgcctgaagttggctgcatgcttgtttaaggctaattgaacaaatgcttgcatgccttttatgacacacaactaaattgtgagcaatccaggtacctaccacttctgtgtctcagttggtccgacagaactagtacataataggccatgttttatcctccagctagacatctagagaagtaaataagccttcaagtgcttcatcactatgtgtgaattgtgaagaaaaacttttattaaaacgttaatatgattgtgacaattgtttactctggcaagtagtttgcctcttggattcctctctgtgaatctgcccataatgtcctgaaattccaaatgggtccttttctcttcctctcatttactatttctattcaaaactggaatatgtggacatgtgtacagccttttaagaccaaaggctttacgttttctagctttttgttttgttttgtttttgtcattgccctacctagaacaaacttcaggaaagataggtttgtacagtagtggtgtatcttaaggtaaaaatgaattcaattttttaaagaaaaaatagggatttaaaatgttatttgcatttaagcttttagatattttgctgaattcaaaaaattattgtaaagtgggatacaaataatcacctgtcctcctttgaagatgcaatttattagtgattgtctttaaatctaaaaaatgtgcgtctatgaatatttattgtattctaagtttcagttgcaggcataatccttaaagcttgtgaatgatgcttgaatatattaaatttaggatttatatgaaacttaatggccttatggagtgcagtaggctccagctggaacctaagcttttgattcttatccattcacaaagaaatacaggtaaagcagaaatttaaaaagcagagaatgtctccttgaaatggccaaatgaatcttctctttttactttaaaaatttacctgtaattttcttataggatctccttttgaaaagtgccttttaaaatagctgggcagaattgtaataccatctttttttattttgttagaaatagtcttcttctttggaaacaaaaatggtgttagaacatttgtatctatatgtatgtattaaatatagtcaataatactttatgggacttgaagaaaaatttaattcttgggcagtccagctgtaagccaggagtctacttgttctgttggacaggtgaatgaagtagaaatagaatattaatttactttgagagctatctaaaaacgtcatgtttcaactctcttgttttcagatgaggagacggaggcctaggtagggggaaaaaaggaattgctcagttacattattgttgtatcttatcttacctagcccaagttaaaacttctcagagtcagactgtgtgtttatacatccctatctttgcagttcacataagtccttaataaggatggtatgactaaaatcaatgaaagactaagcaaaaaaaaaaaaaagtaatcatctcaggtcctcagatatcttttacctgtgatatttcttggtgaatgagtaagactcaagaccttaggtttgtgcaaggactttgcttactgatggagaattcccagacagctcacaagcaagtgtgtgtcctctacttacaactgtcccttgtcatttcagcattacctgtttggagctgttccgcattgggtttgccctaaagctaaatttaagtcatgttggcagtcttttgtgcttttcagttgcagctctatattctggcagcttacagcttgtggggctcaagtctggatgtgcctagcttatgcatgccttttagtgtcactcttaccatttgcttggtaattggagggaaaaaaagaggaaacattttgctcagtagcaaatcaaaaattcttttctcctatgtgaaacataaaccaagagtaagggtggaggtgtatatagagaagcatcgtaagggtgatgtattagtccatttttacgctgctgataaaggcatacctgagactgggtaacttacaaagaaaaagaggtttaatggactcacagttccatgtggttggggaagcctcacagtcatgtcagaagacaaagggcagcatggcggcaggctagagagaatgagagccaagcaaaaggggaaaccccttatataaaaccgtcggatctcatgagacattcactaccacaagaacagtatgggggaaattgcccccatgattcacttatctccatctgggtccctcccacaacatgtgggaattatgggagctacgattcaagatgagatttgggtgggtacacagccaaaccatatcagatggttaagtaatttatatggcagaaatacatagaataagaaatactgtgcatgtaccagctgccttaaagcatggaaaatggagtaggggaagaaaatcaattactgccccgtaccttctgagctgacccctaagtattgataaaaatttagcatcaataaatatttagcagccttgaagaatgttttctaattttagcccaaagaataggtgtctgacaaattgatcaaattgcaatttaaacttctgttcctgtaaagaagaaaatactcctttgatatcaagagaatttgaagaggtggcgtgtctcagcccttgcatcatgtttgacacctgaatcttagccccgggataccagaaggcaggcacagaactttaactctgtacatgtgtagattctgcaaatcaccttgtccacatataggatctccctttttctagtagaggatgtggcaagaatcttcctgggactcatctgtagttggatgcttttcctttcagtttcagatgaaaaaatctttgaattttctgtatttacttgccttgctaatcactccttaagacagcctggcatgtgggctctgaaaatcagagcagtattccagcccctcccttttcatcagttaattaattaattctatatttattaaaggtgatgtgtgccaagccaggtcctaaagacacactccagtaagacaaggttgctgccttcatggagtttgacactggggagatagacttgttgatgggcagttggcagaggtgctctgatataagggcatggtgctgtggaaacaggcacagggcaactcagcctgacataggtatccaggaaggctccatggaggaagtgatagctctgttgaaatgagaagatggttggaaagatacaaggggtgactctgtgtatgtgtgaagcatctgttggaatatgagtgctccagcactgagagttatgtttaggttacactgtgagtataatttgacttggtctgattgctttgctttgaggtctcattctttctatctatctatctatctatctgtctatctatctatctatctatcagtcatctatctctgtcatctatctacaatctttttaattgtgataaagtacacataaaagttaccatcttcatttttaagtgtacagtttagtggtattaagtgcattgacattgttttgctatcgtcaccaccatccatgcacagaactctttttatctgcaaaactgaaaatgtctattaaacaagaactctccattccttcctcctcctagcccttgtcaaccaccattctactttctgtgaatttgactactctaggtaccgcatatgagtggaatcctactgtatttgtccttttgtgaccggcttaattcacttagcataatctccacaagatgtattcttgtcatgggtgtcagaattgccttccttttcaaggctggataatattcaaggtcccattttattaaaacctcaagcatatgtgaaatattcactgatcaacacattaacgagctctctattccctttactgataagtcattcatgcatttgtccctctctccctctgttactgattacatgttaggtgccagacatcgggctagttgctgcaaatacaaagaacacctgtatctactccccatcccaaatattggtccatcagggagagaagcccaatgaattattaaacagtattagtgaaagagtagttgtatgtataaagtactgtgggacttaacaggtaacacaaacaaaagcttcatgggaaagccaaataaggctttaccaaagaggtagctattgaatcggcctctgaagtatttgtgggaactttgtaggtggcgaggaaaggcatttcagataagaggaacagcataacagtggcttgggagtcttgtctgtacacataggcagtcttatgtggtggttatcaattaaactctggagtcagactgtctagatttaaatcctggctcttccacttctctgagtgatgaggcaatttattttcttaccgtgccttagtttcctcatctctaaaataggaataacagtagtacttttctcatagtattgttatgggtattaaatgagtcaggacatacaaagtgcttagaacagggttctctagaagtgttagctactgtgattgattattgctagtgtaatgttattgctagtgtaatgtttgagggaatatcaagtcatttggtctacgtaaaataggatataatgtgtgtatgtgaaaattgtcactagacataaagttggtgtattagtctgttttcatagtgctatgaagacatacctgaacgtgggtaatttataaagaaaagaggtttgtctcacagttctgcttggttagggaggcctcaggaaacttataatcatggtagaagacaaaacaggtacatcttacatggcggcaggagagagaagtgagtgccaagcaaagggggaagccccttataaaaccatcagatcttgtgagaactcattcactatcacaagaacagcatgagggtaactgccccctgccccgtgattcagttgcctcccaccaggtcactcccacgacacatggggatcatgggaactacaattcaaggtgagatttgggtggggacgcagccaaaccatatcagttggcggttgcctcggtggatcctgatgataaaggattcaagtatccccatatctgtgacttctaagctttcttcttgtattcaagggcttgaatgtctgaacttgtatctgatgtttacttaaattttctttttaaaaatattggaatcctttcttaaaaattgcaaaaacaatggaacattaaaaaaagtataagacagaaaactgcaatatcactgtcctaacttagtaactatttcctttttattttcattttgtgtagctacatgcataaaactggttataatcatgtaattttgctttgcttttaaaaattcatattctatgagaaattttcccttatgttttagttcattttaattattcttgtaaatgaatgcccagatttcctttgcattcatgtactgttttttttaagtcattctcttcttcatcatattatagttggttttataatctacatctttctgctcataatttttgtcttctaatgaattttctctttttgataaatttctagggttaggattgctaggtcaaaggatttaagccttttgaggctcccaataaaggtagctaattggatcttcacatccacaccaccagcagcatattttctatgtcatattcactagagatgtgattatagtctttaaagtcttgctgattaagaggtttaaaataaccccttgagtttgcttgaatttgccatttttctccctcctagtgatcatgcatattttcccatatgcttattctgctctgtaattgtctattcatctcctctttctggttgtgttcttgatattttccaatataaatctggattgtttatttaccttattagttctgtgttggagaaaaatgcaggttcaggatattaaagaggaggtcaaaaagtcttttttccccctgccttgcagtagcaaggctctcatccttgcagttgtggttctgggaaagcagaaagaagcacaagcttttgccgtgtgccagagctcctgggatcacagtggccagagtctgggctctccaacagccttgtttttcagctgccttgcttttcagcagaaaaatcatgtggctgtctgttacctcagctttaattgtgtttacactttgtttagagggcctggcctgctccttatgtcccacaagcacctgatacagagccagcacacagtaggcagtttcttttcacccaccatagatcagaggttggaatgcacctttcttgacatcttcatctgtctcctgtcccctttacagcatgactgttttaagaggtcttgtagctattctttgattacctctagtgatgggaggcttactgtctcacaaatacatttagactttgagttcaaggtgtgatgaacctgggtttgaatttcaccttgaccactgactagtgacatgattctggacaaataatatttctaaacttcattttatttatctgaataacagagatagtaatatttctacctcttgtaattgtgatgaggatgaagtgaaataataaaagtaaagttctggactctaaagaagtcaaactcataaaaagtagagtagaatggtggttaccagaggttttgggggtgagagggtgggtagggaaaggggagcttgatcaaagtgtgcaaagtttctcttaggaggaataaattctggtgcataacatggtgactgtagttaataataattatggtatatttcaaaatggcaaaaagaagaatttaaatgttcttatcacaaagaaatgatacctattgaaggtgatggatatgttaattcatcagattggatcattccacaatatatacatgtatggaaatatcacattgtaccccatgaacatatacaactattatttatcattcaaaaataaaactttaaaaaaggaaagtcttgactcctactcctcacatagtgtcaagtaaatattagctgtgaatattaattttatttactgatacaaggtgtatttccttaaacttttgccatctattagaatctcagtgatttggcaaagaagccatagctcagcctccagctcttataagtggcctggaatttggagtatattcttctgtaatggagatgtgggagggtattgtctttgagctgattccagagtggcccgtggtccagcggtggggctgggcagtgctgtaatacgtccaggctagcaccttcttggttttcagagtctgattatagagacctcttgtttgtccttctctttcttggctggtgttcttgccttggcatccctgatagaagatagacaaaaacatttagaagaaatgaaactctgatccacatactagttatctgttcccctccgcagaaaagggcttagtttagcaaagagaggtaaaggtagagatcatacttctaaattcaaagcaatatatgtcgagcttattgacagcactcaataaatgttgcttttattaatattacaggtaaaccaatacgagggtggcctgggcatagggtaggcaggacctaactcttctcttatccccagactttagtatttcagtatttttgatgagaatctgattaatgatctgaaagttcctcaaagtctcctgtgatttaagcagatagcttttatccttggggaaccaatataattagtattagaactaggttcatgaatcttaagattatggagttcatctttgtccagcccatctcactatgctttgtagagaataacttagcagaaacagccccctgctaggcatcttggtaattgcttcctaataactgttaatttttggtttcacaactaaaatattagggagtctggtgaatttaagaaatagtgttgaagtgatggcaattgagattttaaaagttgcctgtatgacaaatgaaacagatttaaggtgggggagaaggttacccatgaacggggtggtattgaaaatatttaacagccagtccagaagggcattggcacagtagaaactacactgcaggccccttgatttgccggacacctatccttgttgaatagtgaggagaccttgggacactacgaaggggacagagcattcactggggctttggagcactgactctttacacgctgttatggaagtatttcagtattttaaacaaccagtatagttgtaccagtcgggtactggaggtggtgtgggagagtgtctgaaactggcaggtgttcagaggtgttgatagattcttcacttgtcatctttaattcattgctgagaaaactttagttgcgctaggccagattatccccaaaggcgtttggacagtgtcacattagaatttagggctatttagaaagcactgagacatgtcctttttttcagaaaatactgtgtatacagtgtgagaggcgcacagcctctgtcttcatgaggtccccagtctatcggtggccttgaaatttttctgctctttgactgtaggctaggaatctgtccttgagaaatgattacaaggatgtttgctacaacagtgaaaagttgggcaaaatctaaatgtccaagcatgagaaaagagctaaataatagcatatccaccccccagaatattatgtacctcttaaaaatcacagacacagagaagttttcaggactcaggaactatttctgactgtgaaatgttaggtgggcaataaaaacctaaagctgtaaggaataattagtgtaagaaaggacatcaaaatgcatgggtagcactgattattatttgatggtggaatatgggtaaagttaattttctttgtggatgtttctatatgttccacttttggtcatctatgggtattaacttttataactagaggtgttccagaaatatttttaaaaacccgattaaaaatttaaaaattattgtataattagtgagtgggtgaacatgttggatttaaacttggagaagcacatttggaggttgtatttatctcttgtaaagaaagctgctgactcggtgggataaaaataagaggcctaggtcagcctcctcgcgttgaggcacctggctcccccaggcttccagactgcacgggttctgagaggccctaatgggcttgttgaaaggttctacttggcttcttattaatgtccctccctgagctgtgctctgctctgctggctaaccttgtcggaaggttacctgtggctctccagggctcggctaattttaaacctggtcagggagtgtggtggcattgctctgcagagacatgaacagctccctgggagacactgctggggaaagatgagtcgagtctacggttttttctcatcctcctgtaagtgaccaggcacgctgaacaagcaaagagagctgggataataatgagagcttttatggtaaaaaccaggattattaaagatcttttagcagtgtcaatgctggttgataattgcacggtgtgatgtgccctgcatgaactgtgtcaattctggccacactaggagtagcaaggtgaatgagatcctctcttctggaaactagactttggctgcttttaaagacagaatgaaactacagtgaatttcactacttattcggtattattttaaattttcaggactcacactccactggtgataagttcttctatgaaatttttgatcaatttgattgggagagggctgtttctgaaaagctaaaaaaaatttaaaaacacagaatcgctgcctgtctgcatgtcaactgctggtctggctgcctctaaaattgtcattttaaggggtttttttttttttttttggactgtttgcagtggagtcttgttcagaatacggctgtgtcttataatacgtgcaaccctgatattgtaaaatgaaatataaatcaataactgcaaaataaggtgacaattgagaaccttttccccatcaaaattaattgttaaaaaaaaaaacttagcccatatttttctgcttagaatttttttgtccatctacctttcaccaccttcaggttgggaatctaaatgtgcctgttagagttggctctgtcttctcctgccaaggcattcacagcttcttttgcacgtacgggattacagtgggaaacccattccacccagtggatggcctggtcttgaggcttacctgcctggcttaaggaagtgcatcttttcttgtagctgggcctgtacccacccactcataaaacagttgctaggagcaaattaaagaggcattgtgtgtggagtaaaccaggatgaaagaacaatggatggagaatcaataccctcctaactccctacagtgattgaagttaactttatttgaaatatccaggctgggccagagcacatcaagctagcagcattcttgcacgagagtagcacgggaatgaactttgatttcattttagggaagaagaaaaaataatgaataaatgctttttattagccttttccctccccttgaagtcctacctcttctacataaacctaattagcttcgacatgtttggatttagttttgagaaaattaaagctgagtaatattaggaatttgttcagtgggaatacttgttaaaaccttcattgacccaaatctgacttataaatggtattaaataagcaaactaaagaaaacttcatccccgtcttgtcctaaaataatatttttaaaagcatatttagagttaagtataatataaatatgttaccctgattaggtactaaatgaggtactgaagaagctgtagtggcggtattgagtgtagttatgaatttaatgttcttttcttaaaaaccaagtcctctttgacacatgttcaaaggtcttccttttttttcttctcctgagctgctctttctcacctctggggcacttccctcctacacttggcccgcatgcgtggtttaggcaggcccactgttatttttgtggtaacctgacactgggcccagcgcagccccctggctcttgtgggaggtgaactggctgagagccaggctgcgttctcccaggatgagctgctgctgaagcaggctgggctgagggctgtgggcaggctgcagcaggggctgggatgccacagaccaggcgggctgggggttcaccagtgaagacctcagactgtgcggctcagcaggtggcaggtcctgcctgaggttaaagaaaggtggagttggttgttgaggccacagaccaggtagtcagggtgtttggaaacctgaggaaggttttgaggccagtgagtctcttttatctcactctgtggttctagtctaaggtatgcctgaggctgtccttgtaattccttagacaaggatgaatttcttaagaatcatcaaaattgtattcacattttaagttaaaataaagcaaatggttatttgttgagctgggctagggggctggagtggggtgcagaaatgaatgggaaatagtgcctacctttgaaaatttgcagtatagcagggaagaaggtggatatattagcagtaattattattattttttaatttttaaaatttttgttttttatttattttttgagacgatgtcttgctatgtcatccaggctggagtgcagtggcacaatcttggctcactgcaactctgcctcccgggttcaagtgataatcctgcctcagcctcctgagtagctgggattataggcacccgccaccacacccatctaattttttgtatttttagtagagatgtggtttcactattttggcaaggctggtcttgaactcctgacctcaagtgatctgcctgcctaggtctctcagagtgctaggattacaggcgtgagccaccacgcctggcctattagttttgttgtcagctatttgagaacctacggtgtgtctggcacagttaagacatactacccatgctcatctctaagcatttagataatatatgcattgactgttgattgagatattctgttaatactttcatggatcatctcatttaatctttacatcaggtggctaataatgttccagttttcatgaaaagaaatgtaggcacaggtagtaagtggaggaatcaaaattcaaactctttgggattctaaaactcagtattctctttatgtatatataactgctctgccatatggattctccagatgtccaaggtgatccctgcaatttttttttttttgagacagagtcttgctctgttgcccaggctggagtgcagtggcgcgatcctggctcactgcaacctccacctcctgggttcaagtgattctcctgcttcagcctcccaagtagctgggactacaggcacccgtcaccacgcccggctaatttttgtattcttagtagtgatgaggtttcaccatattggccaggctggtctcaaactcctgacctcaggtgatgcacccgcctctgcctcccaaagtgctgggattacaggcgtgagccgctgcgcctggtctaatccctgcaattcttagaaatacctaccaaggacaatatcagcaaaagttttttgagttccaacaatctgtcaggtattgggagagccccaggcacctgaaggagtggagtaggtggccggctgtgtccaggcatcttggagtgcgtgtgcagctagaatgttggggttctggatgggtggctggaggagcaggctgagaacaggtgtgaaaggccaggggtctcataatgcacttcagtcctgagtgagtggggatctgctgaatgacttcaagtgagtgtatgatgaaagtcctatttgcattttaggaaaacctttctgactgcgggatagtgtaggagacactcgctaaaaatatgtctcctgggattctgattcaggatttctggcataaagctgggaatctctatgtttaagaagccacccatatcatctcgtataaccaggcttggggactaggttgttggcagtggcgagagtgtggggaggcgggggacagctcagctctggcagagggctgaggcagaaatggtgcggtcctttccttgagacaggagcaaagttagtggggtagagaggagcagaggggatccaggggaggcagggggactgggggtcaaatggacgttcttggtgatcatttagatcaggaggggaggaggggaacctaggataatggccctccttttgggttatgctccagccagtttacctgagaaacatcatctctgagaggaggcggtgggattctcccaggacctgggaatccttttggattttcatggggacttttacagatagatccttaatcagcaatgtgatgttgatggtgtcagggcccactgtgccagaactgtgtgtgtgtgaggatttgcgctggtttgttttgcctgtgggggacttttggcttctgaagtcacatcccctacgtagagtcacctttaggcagttggattgagagggaatctgcacctggaagtctccctgagagggagggctttagtggccatttgtacgtgtaattggaaatggattacattttaattaatctaaggggctgagagctcatcttgttcctctaccagggttaacagaatctgtagaaggatgtagtcttggaaggaaatatattccccctgcctgacactccgtccacctttttccctaaagaaatttgtgtgtgtgtgctggggacccgtagaaaatgtggatttaatcaaggtgtggcctttgcatattttactgaattcagcagactcattttgctggggtttgtcagaggggagggggaggagactgctggctggagagggctcacagcaccctgggccatggggaagtgaaggcaggagaaggcgcaggcctgatgtcagacatgagcgcatcagactttctgtccgtacctctcttggactgggcgtcttgcccccactgaatgcccttacagtgcttgtggacggcttagagtggtcttgtgcccacagcaggtgctccagtaatatttgttcatttgaatgagtggtttaattgaggggggaacagtagttactcacttatcctgcctcagcctgtcttcagctaaggtgccaagattctttctcttgctgaacttgaactggatgtaaaccaaggaccaggtttacattttgaggattgggatggggtgcgggtggggctttaattggcccctgaatttgcatctcaatgtgagagacctgttttgcatctgctccatcaccatgtcatcattaaatggaagattatatttgtcgtttaaagggtggggacttgcttgtgttggtgatcattgggacccagttgacatttgtgaaccggcagtgttgcgtgcttttggttaaattcatgcattagctcgtgtcggcattagttggtgttttcacattggccaaatgcagacgcatgtctctgtataagcatagcagcctggttcccatgttgggctcgagtgtgaccctgttgtcagctcacagcctctctttagggatgaggggagtatgttgagtgcttgaagacagtctgatgagcattcattagaatggctgagtgatcaggtaccgagcagagttaatcccatggctctgggttgtttaaacaaacacacctttataaacttggaacactgaagggagacgtcacattgtagtatttcagtttatctagagaactgtcctggccttggaccatactgaaaatacttttgatttaaaagttcagattccagatatataacattctctgttcttcaccctttatcttcccaagtagacagacagacagacagacacacacacgtacaccttcaggagttgctcacacactcctggtgtttctggtgttttcgtgctttttgtatgaaacagtccacctttcgtcatggcctatgaggccccctgtgattgactcagcttacattttcagcctctgctctagcctttctactttcttgcttggctctctcttccccacatctcctccactaatacttggcctgtgagtctggattagcctttcagaccagcctaaatgccacctccctgagaaactctcattgatccgagagacagaataaactcctccatcagcaccctattgattcctccattgcatcaggtgacatatttattcacctgttcatattcacccattgactcattatttccggcaaccattcagtcctgttttttggggagcagttgccatgtgctaggcattctgctgaatgccaaacatagaaaaatgactgggctgggtgaggtggttcatgcctgtagtcccagcacttcgggaagctgaggcaggagaatcgcttgaggccagcagtttgaaatgagcctgggcaacatagtgaggccaaaaaaccgaaataattagctgggcatggtagcatgtgcctgtagtcccagctacttgggaggctgaggcaggaggatggcttgagccctggaggctgaggctgcagtgagctgtgatcatgccactgtatgtactccaacctgactcaaaaaaaaaaaaaaaaaaggaaaaattactaaaggcatgggcccaaaccttaaagatctcacaaatcctcaaaggtgagagacgcataaacaaatcattcctatgcggtgagtgagttcagttcatttgtactggctggcaaaggtgctacctgtgggaacacagaggagtggggaaaggccaggtcaggcttcccagtggaggggcttgaagtcttgcaggtatgtgtacttatttgtctcgctgctggagagggtgcttgttgaggacagggaatgtggtatctttatctccatatccagtgcttgggacatatggctgaagggacaggggtgggaggggctctcagtaaatgcttttaccacattaaattgaaacagataattagaaaacagaaactttccctttcatatttataccctatcatgtttcagaatcattttaaggcagcatgcaagactgtaaaatagcataaatagaaggtgggagaaagaatggagaaaaagaagaggatagaggtgaagactaaatgtggacttaggaatgaaaccaaacttgccgaccaaaaccacctctgagcactctctgaggggcctgccagtgtggctcagtgcactttggtggctactgagtaaaggaaaggccaatggcttgaccacgaggtaaaaaacacattgtgttttgtttgctgtagaactttcctttgggatctttgtaaagatcagtctgtgtgacgtgatgagcagcgtcttccacatccttgcattcactctagagacaaatcccattggctgtttcttctaataacccttcatatgctgatggcagcacatcaaagcataattcaaaaaaggcaaatgtattcagagctcctggaataatctttctctaaggtaactggaatcagaaaggcactgaaacagggcagttttttttttttttttttttcatttctttctttttttttaaaataatttttattgaagtccaacttacatacagaaaagggcacacacatcatcaatattgagtcccttgtgtttttccatttgaatgcattggcatccagagccattgatctattgatctgcactgacatgaccagaacctcctaagcctccccacgctgccttccagtcagtactcccaaccctaaagggtggttgctaccctgacttctaataacgtagatgaatttcgttagtgtttgaacttggtatgaacggacgcagacagtatagtatatatttctttgtatcttttttttcctcaatattgcgttggtacaattcacccatgttgttacttgcagttgtcatttatttatattctattgctgtcccatagaactttctgtggctgtgaaatgatttttgtctgtgctgtatgacacagtagccattagccacttgtgaatattgagctcatgagatacaagtagtgtgactgaacaactgaatttttaatcttattaatttacatttaaattcacaaatgtgtctagtgcctactgcattggacagtacagctgtataccattctattttatgaatatgctacagtttttttttttttaagacagtgtctcacactctctcaggccagagtgcggtggcgtgatcacagctcactacagcttgaccgcctgggctcaggtgatcctcctacttcagcctctggggtagctgggactacaggcatgcgccaccaacacccagctaattttttttttttttttttgtagagatagggtctcactatgttgcccaggctgctctcaactcctgcgctgaagcaatctgcccatctcggcctcccaaagtgctggaattacagatgtgttccacagcgcccagcctgattatactatagtttatatgtcctattgttaataaaaatttggctgtttctgtctgttacaaacaatgaaaatataaacattcctatacctgtcttttggtgaacataggcatgcatttctttagcatctctacctgggatttggaattgctgaatcaggaggtatgcatataatcagttttggtatgtagatattgccaaagagttttccagaatgattgtaccaatttgcgctctcatcagttctttgagaattccatttactccatctccttgaaaatccttagtattagtctctttactgtagctcttctagtggctggatagaggtatcacattgttttaatttgcatttctttaataactaggcatgttgaacaccttttcatatgtttatgggccatttggttatgtttcataaaatacattagctttttacttttttttctattgggttgtctgatttcttattgtttggagttcctgtaggatgaaggatatgagtctctgttgaataaatgtgttgcaagtatctactttgtggcctgctttgattttcttaatggttctttcaagaaagcgagttctgagttgtgatttggtccagtttatcatgtttttccctcctgattagtgcttttgtgttcctttaaagtatcctcgactactttatggccatgtaggtaatctgctaagaatccttataaattctttactggtttttttactttcagatctaaagtctatttcagatggattgtaaactattgtgtgtggtggggtcaatttttatttttttcgtatggctatcaatcaacctggctcatgtatcaggaaaaaaatttctttactcagggtaatgcagtgtcacttttgttacaaatcaagtgaacgtatgtgtatgagtttgtttctagattctctaatctgattccttggcctattttcattatctttgtgccagtactatactattaatgactaagctttgcattgaggtttcatattgggcagtttaagtcgttcagctttgattttcttcctcaagattgcacaagagctgcatttattcaaacaggttcattttatttgttgttttatgttgtctcacttttatccagcatcccaatgttatttgacactgtcctaggttgtagaggtcacacaggctctgcctctgcctctgccccggaggagttttatgatcatgttttgggacttagaaatatccatgtgtgatttgggtatgctttgaggatctgtatgctcagatccattagaaatgggtaaaggcagaccagatctgacacccacacaagagaaagtgacagcctgatttctgatagtctagagactatcagacttctgcctgttacaaacaatgaaaatataaacagtgggaaggcaaacaatgtgatgaattgtggttttggttccttaggttgacaggaaagagttttttccttttgggcatgttagagcctagattttggatcctgatgtgagtgctgatgaaatccatttggatccattagatcctgagagcactgaatgtcaggagctgtggttgaaggaccagagcagggcttggccttcgcagtttagctctttaaaatgccatcctgattcaggttttccttgttgattggcttatgactcaatcaggagtgaagtgtggatttccctattgcttctctccccaacccccagaatgcctgtctcaataatttaggatagatggggcatggccagaatgagagaagcatccaaagtcatagaagctggtggagaaggccctggactacttttgtatgcaaagtagggagggccgtttctgatgcagcacaattagaattctgaatcagccaagggggccgcatctgggcagattgctgctgggacctggagtgaggccagtgccaacatatcatttaagttggctgtcaacagactgtgtaacattgggtgagtctcacctggcctttagtaagcagggatgactctccaggcatttacctatagacttccctcttagggagccatttctaatggtataagacccatttctaggcattccatcagtcatgcagctgaggggacttcttgaaatggtgtatatacttatatttatcttgtatgttaatgtctttttacttctacttttgatttttactttatgctcattgtcatttaaaataccgagttataataatcggatggtgaatcgtaccaactaagaaagtgatgtgatccataggttagtggctaaggagtgttgttttcctggtgttttctttatttttagtaagcattatggttggttagtctaccccaagtgtatgttgactccacaggctactggaattggggagttagtcttaaggttttctttgactgttactcctgggaaaaggcttatgagttttccttttgaaatactgacagctccttactgctaacagttgggacgtttgctctcttaaagcaggaaagaagcttctgtttctggggttgaaatgtgtttcccgaggttaagttgtccatttcccagggtgggagtgacttgggctacgagtcatgtcctctggttcacgctcactttgggcatgcactgtcttggtatcaggtctttgctttggaatggtcagataggatagattgcctgaaactgggtctgtggccttgtccttttgaaggagtccactgataaagaacaacaatgatcagcttgactggtggtagtgacgggagaaaggaaggggcaggatttctgttctcaatggctaacagattcattaaggggatggggtgggctattcccctaaaggctggtaatgcagagtggtcccatcagagctgcatagcatgaaatcaatcagagcttttcttgagctgtcacctgggcaagtacttagggctgatggagcggagaattaatcagggattctcaggagggtaatgctaagtcctctaatgggatgcttagcattggggcttggtgaagagatattggcttgttgatgggattctgttgacacggaagtgatttttgaaaacgagaaggagtaattatccactcctccctgctgaaattagagggaacctgttggcattggcaccaaggctcactggctgctgctgtcgttgtggcacatgttgcctcagttctcagcatcagcattcccattccctgagaattctgccctgtctctgacaatgacatactttctgtgcttccatctcttctgtggttgcctacaaaatccaggctgccaatcttcacttgtatttttctcaggccacttgttagcaaggttggctagtgtcttaaatggtaggaaaataataacacaacccactttacatatgcaaaagcaattaaccattattagtgtctgacattcctctcagctgcccacagcggtgagtcaggatcatcactattcattaggaattaattagactgtccttgatgatatcagtcatctacagagctaagaattcagcactgcctacatcctactgtctagtgagggtatagtgtatttgatattcccatagaatgtgcattctgtttggaaaatgactcctagattgaatctctgttaagtataggactttggacaacttatttaggtctctgaacctcacaaggtggggataatactaaagggggaagtgcagcgattaaataagatcctctaggcagaaactgctggcattatgcctgacacctagttctgggagaaggctgaatttggttttgaggtaccagttcactttggaagtaaagcaccttttttccccccagtctttttgttggaggggagcttttctcctatgagagaaatttggactttgactaagattacagtgaccttcaagccatcaaatgtttggttgagttgtccactataaataccattccaaccatgtgattctctttctagaaaccctgaagtggccctcacttctactgacttctctctcctcctgggctattagaaatcttttctcttagtgctcgtcccgttgccactgtctgtatgctgccctttgctcacctgctcactcaagtttgctttaccatttgtcacctcttcgaatttcttccttggccacctccttggcttctggtctttacaccctggctgctccgcctcccatatctctttccctgtagctgtcaccttttggtaattttcttctccagtcatcaaaagggaaagggaaatggagaaggtaaaatatattgtctcaaaagttaccattctcctcaaaataagatttactgatgataaaagattacctcttaaaggactcaaatcttatttgtccctctaacacagaaggactattagttgccaataattgtgattaagaaattggatcagccacccaactcttcgttatttacactgtgcctggcttacagtctgtctccttgtgtcctcctaatttggcgattttctctgggtctcttactactcattggaaccttggccagagtcaggaatgtgaaagtagctgaaacacttccttttcttgtggaaactttgggtgttaatctcagtcatgttgttatcaaagaatatttgtgttttctggttgttggttcattctttttttattttttatttattaatttttttgagacagagtcttgttctgtcactcagactggagtgcagtggcctgatcttggctcactgctatctctgcctcccaaattcaagtgattcgtctgtctcagcctcccaagtagctgggattacaggcgcctgccaccacgcctgactaatttttgtatttttagtagagacggagtttcactgtgttgatcaggctggtcttgaactcctgacctcaggtgatcctcccaccttggcctcccaaagtgctaggcattataggcgtgaactgccatgcctggaggttcattctttctttcattgactatttatatgtcaggtatggtactggcgctagggacagtgtaaatgttacatagtctctgccctcagggagggacactggggtgcaaatgggaggagcaatgacaaaccaactcactaagtttttgttttgtttttttttttttaattttttttttgtgatggagtctcactctgttgcccaggctggagtgcagtggcacaatcttggctcactgtgacctccgcctcctgggtttgagtaatcctcctgcctcagcctcctgagcagctggttataggcacctgtcatcacgcccagctagtttttttttttttttttttttttgaggtggagtatcactctgtcgcctaggctggagtgcagtggcgcaatctcagcttactgcaagctccacctcccaggttcacgccattctcccacctcagcctcctgagtagctgggactacaggcgcctgccaccacgcctggctaattttgtttttgtgtttttagtagagacggggtttcatcacgttagccaggatggtcttgatctcctgacctcgtgatctgcccgcctcggcctcccaaagtgctgggattacaggcgtgggccaccctacctggccatttttttaaatagaggcaaggtttcaccatgttggccaggctggtctcaaactcctgacctcaaatgatccacctgcctcagcctcccaaagtgctgggattagaggcctcacctcatcaagttctgttataggtaaagtctgtgggatcacatggtgaagaatgaataagttggcttcctccagggttaatggtggaaactgaggcatactggagctacaggtgctgtgtggtcctgtgttactcagggggacagagccctaacttcatcccagctcttctcctgtgacctcatagaatattgagacactggcaaaaacaagccataatgatttttttttttggtgatcgttgtgttcaatggcatttcattaattatgaggattagttaaaatcaacccttttacttaagagcctttaaataatctgaagatgggtgagaaactgacattatgagagacccacaggaattaagatgaagggagcagcaaattcctgtgtcctatctcatctcttgttggatagagttggtgtcagagcacctgcattggactgtcttatcccggtcatcccccaggcttttataataaaatgtgtattggttgaatacacatgtgatatctccactgtactcatgttactctttttgaagcctcagtaggttatagtgaaggaattacacatttagggaatgtggttgttgaggcagttaccaggatatttggattcatagagtttgtttttggagtttattggagtgtgtttgggaaaaagttcaggaataaaggatctttcagaaaagtgtttatgatggaaactgaggcacatgggggctacaaagtatacatatttttaaaagtatttccagctgggcgcggtggctcacgcctgtaatcccagcactttgggagtccaaggtgggcggattatgaggtcaggagttcgagaccagcctggccaacatggtgaaaccctgtctctactaaaaaatacaaaaattagctgagcgtggtggtgaatgcctgtaatcccagctacttggaaggctgaggcaggagaattgcttgaacctgggaggaggaggttgcagtgagctgagatcgtgccactgcactccagcctgggcaatagagtgagactccatctcaaaagcaaaaaaaattatctccaacaaagaagacttttctattctctttccttgaaggcattctgtgaaaacggttactaccctgaaccacactgcccataagaatctgaaagctgttgaacccgtgaataaattcagaattagatgagtgttagaaataaaggtgttgtcaccaatttacattttctatgcagtcatttgaagaccttgaagaagaggtcctttgtaaatcagtttcccaaagtaaaccattagaggaagctctctcatttcttcaccatccatcagaaggtacatagcattgtctagagaggatggacttggacataaatgaacatctgttcatagttttacagatgacagagcgccttcactcatgatcttactaaatctttatggcaacccagtagaatagagtccctccatcccttaatcatttttctgtattgggatgaaatttaatttgttatttgcatttaacaaatgaaaacctgagcttctgagagagttattaggttggcacaaaagtagttgcggtagtttgagttccatggcttaagggcgagtaggtttgaaacccacatctgttggagtcttcatatattcccctcccttcctctcctacctcttgccccagtactgtgttctttatttactgaatttagtgaaagctgactccttcacttaaaggatatatatgtatggggaggtaaagatatcagctctgcaggtacagacattgtgtgcataattcactcatttagattttaatattgattataatcaagtgcttgttgctatagattcagaatcgaggtaatttgcgtgacagttggccaattccacacatttttagggttctcctacagcgtggttgatactctcagagcctgtagatacaaggccagtttccaggatgaggtggagtttgagctggactggaaggaacctgggggatggagtgccaggatggttattttggtatccagtatggggagcatttctcagccagccccagtcttgtgttaggaaattctctgcccatatgtaaagtcttcatcttatgatggggttgtaaaaccagaggcctgtataactctgtggattatgtatctggtagtttctggggctgtgtcctggcccattgctagataggtaattccatcctgctgaagtctagttgacgaaaaatggcaagagtctggatacacagggtcttttcctttgcagtaaacgaataaaaacgtgagcatttaaaactggctgtacttactaagtggatagatcaattaatgctagttaatactacattcccccaaacaaccaggaagttgtgattcatacctatagaaataataagaagaggttgtctgcaagactctgctgcctgtctgctagaacagcctgccccttgtggagcagttcaagtagcagaaatttttttcttatattgagttggaatattctttggaacttcccaaagtggatctacatccttcccatgtgacagacagctcttcagaggttgtttagtgtcttagacactaagtgtgcagttatgattcagaagaatcttcccatctttgggctgtgggctgaggctaaaaatgatagaattcaataggaataaatacaaacgcctgcttttagctctgacaccagttgcacaaaagacagtattcagggacaacctctgaggggcaggagcttagaagtttaatggaaagtaagtccacctctgagtgccatttattgggggccactaaatgcattcatgagggtgggcagagggatgatggtttctagtctggaagacaattaggatcctggaggctgcttctgtcatacctaaatgggtatcttaggagagatttgctcccctgaaggatggggtatactctcaaggaatggatgtgtagatgttaaccaggagatgggttttcgcctgataaatggaagcatttcaacatgtcagtatgaagcggggtagtactgagaaggtaatgagttccctgctgttagtggtgttcaagggtagactgtgaccagttgagtagattttgaggggactttaagcactgaatgggggtggttggtgtgttttggtctggagactctggggcttacagttatatgagaacattcttttaaggcagtcgaaggtccctcagtcccttcagccatcccccactgtcctagatcccattccctgctatcctgactgagcactgggcataactactatttatcttaaagtgtggctcctcggagtaaattcatactgctgtgaactgcccagagctcaaggactggcctgtggttttgtgcatgtgtgttgttttggtttgtttttgtctttttttgttgttgtttggtgggtatggtggagaggaagaaggtgggctagccactgctcaaagaattcattcttattctcataatttatctaataaactactttggagcgagaacagactctagagtatagttcagtttgaatttcataagactcttagatcgtaacgaaaaagataatagtttgaattcaaaaggcccacaccgcaggcatagtcaagttcatctggaggtcagtcacaaaatgctttcttgtggcgtaatttataccttcacatttggcaattttgaaagtcctgtgtaaatgtacatatgttggtaagaggtagtaaatattttgctgacaagttctttgaatgatggctcagtagcagcatttaaaggcagacaatcagagggttttttgtgtattttttttttaaatccaggtgctgccaagtctacaaagctggaagggaagaagccaaaagtgcccactagttatagttataccattaattatataatattcatgtgcctcagagtttctgcacctggcatctgttgatatacacaggtgggggaggacaggggcacaggatacagttgggagagagcagggaggaagacagggtgcttgctgtcaggtaacggccctggaatatggagcagtccctggtgccaggtgtggccaccagcacctgcttccctcctgggtgtccgtgttgtaatactgcctggatttgatggggtgagaaggggaggaactgtggccacatgaaaccctccctactcaggcccttggcctcctcttttcgatcaatcctttctctctcatttttgggaggcctttgaattaatgatcctataccttttcaacaaaggaatattgatatgttagtgtgccagacagcagggagtactggattagatcattttcacattgacgttatgccagtttgacatttgtttggaaagcttatccttttatgaccataggttatatacataatttaaggggaataaatctttcagagattttttttggttctgtgatcttcagtgctacagaaaaagaaatgaaatactcccccacagttttcatgtgatcaggaattcagcataggctataagacggagtgctccatgtcaatagagaatatttccacaggtgtgctaggcacttgtggtagatgttgcagggaagtcaggactggggacagcttggtccctacttcaaggttacagtctaggagctgagagtggcaaagtgacctgattctacagggtaaaagccccagagataaatgacataggtccaggtcagccagcattgctgtctcagtagaatgagtatgtgtgataccaaaataatcttcctccttccctccttgatcctgccaccatcttgcatcttgatgatctcatattgggatagtgacactaacagagtttccgagttatgatgccacttgccatggtgaagtggacattttaaaaaactttattttcttataaattacttgttctgctttggagatttgatgatcatttagcaaagtgcccctggtagatagtaggcactcagtaaatggttttcgtatgaatcactgcaaacttgcaactccgagtgagtaccattcttccatataaatttcctctcgtctgtgaagattatccagcttctgcccaccattgcatttctgtgtgggtgcttaatatgatacttagataataaagccacttggatctcaaaattccatattctccagtaggagttatccaagcaaagctggtgactgaaccaaaatcaccactaaagaacttaaccgtgtaacccaaaaccatgtgtatccccaaaaagactgaaataataaaatgaaatgaaaaaagctggtgactgaagaacttgcactagagctagcaagagcattatgtttgtggttaccacatccttatactgtttttggttttctcttctaggtttattttcttgaaaaggctccaggcttcggcttggaaaatcccaccgccaaaattgagcccagcagctggagcggcagtgagagccctgccgaaaacatggaaaggatgagtgactctgcagataagccaattgacaatgatgcagaaggggtctggagccccgacatcgagcaaagctttcaggaggccctggctatctatccaccatgtgggaggaggaaaatcatcttatcagacgaaggcaaaatgtatggtaagtggcctggaacactcctttgaaatactacaacctgcagttgtggtaggggatagattgtagctggtcttccagcaagagctgttcattgtatggggttgagtgatatttgtagaattttagtgggtcatccaaaggactcaccctaaactaaaaaggagagtcaataaaggacctttgggaaaaagaaaaggacccctgggcttttcttcttctacatgtgtagtggcattacatcagaagctccaggggtccaggcaggaacataaatagttgcagtggcatgtacagacaccagatggtggggaggaggtcttctgaacacagaccagatcacaaggaaatactgccacttacctctaggtaactgatgtcactaggaatgggggcctggtgctcccgaatcccttgattgcccccagcccccttgaggaagagccagcattctagatgcttatatgaaatctactctttttaaaaagccagcacttttttttttttaaaacaactctgtacaggccagagaaaacatgtatgtgcatgggcttgatcagcctctgaaccaccaatttgctactttgctgccagtttgcagttgaatggtcagacaaggcattagcaccctgggtcactgtcaccatctccccttctttgggggttgccttgaaaggcattctgaaggaaacaccaagagtgccaaggagagagagacctgttaactatttggctctggatgcctagggcagcagcaaggatccacctgccggtctggggcttgcttgctgggtttgggcaccccctaacttccttccataaatgcttccagctgcagacctgtactttttggctgcttaccttttgggaagcagatggcaggtgtagttgcttgaacattctgcttgtctaattgagcacgttgagttgacagagttcgcactgtagctgagtctaaaaagatgcaaacacaaataacctaacctcaaagagaactggctcagtattttacctgaggttgttaacttctcatgggagtgattatttctgaacaattggaagtcttttttgtaataaggtgttgtacctttaatactgcacttcctctgtcaggagccgtaggagactgtggcttcaactagcacacactgctaaggagaaagcagatggtggtgcagctgccaccagctgtgcccccaccccgccctcctcctctccaacttggatgatgtaatggaaacaaggaaaattttgctttctgcagcattggagtctctcagcctgtcacacacaggggagaaggagacccaggccttcagcatttgttttatgctcccataatatcctttgtagccagggaagcctcttcgtatctggtgaaatggactggggatgaaatatctcagctactatgggaagagtgtttcagggccctagattttctctatgtctggatctttcctggtctcttcatctcagcctggctatttgctttgtgggtcttattttcatacctgaaaatgcagctccctttcttaaaggcagagaaaagcattttaatctttgaagcttctttgaagatgattttattatgggtagtgaagggtagccttgggacactaccttgtacaactctcatttgcttacccaaaaatggtttcaatttaaaacaaaggcatagtattagaaatcccaatggggcataaccactgcacttcatttcccacaggaaatactgggaaaggtcctgtcctttcaggaataaggttttggggctgagaacataattcaaagcacaagttaacttttgtcaactccaattttgtattgttctccattgagattttagtttatagacagcagccctggtggatttaaccaatttgcctataattcaattatataaatatttttatgtgaaaataattgtataagagctcttgttggtaattgggtctcagaggcagcaggctaagaagaacaaagagaagctttggatgtgagtagctgtatcaacaatgaacttgaagattttacccttggtcttggtctcagttttcttctgtgtaaaataagatagtaaagtagttgatgatgtccatgggtcctttggactcttccattttgtgatgctatggttttgtttcttgtcactgagcaagagggtcagttttgacaaatgtggtgctgcttgggagcctagcctgtcttgggtacccagtgtaacttaaattctgagtgcttcctgagtgtgcatggttttgatgtatggattcttttctccttaactcagcagcacatttagtgaccgtgttggtggctaacctgatttaaaatgggacagtccttttgagcaagcagcattaggaattttaactcatttggaagaacaatcttactggttgtgggtttttcagcaagtggagtatacagcctgggagagtgtgtatcctaattggggctcagaagatgcgttggatgcactgtcctgcagccacccccacctccaggcagctgccttggggaggaaacatcccccctgaactccctgtctctggtcgacatgaggagctttgcttctactgctaccttggaagggaaccatggtggttaatgggactattggtggtggagactggaccccttaagaggaactgccctggttgactgggagctgcctctgacctgcctgtgacttggaggatgagagacagttgacttgggagtctccctgttgaggccccagccactcgagaactgaatcatatgagcagtgtggggccagagctactgtcctgggcttttggcctgttccccatcttaccatacatgaattgggacacaaaccagaccaggagtcagggtttcttaaggccttaaagagcatactttttttctaagggttctgaaaatgaaaacatttaaagcatttttgaattccatgcagtaaaataaaaacggtttagtcttttagtgaaataccgagtgttttttacttgaaagggttatggttattccaatatttcagagcatttgtagagtgctttgtgatgtcactaatcctgagccattggagaaacaaggtcaagtgatttattttggtaatgaaattttgttcgtggttggcagtagggcaaatgcagtcttataaaggagaaaaaaggacaactctatgatgaggtttttggccaccggaggaggtggcttcattcgctttctgctaacttggtctttggggagctgagactttatgtgtttgggctgtgtgtggataggtggcttctgctgtgggcacccttatgtgtaggcagtcgtttttatggattactagaaggggtacgagatgtcctttgacctggttcctaagggcatgtgtgctcagtccctggggctctctctttctctgtgcttgtctttttcattttttgtttttacacagctacgtgtgactcttttcctggtagatcatgggagaggagatagatagcaggaggacaagatgagagggaagttcttgatcaacaaacttatccagaattggatttcagaggagcaggctgtagtttaaaacaaaacaaaatagatagcaaaccacgggaacacctgaatttgttacttttgcaactgaaaatcccagtcagatagaccccataatcaaatagggcagggacaggaactaaccttcactggttgcttgctgtagaggcagagaagtatataacacttaacagtctggactctataaataatatgaatcctggccctgcacttctagatatcagatttttatcgagttaccttacttctctgtctcaatttcctcaactgaaaaggaggattagatagatcttactgtgtaggattattagaagaattaaatgaactaattgttatctggaacaccaccaccccctgcaatgtttgaactgtatctagcatatagtgagaggtatgtaagtgcttatgaactgaaaacaaagaagtgctctctgccaagcactatgctaaaggctccacatacaattctgtctaatgctcttaacaatgctttgaagctggtattatcatcctcactgtatagacaggaagctgagtctgagaggggtaaaatggcttgcacatggccaatataaatggtatagctagcaggtttcaaattcagggctgtctgactctacatcttggacttttctactgagcttttgttccttccttggtagagaccgttatacataaatccagtgaatcagtattgagccccagcgcagctgtattccagccctgtgctaggggttgtcagggatactgtagtgaaccagacagacatggtccctgccctcatggagctatctcaagttcatttgcaggaaactgacctgaggtcaggactgtgtgccaaagctttctgagaagtttgagagccctttgaagatggtcaccttccacttagccttttgaagcctattcttggctaccaaggtcgagggcacctggcctgttgctggcaggaagaaatcatctcaaataacatagcggagaggatcccagatcacaagcctggcctcggtagtggccaggaggatgtctggaagattctagtgccctaggatcctataagcagtctgggcagagctgttgcttccagacatcttcctggccactattgactttctccttttgcaagcagatgtcttcaggatccttgcttaggtcagctccaaggaaggaccctttcttactgggataccaggactactggtcagccccagagacctgaattgtgaggaccagcgaagatgagggggagggtgtctctagtcagtcctcccccgctgctgacctgtgccctgcccaccaggacagcataggacttaggattgcatctttctttacttcataggagcagaagtcagaagaggaaagagggctttttaaatgaggtagtggcagaactgacaagggggtatcagaatgagagtgcacacaagtaagtgggagtatgtattgattagtcagtacagcaaagagactgaaacctgtggtcgctacactcctctggatgcagaggactggtcaaaaaattgcagaatcatccttttataagatagtatgttctcataacagctctttgaggatcagggaggtaggctttgtcagtggaggccccagagccctggtgtggaaatggccatagactcccagccctggagggtctccaggccttggcaaagtgttcttctcggagctccatatgaacatcatgtggcatctttgatttcctctttcggacctctgattcagggtgttatttcaagttaattggttagaagcgtgaaacaaacagctatgtggtagaacaggctagaagctcccaaagccgggaccccaccgatcacaggatgtatttcaaggcctggaatatagaaggtgtcagtaatgtttgctgaataaatgcttatgggagatgaattatggttcaaacagagaacgtaggtgattaagcctgtaagccctgagggcctctcctgtgggaggaagtggctagaaaaaaagaaggaaaaaaagaggaagatgtttatttaatgatcttagattgagaaagaagaagccctattttttatgttggcaaatgttagttgaagagatagaaaagatttctgcacaaaatatggacaatagcagagcaagggttaattctggaatgctcagaacagatgagtaatggggaatttttgaaatagtttggttcctgtgagaatagcagggccagcgtcatcagcattttgattgggaagcttaatgtgtggggggtatgcaaaagtgtatgcacaaggtgtgagctcatgtgcaatccgggtacaaagtagctaattaaagatggctcaagaattggtcataagggaggtagaaggaaaagaacatgaaagtattaccaagttatgctttccaacagcttttctgtggcagtggatgagccctgggattcaggaagatgtggattcataaatcatttattgagggcctgcactgtgctttgaatgtgatggggacaacagacataaaataacttaaaaagctgacctgtgtgagcagttaacataccaggcactttcccattgctataggatgtgcgatcttgattattcctcaaaaacaacccaataatataggtactgtaattatgcccattttgctgctgaggaaagtgaggtccagcaaggtcaagttatttgcttgaggtcacatagtaaataagctgtggagctgacatttacaaccaagccagtcaatacaaatgactccaatattgatatggaaggaagtatattctgtactagagatatacctggtttagtagtggagcagcacaaagtgtgatcatttatgattggggaattgacttgtatatgtttgagaatgaaagagagcatgagacagacagacttagctaactttgaactttgggaaaaagatcatgtagcggtttttaaacttattttggattatagattattttggatttccaccccttggagaatctgtggaaagctatggaccctttcccccagaaaaatcacatatttgtatgtagttttaggactgttgcatgtaacttcaggcaagttctggagcacaggttcagacttgccccattggggaaaaggagaagggaagggcattctggctgaaggaacatgtgataaaggcatggaggcctggaagggcacagccctgatgtgcttagaaatgaaaatatctcctgggggaggggtacaggagccagcattgtgtcgttgcgggtccgagtgccatgccaaggtgcctggcactcatcctgggggcagacggaagccattacatttttttcaggagagatgacatgtctcagcctgtgtttgacaaaactagatctgaaggcgtgaagacaagttagatggctgttacagtagtccggtaggagagcctgaggcctgcactaggatgcaggcggtgctggtaggaggagggagtttcagagataaaaccaacagaattggctgatgggatgagatttgtgaaaaagaaggagtttgatttcaggttccacttctggctcattgggaggatggtggtactgttaagcgagatggggagtggaggcaggagaagcaggtttgtagagaagagaggaatgaggagttaagttttgtcatatgcttgatgtactggatgaccatccagatggagatgacctgtaaggagttggaaattcctgcctagagctcagtcagattgaagttgcaggggtagtttggagcctcatcatcagagaagtgatctgataatggcctgtgatgcccaggctcacaatttatcaagggcaaaactggcatggatattaaatggaatgtctgtagcactgggagagtaaagtgattgcctttttcagaaaagggaagacagattagtggttcccaaggctcactatcaacagaaacactcaaagagcttaaaagacaaaacaactactgactaagaatatctgggagtatggcctgggaaactgtatttctaaatgctccctgagtcatttgggtgatcagccaggtttgagagctgctgggctagctgcagtctgggtccaagaagacaggaccacatttttagagtgataaacaagtgagcagagaatgaggctaacatttgaagcagtctttatgaggttttggtgcaggaaatgaatgacgctagtttcattcttcagtttatgttcactttctacctagagggaacattaccatgaccaggtcttcagagagtttgaccatgcatggaaggagacacggtatcctgaagggcagaacaaattaagagaagactttttctaggacaggggagacacttggccatttggttagttggggaaaagaatttatgagttgaggatgtatttgatggagcaaaacccagaagagactttaaagggaaaggagcctcttttcctctgatgcagaatggaggaggatggggggagggccgagagggggcctcattgcttctctcaaatgaaggttattgtgggcttttgaaaagtagagcaagcttagtacagatgtacagtatagatgttatcattgacagacagggatgattaaaagaactactcagcagtgagtattagcagagagtattactttcttttttatttgaaatttttgttgagatactgtagattcacatgcaatggtaagaaataatacccaaagggatcctttatgcatgttgcccatttccccccaatatggttacattttgcaaaactggagtgtaatattgcaacaagcgggatattggcatccacacaacccagtgatacgactcagattttcccagttttacttgaactcgtttgtgtgtgcgtactaagttgtgtacactacttgttgtgtgttagtcttgtgcaggttcatgtctccaccgccacaatcagaatacagaacagctccaacaccacaggacccgggttgcccttctccctaactgctggcaaccaccgatctgtcctctgtttataaaattttgtcatttcaaacatgttatataaatggaatcagactacatgaaccttttgggattggctttttttcaactcagcttaattcccgggagattcatccaggttgtgtgtatcaagtttgttcctttttatcattgagtagtattctgtggtgtgtatgtaccacagtttgtttaaccattctgctgttcaagggcatctgggctgattccagtgttcaggcatttcaaatccactgtgaacatacacgtataggtctttgtatgaaactaagtattcacttacatgggataaatgcccacgagtgtcatttgctggctcatatggtatttgtacattcagtatttttttcttttaaactgcccaagtgttttccagagtagttgtaccactttacattctcacctgcaatctagtttctctgcatcctcaccagcatttggtgtcatcaccattgtttattttcattgtgataggtgtgtaattgatacctcatgtggttttaatttgcatttccttaaagactaacgatgttgaacatcttttcatgtgcttatttgccatctgtatatcctcttcagtgaaatgtctgttcatgtcttttgttcgttttctaattggagggtttatgttgttactgttgtgtttttggaattcttttttctagatacaactcccttttttggatatgtggtttgcaaagattttctccttatctgtagcttatcttttcatcttttctcatgggcaaagcaaaagaacttttagcagagcaaaacttttaacagcgaaagttttaattttgatgaggtcttatttattagtttttccttttgtgagtcatgcttttggtgttgagtctgagaactcattgcctagccctaggtcctgaaaattttctcctgtgtcttgttctaagagtttatagttgtatgttttaaatgtaggtctgtgatgcatattacttgtgagggaacccattgtcatgattctgtgattttctttacaagaaggttattgggtttattcatattttgacagttgttatggcttggtcgtaggagtctaagttgggaaagtgacagggtgaagctggaggggctggtaggccatgaggcatgctgttcagaggctctggtgcatgtaggagaggaggcaggacaggaggctctggtcatgcatgggagaggcagcactgagattagagatggaaagatttcaggggatgagtttcgaggtgtggccacaaatacggtcaactgatgtgaatgtgggcgatggacatgggagatgaggaagcaaggcactgtgaagctcatccacagtgacttgattaatcacttagatgctgaacttcacagtggtaaagtgtgcatttttaaagaaggtaccgaagtaaaccaggtgctgagggatttctttgaggagtacatggccccatggatatgcatggaaagatgttgatagagtgtaagtggtgtctaaaagcagagagcagaacagtgggacaggaggtatatcaaggtcagaagaaaatgccaacatttctaccttcctcttcccaaattcttcagttggtccaaaactatacctgtttgtgatgtatagttatagttacatgggccagccatacaagctctttgagccttgttgccatcaccagtagaatggggctggtaagtcagcatgtttctttctacctctcagcaatgttgagagaaaatgtaattatgtatgaagaagttctttgaattcttaaaattaatggtttaattaatttaaacagaaaaccaaatatcgcatgttctcacttgtaagagagagctaaataaggagaacacatggacaccgacacatagatgagagcaatagacacggggcctgatggagggtaggaggagggagaggattgggaaaaataacgaatgggtaccaggcttaatacctgggcaacaaaataatctgtacaacaaactcccatcacacgactttacccatataacaaacctgcacatgtacccctgaacttaaaagtcaaaaaaaaggaagttatatcatattttaaaaaagtaatgcttttagaagttaagcctgttcaggacttgttggaaaagtaggaaagaacactatggaaccatcaaacagagttaagcatccctagttcagttagagggctgtgtggttaagggagaaattgagctgagccctcctttcttagggtttctgtcaaagaacagggggacggggagctccagggcagacttttagagatcagagccacaaatgatggaagggactgttgctgggcagaggttcatcaggcctccctcacagtggccctccgcagcatcagagggaagtagagagtgggtggacatttgtgttcttagcagcacaggcctggattcaacgatgtttctctgttctcatccccaccggacccccacctctagagcttcagttcctcactcatctgctgctgtggccttccattttacgtgaaagcgtgtctctgatttattattgttgttatgtattttatcccgttccagtgatagtatgtgtttaaagtggtctttttaaaataaatgatcattattgatggtagtgttctgttggtctctcactaaaggtgctattttagagactgttcaacttgataaatctaaatatagaagtgtgttcgttgggaggatcctagaaaaaaatctggaggaatttacagtctactaatagtggttgccacagggagatgggattataggagactcggtttctattatgtttctgtattaatgggattttttcaatcgcaaacatatgttacttttggaatcagaagaaaaaagataattgtgtcaagtttattttttcctctggttctgagtaaaggatattcattaaagaaaaatgtggaaaatagcaagagttagaaagcaaaccatattgcctgggtccactgtggtgtggtgtttactggcggcggggggttcacccggggaagttacggcagggtcacagtgggcagggaggggtgcaggggtgtttggagagcatctctcccttccacttgtgggtggctgaggtatcaagctcaggggacaggtggtcagagagtggcagtgctagggcgggggaggagaacagggcattcttattataggttttaggacattggtccgggacttcaacaggtgccctggccacttgagtgtgtcagtcagctggcccagctcagagacgcataattccaacattcatgtattatggtaagatggtgatgggagagagaaaggaagacgtccacatccattccttgaatgtgcataggctcacaccgcaaatagaatgaacgggatccacatctctgctgagtatttttcgttcagcttgtacatgagagtagacgtggtttattcctagagggttgggggcttctctctgccagtaatgtttttgatggccatgttatcctttgtaatagattcctggcaagtaatcttgtatttgtgctgcctttggacagaggtgggtagattttagagaacaaaaacactgggtactttacagtgtgctacagattctcatttaattataatttttaattataataaaataaacttgcaatccgaatgtgtttgatcggcttgatagtgacctgctatgcataccctgcagataattctgtctgcctaccttccctttcctcatgtttcagttctagctaaataataaaatcaaatttgttcttcaaagcccatttggatatttattattattattattattattattattattattattattatcattattattatttttgagatggagttttgcttttgttgcccaggctggagtgcaatggcaccatctcactgcaacctccacctcccgggttcaagtgattctcctgcctcagcctccgcagtggctgggattacaggcatgcaccaccatgctcggctaattttgtattttagtagagatggggtttcactgtgttggccaggctggtctctaactcccgacctcaggtgatcctcctgccttggactcccaaagtgctaggattacaggcgtgaaccaccgcacccagccttatttttttttaaagtttgttcttgtgtcaatgtactctcctctccctcttagccttttagaacacagtcttaaaggtgtgatagcgaaacctgctgcccaggatgtttaatttgtttaaaaaattttttctttattgcattgtagtccccccgcctttgggggaaatatttgtcaccccaaagttttacagcttctggggtaatatttaacatatgttaataagctgagtttttttggccatttacaaaggtcccaattgctcactgtatgcctaccctcttccctgggtctgcctctgtgctctgtgacttgcccgatattttgttgagacgggctttggcaactgtctcttagatgaatggttctattacaaacacagtagcttccatgaccgcttagaagagattgttgtttatgacagcttttattgagagaggtttggtgcatgataatgtcctgataaggacatttgtacctataaagtagccacagccttaaacatatttgattgtcagtaaaatattggggatgatgacatgccagatgtgaggtatcggattgcatgtttattcaactgttactgcaatctctgtactaagatgtgcccttgtattttctgtctcacagcaacacacaaaatgcaatggtgatatgatcctgattatgaaagatgctatttaggttacttggattgtaaaccatgtgtattaggaagcattctctcagtccccatatgtccttagacagcaaccacaaacagttgttaggtgaagggaattgtcaagtgggttgaacatacgcattgtgatagggaccttttgaaatgtatgaatcttagtaaggcctggactgaccagggcaggtgatgtgacagtcaaaataataataatgaatatttgttcttgcaatgaatttttgcaataatgaatatttatgcttgcaatgtgccaggtactgttctgaacacttagcattaacccatttaaaccttctaacaagtcttatgaatagctactattatcttacattacagatgaggaaaccatggcctagagaggtttagtaagttgccctgggtcagattctcatttgattgtaatcgttgattatatttaatcatgaaagtagtggttaagagctcaggctctggggttcctatcctggctccagtcctggatgttcttactgctgcctggctagggtggaagagagttttggttccaggtaaacaatagaaaagaaagaatgggctttcctggtgtctgggataccgttcatcctgttttttgctttgtaaactcctactggtcgttaaaaaacactccatcctctctgaagccttccttaatctccacaggcagagctaatttttccctctcttatgtttccaaagcacatgacttttaactgtccattaaaggcctcatcagactctttttttttttttttttttttaaactgtagtaagcactgtcaggctctgtttctgtgggtctgtacccactgagaactcttcaagggccagtgctgctcagcctccagtatggtccctggcacacattaggcccccaaaaaatgtttgaattagtgaaagttgttggtaataaaattccatcttgtgcctctcaagagttttctttcctacattcttggcatttttatgacatttacaacattttaatgaaacaacaagggcaagaattttgatttcataaataagaaactgaagcacagagaccaggatgttttctgttagattgttttatcttgagaaaccacctggtgaaacaaaacttaggagaattaagtcatttgcaagaccccactcccctgtttacacttttccatcataaccatattgatcttacacctgagatgttgtgaactagagtaatttgttcacagtagtaaagcataatcctagaaaagttagtctttgaccatttcttttccctggtgtatactggacataatatgtttgtaagcttatttgagatgtttctaagtggtaggggtgtgtgtgtgtgtaaatgttacttttttcagatcgactgtgggtttagttttagttgtctgaaaatcacttccaccactgattattctaagatgacattgttgatcttgaatgatacagttaccgggagcaatgaactaagtaaactctcactgtagagttcagaagggtgttgagttagggtgagtttccaggatacaaaatctggttagctcattggctgatttataaggggcttattagcctatgggagtaagttcttcattggtggtggtaaagggcacagggttgggaataagggttgttggggtttaaatcctggctttgccacttcactggctgtgtaaccatgactaatattgctaaacctccatatcctcatctggtcaatgggaccaatattggcaccccatctcacaacttcagtgtgaagattaaattagataatacattaaaatacttagaatacccagttcattctttgagagcactattaccctgacagctaaatcagacaaagatatcatgagaaaataactaatatcccttatgaatatagatataaaactcctccacaaaatatgaacccattcagcaacatataaaaaggttaatatacagtgaccaagtgggatttatcccaggaatgcaaggtcagtttaacatctgaaaatcaattaacgtaacacaccatatcaatagagtgaagaaaaaaccacatttttatctcaacagatacagaaaaaggatttcacaaaatccttcatgatgtaaataatcagcaaactaggattagaagagagcctctcacctgctaaagggcatctgtgaaaaatctaagcaaatgtatgtaatagtaaaagactgaatgctttccttctaagatcaggagcgagacaaggatgtctgcttttactccttcccttcaatattatactggagtaagagcaattgtacaaggaaatgaaataaaaattactcagattgggaagggagaagtcaaactatactgtctctatttgatcttgtatgtagctaaaaaagtaaaacaacactattaaagttcataaacaattgtagcaaggtttctggatacaagataaatacataaaaatataaaactcaattgtaaattttttttttttttttttgagatggagtttcgctcttgtcacctaggctggactgcagtggtgcgatcttggctcactacaacctccgcctcccaggttcaagcgattctcctggctcagcctcccgagtaactgggattacaggtgcctgccaccatacccagctaagttttgtatttttagtagagacatggtttcaccacattggccaggctggtctcgaactcctgacctcaggtgatgcgcctgcctcggtctcccaaagtgccaggattacaggtgtgagccactgtgcctgccactcgattgtatttctgtacttaacagcaaacaacctgaaaatgaaataaagcaattttattcatcatagtgtgaaaaagaacaacatacacaggaataaatgtgacaaaagagcaaaaaacatttacctccaaaactacaaaatattgtttaaataaattaaataaccgaataaattggaagacattctgtgttcatgggttggaagacttaacattgctaagacagcagtacctacaaattgatctacagattcagtgaaatccttatcagaatcccaggatcccatgacttctttgacaagttgattctaaaatttatatggaaattcaagacccagaatagccaaaacaatcttgaaaaagaagaacaaagttggaggactcacactttgtgatttcaaaacttactacagagctacagtctgaatcaagacagtgtggtactgggataaattagacatatcatcaatggagtagaatcacaagtccagaaataaacccttatatttattgtcaattgattttcaacagatataccaagacaattcaataggaaataatagacttttcaacaaatgatgctgagacatgcgaagagtgaagtcggatcccttcctcacatatcatatatcataattaactagaaaatgatcatagatgtaaaagctatgattatgaaactccagaaggaaatacaggaatgagtctttctgactttggattaggcaaagccttagatgtgacaacaaaagtataagtggtaaagtaaaaatagagaaaattcatgaaaattaaaaaactttcctgcttcaaaggatatcatcaagaaaatgaaaaggcaatccagagaacaggagaagatattttcaaatcataaatctagtaagcaacttgtatctagaatatataaaggacttttgccattaataaaaagataactatccagttaaagaatggacagaggatctgactggacctttccttaaaaaagacatacgttgaaaaacacaccaaagatgctcaaaaccattagctagcagggaaatgcaaattaaaactacactgcgatatcactttatatctcttaggatggctatcattaaaaaaaaaaaaacagacaataacaagtgttagggaggatgtagagaaatgggaaccctcacaggtcactggtgggtttataaagatggcataaccactctggaaacagtctggaagttctttaaaagactcaccatagagttattataggacccaaaagaaatgaaaacagatgtccatacaaacacttgtacattaggggtaggtgtgttggctcccagcactttgagaggcctaggtgggcagatcgtgtgagtctaggagttagaatccagcctgggcaacatggtgaaacctcgtctgtacaaaaaaaaaaaaaaaaaaaagaaagaaaaaaagaaaaagaaaaaaaaaattagccaagcgtggtagtgcacacctgtagcccctgctactcagctggctgaggtgggaggatcacctgagcctgggaggtggaggttgcagtgagcagagatctccccacggcactccagcctgtctcaaaaaacaaaacaaacttgtacatggatatttatagcagcattatttctaataatcagaaagtggaaacaacccaaatgtttatcagctgatgactgcgtaaataaaatgtggtaatagctatacaatggaatattatttggcaataaaaaggaatgaagtcttaatatgtaccacaatatggatgacacttgaaaactgtgctaaatgaaaagaagattcatgaaagaccacatattgtacgattccatttatacatggaatcatatgaatcatacgaaatgcccggaataggtcagtctacagaagcaggaagcagattagtggttacctgagactggaggatttgagagaaaatagggagtaactgcaaatgggtatggagttctttctggggtgattaagatgttctaaaactagttacggtaatgcttacacaactctgtgaatgtagtaaaaacttgaattgtacacttaaaatgggtgagctgtatgaaatatgaattatatcacaataaaggtagtatcagtgtatatgctcagcatcatgcttggccttgataaattggtaaatgttagctaccaatgtaatagtaactctctgacttcatgtgcagagcacgtttatagtagcaaagatggaaagaaaggaaaatgctgagagagtagatgaacatacaagttaactcagataccaggtgagggagaaggtgactgaatctgtggcagccgtatggtaggagctgagtgctgcttttggagaaggtgaatgaagttatgtggtgcaagagcctgataccctaaaagtgtctagtaaacctgaatgtagttacccttaaaatgtggttgaacttgggtctggggatccagatgtcactaaacagtatcttcttcacaaaagagtaatcaccgtcagtgtgataaaagccagagtttttgtgtctagaagtcactaaaccaggtaagggtttgtgtgtgtgtgtgtgtgtgtgtgtgtgtgtgtgtgcgcgcactttctttttaaatcactgtatgacaaaggccagagttttagtttttgtgccttttttttttttttttttttaaggcagtgtctgggggaacttatcttcccacagtcagcccatggctgaccagctttgatttttgcagggtgtctttgggcctgaatgtttgagcctccctacaggagatggctagagcctagccctcatgctctggaagttagttctggtaaaagctttgcagttggcgctgtggatgccctgtgctacttaacagtggttcctcctttagaacttggaagacacgtgccaatagggaggaaggttctctgctaagatgcatttatttgtgaacacctctcacagtgtttttttcaaggatatacctgtggagggaatttcccatttcagttttgggggaaacctggtgagttgcttctcagatgtttaggtcacacactgacactcaaggtcgaatggctactgcgtggtggagctgtgattccaagaaaccttccatgtctgattgctaagacagctcacagtcttaaccactaggctgaattttccctcagggatggacaaagtggaagagagagaaagctgaaggcagagagatgtgaaaatacagtgttttcaggagtagtaaggaggctggtaagcatgtgggatgtctagaagggtggatggagtgtggggtggcttgtaagctgagaggttacgggagtgaagtgccaggcaaggatgttcgaacagtaagattagaggttctcaacttttctgtgtatgcagcatatacacaggaaggggggatgggagcccttgtttttaggatattcaacaagtgtttgaggagaattattctggaggctctatctcccataaggaggctgacactacaacacttctggtaggagatgaggagggcttgaactaggtcagaggttatgggagtgacaaggaggggatggatgggaaggacattttacatcagtatattagagattaggcatttagattaggtgtattagagatgagagggctctgtagggttttctgatgagggagaagatgaagatttttcatctgcatggatggcagtgccatttatagacacagttgtacagcaggggagacaagttgtaagggccagagttggggtaatgagttttgagttgtatggagtttgcagtgctttggggcacttcatggggagggcgccagcaggcactgggcaattcagcattctggatttgagaacagtttggaaaacatcatcacagggtttggagttgagaccctggaagtggataagcttgtctaggagacagagggaaaggacagaaaggaagaaaggctaggatagaatccattggaagcattaagagtcattgtcttgagtaagcatcttccatgtcatatgaaaccttacagatgcaggagcaggggagtctgaattcacgtatgtttactaagtgtgctgaagtatttgtctcctggtggtgtgttgatggaagcagatgattttcttgcaagttccaggggtgctgatgtcttggcatgttcctttctgtggccccctagggtgagttaatgggtcagcccaggatcctagttcctccttccctttccttaagtcaaagctggcctacgctccatgtgtgatctccttcttcccagcctccctgggagtgttgctgagctccgtttggagtttcagttgcaaggctttagccacccatgttaactgtagctcctatcgcttgagaagtgcagggtgaggggatcctggagaatcagctcccttttgaaatctgctccagcttgctctcttggggtcagcatgagtgtggagaagactggagaaaacccagagatggtaggcatgacctgccagatgcagcaagccctgccctctctctgtgtcagatcaaagactgactcttcagtcatttgacaccctaatgtgaggatgtttctgagccagggcccgggctcctggtggcctgtgcctgggagccgtggggaacgtgtgggcctgcatgtgctctgggtaagtgggggtaggagagtaggacaagtaacttcccagctgctctcttagacacagagctggagggatctggagagatcagcccagcctcctcagttttcagattggaagctgctgcccagagatgcccttttcccggttccagttctgagggcgagttggcccagcttggttgcagctgctcctgcatggctctttcctcctgtcccacaggtcctgggttccagggcacagaggttgttcccagtttggctggtgcctataatgaccatatcatttaatgttcagactacgacacttcagagaataaatgggggcaatgttaacaatgacaccaggaaaacagaaataaaccttaggcaaaccaggatatataatcttccttcctgtgccttcacttttggctcaattcttattcctatgccaggtgatattccctcatcccctaccgtcctggtcctatggcccacatgactttaggttccgggaacttacagatcttggtctttggaggtttggtctgtggatcttggtatctagaggttagaaacctcagggatctcccatgttggagggtccaggagatggaaaacctgggaataacatcgtgagcatatctctgacaatccatgactattcagaacctagatccaggaactttgattttcagtagctagggtgggtatgtcataatttactaacttagtttttttttccaacatacatttgtctcttgcacgtagcgtaagatggcatgctggtaacatacaaatcacgagagcagcatcctactctgcaaacctgtagccccagatagagctcagcaactcagccatgcaatcttctgccttggaggtggaggggagccaaggccctgggctcctgacaggtgtgtgacggagcagggcatagttacttgtctcccaggtgtccacagtcacagcacagggtgggaggggacatgagcagctgggctttgctgagaccaagccaaatggggatttaggcagagaaggtgttctttatttgagagtagagcaggtggagatgaatgctctgcctggtagctttctcggactgcactggcttgtttttctatctaaagctggcagaacccagaccaccatggatcctcaatgacaaaggccagaggagaggaaatggttcttcactgggtcttctggctgtgtccttggacctctgcctctcccagctgaccagagtggtctggatttgcccattctctcactggagttaggagtaggattgccggacctggcaaatagaagtacgggaggcccagttaaattggaattgcagataaacaaaaagttattttttagtatgagtatatcccatgccgtggttatattttatatagcaactctacttagtaaggactggcctgattttgcttacctctggggcatggtttcacagtgcctctttcattcagtagatgcttattgagtgccaaggatatgtcagatgccactctaggcactggggatattgcagtgagcaacaacagacaagagttggtgaactcatggagcttacattctagtgggggcgatagacaataaggaagatatgtaagtatgttaggtggtggaagtgataaagaggaaaataaagcagggaaggaagatagggaggattcaaacctgaagaagatgagggattgaggggataagccagacagacatttgcagaagagtcttctaggcagagagcaccacagacatcaaagctcgggcatgcctcatgtgtttgaggactggtgggcctccgtggcttgagtggagtcagcagggaagaggatccagcatggaggtcagagctcagatcttgcaaagcctcatagccctctgtaaggatatgggctttcactctgagcgggagtgtgatctgattaggttttgaaaggatcaccggctgctgggtagtgaaagactgaaagcaagcctgggcccaggtctctcaccgtatcctcaggggtgggccatgggatttgagacctgcatgccatttggaataaaagggcatgccacctggacacagcatcaccttgcaggatctttgatttctttttgcctttttcttcctcatttaagggatacattcctactcaaaaaagggaaggatatgttgcagttatctacctcttttttgctaaccattgtatgatgcgcctggtttaagggacagttccctaatggttcctattaagctttggagaaagagtagtggtgtggtgggtgtcacatacctggagctttagagccttctgagaagataattcggtaaaaatacatcattttttgattggtgttgaaggaagttgtttttcgttgcacagattaaatttaaattgttcatgagagctaaagagcttgaaagcatttctttgttttctgatctttaaaagtagagaagagtgagctggctatataatatagaactttctcggctttactttaccaaagcagtctgatttaaaaacttaaagccaacatatttcacatttatagtttaagattataaaaactaaatatgcatttaatttcataaatttatgtacttaatttcataaaattatgttttttggagaaaaatactgaggctataaaatcttggcttgtaagtaaataaaattattttaaatgtcagccagttttgatgatgagagctataattctaatgagtggcaaatattttctagatatctttgaaatgatactctggtttctcttcagactgtataaatctttcactttttttttttttttttgagatggagttttgctcttgtcgctcaggctggagtgcaatgactcagtctcagctcactgcaacctccgcctccagagttcgggtgattttcctgcttcagcttcctgagtagctgggaccaccacaggcactcgccaccatgcccagctaattttgtcttttttttttttttttggacggagtctcgttctgttactcaggctggagtgcagtggcgcgaccttggctcactgcaacctccgcctcctgggttcaagcaattcccctgtctcaccctctctagtagctgggactacagagctaccgtgcccagcctaattttgtatttttagtagtgacggggtttcaccatgttggccaggctggtcttgaactcctgacctcaggtgatccgcccgcctcggcctcccaaagtgctaggattacaggcatgagccaccgtgcctggccaaatcttccaccttttactaaatatctttgacaagccttttgacttagtatactggtaaattagctttggtaatattattaacagatttgtaaatttttggtatatccacaaaattcatttgaaaagaagcaaaaatgaaacctttaaaaaagtataatgtacacattccaaatatgaaaatgtactacttcaccagagttgtgaagcatgtaagacgtggtccatatttaagaacaaagcagactttttaaagggactgtcttgtacaacatcacgcccttgggcactgagaatatggaattacaggggtgatccctgtaaaaaatactgagtaaaatgcaatgtgtgctaaaatgcatctatatgtgtataatttaaaaggcaggcatttcagtttaaagttatttttagactagagattttagctgttttcttaagcagggattaaaaaccaatttaactgggggtttgggtttgttttgttttaagagatggggtttagagatggggcctggctgtgttgcccacgctggtctcaagcccctggcctcaagtgatcttcctgccttggcctcccaaagtgctgggattatagacctgagccactgcacctggcccaaaactgtcttaatgtaattgagactcttacacacataataaattgagatttttgtcatctcagtttggaattaacattgtaaaagtacatgcacttgagggttagatgtaacattactacctctagctgtatgactttgattttagtaagtctcctctgtaaaatggggacaatgaaacctaccccgaggactggttgtgccagttagatgaggtaacttgaattggttcctgagacagtacctgacacataagctctcagcacatagtgaccagtgtcattcttattggcattgcttttattatttatttttattatttttgctatattcataaaatgtatttgaaaagcaaaaatgaaatactttttaagaaagtacagtgacttgagtgagaccatacagtttatgttagctaatgatttccaaggccatccaagttcaagttttgagtgtgcaagccagcatcttttgaataccttgagagagggagcagacaagaaagagtttggctcagagaaggtaggcggtgggaacccagagtcctggtgagtgtgcctttacacccgacatctccctccagatggcttttcagccaggttgataattagcatcaacagatgcaagccgagagtctcctgggctgcatgtctccagcatggatatgtatggagagaagcatgcagcatgtggaagcccgagctcagttgggttgtacggctgggctcggctgggctcagctgggcctgtggaggcattgctccgagttgggcctgcctgagtctcagctggtacacagacactgccctacagcccaggacctgcccagggggctcagcgtaacagacccaccttggtggggggctgctgcttccagctgctttgcagcttctgtcaggccagggctgcttgagtccttgctctgctatttaaatctatcactcgttggtgacagctttctgcttaagcagtggcagcatgtatgctacaggtttcagctcattacctctgtagggctgttcctggactgctggctgggggaaaggccagccatacagactgaggcaccagccccaaactctgtattggatgttgctgagcctgggtggagagtggggccgtgctacctacagtgcctgctacctgtccttcagaggacctgtctgcagcagggccagagcctaaggttttgttttctcccagcctgatgggactgtgatacttggacatggacatcaaggagatgtgggctttgccactctgcttaagtgggcctgggcaagtcattttacctcttggggttcattttctctgttaataggtggtgaacttttcaagggtgattaacatgtcatctttatctccatatcccttggacacagtaggtactcagtaaatgatagcttaaatttgtaaaatgggaatgataggacccttatccctaatttgtactgggcagagacaatgaatataattctattaaactttgacaaatgggaataaagtgaaggaacccttgtatttccccaggttcatctcccatatccccagtattaaagaatctcagatgaatggggacttaaaaagttcatttgtgtatctttatttactgattcaaacttttactacctttgccagttgatctaaatagacatctctgtttaagcatcttctgtataaagaaggtgtataaatagtcaagaagcacatgaaaagatacttaacattagccattagggaaatgcaaattaaaaccccagtgagttaccacttcataccctcaggtgactatggtcagaaagacaataacaagtgttggtgaggggggtgaaaaatgggaagacttatgcattgctgatggtaatgtaaaatggtgcagcctctttggaaagcagcctggcagttcctcaaaatgttaaacgtagagcaattctatttctaggtatttacccaagagaaatgaaaacatatgtccacgcaaagacttgtatgcacatattcacattagcattatttttatatgtgcatctgaatgccctcatctccgttatggattggatgttaggacaccctatagaggagatttccagggatagctactcttgtgtttgtcttcttatatggggttcatgcataggaaatgccaagcttttggcctctctcatttataacttccagataacagcctaagtttggtctatgtttaaggaaattcaggagtcttttgcagggcttctgtagaaacctttatcaagtaaaagtatctggtgtttcccaggctttgctctcctgcattccttgtagtcagcagggaaggaccccttgttatgatgtgagttactctcaacatttcaggcttttgaagattaattcctgatctgagggaagattctggcagaactgggatatctctagaatgcactgataagggccttgtcagtttctggggtgggcaggtccttcttatagacggttttgtgactaagatacctgatcagtaggctttttttcctggctgtaactagtgatgggttgcaggtgggtgcgtgtggggatggaacatcttagagttgtctacaaagttaggcatcagagagcatgggtatcatggagagaactttttgattgagatttggggccaatttaagtcagttctctaatattttcttgcatttgagttataagctgttcctataagtaagtgataagggagtagtgggaaaatgcatccttaattaataggcagaataaagctaggtggccataggaaggccataaaaagcccaaggaagcagccctatttatttgtagaacataggtgaaatgtttattatatgcaaaacaagttaaaccaaaacatctaaatgcaccatagtatatgattacagaaacctgaaagatccaggagtaacaataacaaaggaacaaatgaactacacatgaacactaatcttccctggaactaaggataggtgggcacttagaagtgcttctgggatgggaggtcaggctgcagggtgatggacattgggcatgtgcttgggacactccttgaggcacatggagactatttgagatcacctctctgatcagaaagttgtttggtgagtaccaaaataagacaaaaatgagtaagtgtttttaagggagatttccctcaagctgtgtttggtagataactaataactctctgttctgggatattttctctctaggccactgtcattgacctctcaaatgcttgggggtgagaagggtaaagataatataaaaatatcaagaaaaggaaagtaaagggaaaatagtaaaaaaaaaaaaaaaaaaagtcctatatagtcctatgaagaaagttttgacctagatataaaaatataggcaagtctgaaatcttgttgcttttctctttagtttgccttcgttgatataagtctgtttattcatgtctgtatgctaaccgctgacacttaaatgtgaaattgttctcaggactctgctgcattgtcctactagtagaagtcctggttttagaacataaggtctggatatgtacagcctagcttttggatgagcaactctgtgcaagttccccaacctctgttcaacttcaaaataagggcagttatactgaacgcctgtatgggtgctatgaggattacatgagatatatagtaaagctagccaaaaaacattggttatgggccaggtcccaaaatgttacaaaatgagctgggcatggtgactcatacctgtaatcccagtggtttgggcagctgagacaagaggattgtttgatgccaagagtttgagaccagcctgggcaacatagcaagaccccatctctacaaaaaattaaaaaattagccgggaatgatggctcatgactgtagtcagctactcagaggctgaggcaggaggattgcttgagccaggagtttggggctgtagtatgccatgctcacacctgtatagccacctcattccagcttgggctgttagcgagaccttgtctctttaaaaaaacaaaacaaaacaaaaaagatttttgcatatcattgaaaatctatgaagtggttttttttttttaatttataaatatacgttattcaaccggttgcctatttttgagcaattaaagtgggttttccctactacaagtaactacagtgaatgtccttgagtgagatacataattatttctttaggaccaattccaagaagtggaatggcacagttaaaggatagatattttttttaagaactatgataatatttccaaataccaatgtctgctctactaaaaaagtagtgagaatggtcatttcctcagtctgtgatcagtgctggatatttaggtttttaaatatctttgctattttagaggtagaaaatatcttatagtttttttgatttttatttctggtaacagctgagcttaaataatggtatattttattatgtactgtgtttctttcatacaatattgtttaattttgttcagtttttcctttagagtattgtctgtcttattagtttgtaggacattgactgttttcacttttgttgcagatacctcaagtttggcattccattcattcaaaaaacccaccgtttttagataacccactgacatggtgaagtaaggacattgttaggaaaaaggcatgtaggatgtggaacatgaatcaaaagagaactatcctggatgatctctttgttgttaagcccagtgattgtctgagggagtgggattggtggggatctcactgagtgctgactgtccagaactcactttctcattgtgatctgactccagttgttcaaaagccgttccttactgggagaagtcagagcatgggatatcccttgagagtatatgtgaaatgcattactttgaagaattggttttggaacactaaagtggataatggaagcagctatttcattcttacagctctggagtaaaatggcgatgatctttggtctaccccaaaactgtcttaaatttcgcttgctttggctaactctgataggaaatagctatgggagagtaggaagggaatggggcttagagcccataattcaaaccctactaccacttctaggtatgagctgtgtaaccctgcacaggttacttatctccgttttctagattttatgcggtccatttggcatgtcctaagcacccagtacatgttcattaattattttttctcttctcaccaggtctggtctatgtcatgttcatctctatcctcattagcgtgatagtctctttgagattatttgatgaccaaattaatggggctggagtgtaacagcttaagagcaggtacattctgaagagtgagaataaactttgtctgtgtattatttactgtttaagaaaaaagaaaaaaacagccctcatggtgttgatggattttgggtaatcaagggagatttggaatatccctctcttttcgacatgtgacagcctgtctaggtgagggccagggtcacaatgatggttctgattgttcctctccaggagggcccctgaactttgacatcatctcctaacgcagttctgccggaggccttcctgtcagagcctcctgggccagaatgggcctctgtggcgagccgggcctgtaactgttcccactcataatgagcagagctgctcctgcaacccggcaggagcacccgagtgggtgtgcatgcacataatgggcccagctgctgtggctgcagcctgtgaatgccttccaagaggccagatgcctggacacatctctcagcagctacttttcctttaagggggatgataactccctggcgcttatccctagtacctctgacaaggaaaggaaatccatcctgccctgaacagcagggtgagcaccttcacctgattcagtctcatgcatctcagcaagggagatgctagtatctaattgtcttagtttcctagggctgccataacacaatagtgtaaactaggtgacctaaaacaacaggcatttattttctcacagttctggaggtgagaagctggaggttgaggggttggcagggccatgttttctcaagtctttaggggaggatgtgttctgtgcctttctcttaaaggctactgtgttgccatcaatgcttggctttccttatctcacagctgttaatttcagtctctaactttgttgtctcatggtattctctcctagggttgtcgttgcattatcttcttgtaaggacaattgtcatattgaactaagggatcgccctactccagtatgaccttgactgatcatatcttcaatgacaccatctctgaataaggtcaaatttgaggtgtactgagggttaacacttcaacaaatctttttggggcatgcaattcaacccataactctcatgttgcatacatgggtgcaggtttaaagaggatcagtaatttgggtatggtcacaattaggcagtgttgggaccaggattggaactcaggccagcctgtccaaagccacttctctttctactaaactttggtgtgtcagaatcacttggagggctgataagaaagactggggcccaggctttatacccttgctcctccacctgtggtccatggaccaactggcaacatcagcatcacctgagagctttttttggaaatgcagagtctcaggtcccaccacatacatatttttaacaagatccccaggtgatttgggtgtgcagtcagtttgatgaagcacctgaatcgggtatacgctgcttctcagtcctgattgcatattagattgcttgagaacagtaaaagacaaaacacaaataacagtgatggcagccttaccccacgccattgaatcagatctctgatgaggcactgacgtttatattttttaaaagctgcccagattattctgattcacagtataagttgaggaccactgtggggctggaggtcctcatttctggaatatccagacttcaatattgaggttgagaattctttttgcacaggttcttctttttatttccacagtagtgcagaaactgggccaggaggggggctagtgtacggaatttatttcagagaaggcagaatattatatagcaaaggagaccacagtgcattttttttctgactttacctcttacagatactaagtgttgggtagcaacctatttgtccaccccaggagcttgggagaacatgaaaggtggtgtggagatagcatatagtgggcagtcagtgcttgttgaattaaattgaataacaaaaaccataggaaatcagcgttgttggtctcactgaaacatatcatttatagagatgctattgtgttacttttggggtacaaggaagagttgcagaagactgcacagatgcttacgatgtttagcaattcttaggctacgtgggatggcttatgcttgtaatcccagcactttgggaggctgaggcgggcggatcacttgagtttaggagtttgagaccagcctgggcaatgtggtgaaaccagtctccacaaaaaatacaaaaattagctgggtgtgatgtcacacacctgtagtctcagctacttgggaggctgagatgggaggatcacctgagcccaaggaggttgaggcttcagtgagccatgatcgcaccactgcactgcagcctgggcaacagagctagatcctgactcaaaaaaaaaaaaaatttagcaattcttgttatatcaataaacatggaagagttattggaagttttgagaataaagtgggagcaccccttaatatctacagatgtggccgggtgcggtagctcatgcttgtaatcccagcactttgggaggccgaggtgggcggatcacgaggtcaggagatcgagaacatcctggctaacacggtgaaaccccatctctactaaaaaatacaaaaaaattagctgggtgtggtggcgggcacctgtaatcccagctactgaggaggctgaggcaggagaatggcgtgaacccgggaggcggagcttgcagtgagccaagattgcgccactgctctccagcctgggaaacagcaagactccatctcaaaacacaaaaaacctacagatgtattttccgttgtaggttttgtggtgaggggaagcactagtatcccagatggtgacctcttaacttttaattcttcaacatagacttgaagaaggatggtgattgtgttcagaccatcttgccctactgttccctcaaactctgtcccatcagtccttctcctcttagctgatcttttggacaatcacagaatgtggggaaggggctcatttcagtctggggtcttgatgtagcatgcatttggtcctcagactagggctttcacagacggttggcaccctatccaatgacaattctagtgtccttttctcattcctggacttcttgacgtttgtgcttttgtaccccctggtgtgccacccaccccatcccatctgaaaatccttggtacagcccttaagtcttggatgtgcatgctgtccctctctttttttttttttaaactaacctttcttcctcttcctgactccactaagtagtggttatctttaaggttttatttatcccctcttttttgtaggggtttcctccactctgccaattttactgtcctatctgtgcagaggatcaccatttctcttccaaatggttgtcccttcatcaccaaaacatcccatacattgaaaatggaattctccaacttctcttgttttctggcttgcttttttatgtcagtgtatcctatctactatttttcaaagccccttgtctttgaaacctcctatttgatttaccctgtagggactgatcagtcccttactcttccattctcctttgggacatcttttgtatgttcatttttcctttggataattctcattatccaaactcttaattgcctgatacctggatgagtctctagctatgctttccatccctgcaatggaaattaaactttttattaaagccgtttgtgtaacatatcaactctacctgtatttccacttttatgttgcagtactgccctggtggcctcagctccagctacactattgtttttacctttcccatagttgcctcctgcacacatgctctgtggttggcccccgttgctgactgctgattggagatgacgtgtacccatcctctagacagtctgtgcttttcctgtctttggagcttccagttccacccccatcagtttttttctgaccactccatcttgccttatttctctctctttccttttgactggaagagtactcatcttttctaacatcttttcataaactgttttgatttcacttatattgatttttaacgtataatgtgctggtgttctatttcctcagttagatcagaaggcccctaaagacagggctccattggtgttaaactgccatcttcaaggtctgggacttgatttctctttttttacctccacaacaaggcactcctctgcacccagtcggaattcagtgcctgtggtcaagtaaatgcatgaaggaagttggaacccgtggtgggtatgtttatttaaatgtgtaaaccaagaatgccttatggtgtgtatgccagaagtgaagttctcatctgtaattaccaatgaagaaaacaccttgtatttacggttgagtttggcaccaaatcagcactggtctttccttccatggtacaaatgttgtaaaactctgaatgctgcgtttccataaaaggagcatgcatttctgtggaggtggtgattgatgttggatgcctttaggcggtgccatcctactcatgagggaagcagtgctgttctaggctcagtccacgaattggtttgccttttctcctttcccaactctgccacctggaaaacaaaacaaaagcaacaacaaaaccccccccaggcattctgcctgctggcaccctgttagaataaaaagattagaacacttggtatctgttcactcactcaggtgaagtttgagatgtcctactgggcttttctatctgtagacccatgaaaatctcattgaagaggtgttgtggaaacatgagaaatacatgtttatcatcatttgtttgtttatttacctacctgtctaccaaattagaaaagttccaggcgtttatctcagtgttttacaaatattaacttgtttaatttaaatttcataaccaccctgagaattgagtggtatgttttcattatcccacttcacagataaggaatctgggcacagagcactgaaggcgcttgttaatagtcacatgcaatctttttcctatttcttggcttccagtaatttttcaggtaactaaatgcctgtgattcccaattaggtgtcgagttctatggcttttatttctataaatcattctggtttctttttatggtcatggctgtacttgtgtttccctctgaaattggcagaagatgagtgtgtgtgtgtcagcgtttttaacacccactaaaaataaatctcctacagtgctttacagtttataattgctttttcagatattatcttccttagtccagcaatgctggtaagaagagttattatttatttccatttaacaaatgaagtaagtggcttagagaggttaagagactgaacatatccttaatgtgattagtaccttggaatttgaacccaagtcctcttaatcctttgctcttccaagctgttacgctgcttgtaaattgggaaaccctatagtctgtttttcttgaagttctttgtttttctaacctccgtcaaaataatgtagtgttttgcttttttttaaacttatatcccaagcctgtatggtagaagatgtgaaagtaggggggttgagaatgcagtttttttgaaagagaggagtttatcagatgccacaagaaatacttttttctgtttttctttgatagcaaaagagtaaaaattttgcaaggcttttcttgatatttttggagtccaggggaataagtgcataatggtaataattaaatacagtttccagtaagggagttttctcaggtttagctgcacaggcttagaaagttgggtgagagaaggctttgaggagagattagaagttggagagcccatctgtcgtgccagtatacaaaaatgtccgtggatgatgactgcttgcacctccagagctagtctcctctaggaaaaatcaacagtcaccagtgcaggagaatgaatgagtcagagctctgggtcctgagccggttttacctcttagctttgtgatcttgcataaattatccaaaggatctggactgcagtttagttcagtgtagcaagctttgatcaaacagctatgtgccaggtactgtggtaggtgctctggagagaaatacaaattagataaggcttctgctcttggatagttctcataccagctggggagactgacaggaaacacagcgatggttcctgctgtgttagagatacgttcagagggctgataagggagggggacgcaaagcatatcaatcagggaattctactaaggtgctgattcaaggtcagcttccctcctcctgaccgctgtacttagcacagcacgtagaggggactgtagggaatgcaatgaaagtgaatggtgacaaaaaaatgaaaaagagcctcaaggcaggagccatggttttctcctctggggtgggaattttcttcaatctgggaatactgtggtggggcctctcatcttcctttcctcccttctctgcccccaagcaccatgtctttttcctagcacaaggctagtctcatagatttctaagagtcctatatagctgtctttatcttaggcactagcctaagtaccccttgtgaatggggttggttgcatctttgtgttctcagtgtcagcaccatgcctggcacagaattggtggtttaaaaattctgttgaatgcatggatggatggggattgctggaagcacagcctggaaggagcagaggaaggagagattgaaacgagaagagtgagatgtccctgggcaatggctgatgaaatttaacccaggcagggaggggcttgggctgaaagccttattaaaaagctgccatctgcaaagcaagaatttaactccttggtttcacaagaaaagagtaagtgtagcctagaaattggggctggatttgaaaattagccccaattctgcaattttcaccgcaataaaagcttctccagttatacatggtgattggtcttgatgggctattgtggacagaggagggtgctaggttggggtggacggggccacagctcagactaaaaatccccttttctctcttcatgagcttggctgcagatgtagaaactagagctaacagcagttttacctcatcttaaagaaaagtagtaaattaatggaggctttaattaattgctgtggtctgttgagtacttactataggctaagggctgtagggaacactttaattcactgaataatgtcagtaactctgtgaaatagatattagtgacctattttgcagatgcacaaactgaagctcaaaggggttttcacagatagtgcaatactaagttggagccttggtttgaacctgagcgtgtctgcttccaaagcccatgctcttaggtggattttcagtgatgccagaagatggttggactttcctgaagatgtttatgtgcattgtcgccacagagtcaaaccaagaattgtatggttgtatttcattcagaatcataacatgcttaatccagatgatgcctcagatgatgaaggtgggttgcccacaggctgtattgattggtgattcttaagagtgtaaaaaaaggaaatcacttgattttgttgtggggaggcagaatgtatcacacaatagcttggttgagtttggcttaatgtagatatgtttaatataattagactgagggctgaaatgggcaccttcaggtcactgtggaatgagacagagccctcactagatttttgagtcacttgaggtggttatgccaagccctgttcacatttcacacttgagtttaagtatttgtgaagggaatatagatctttggtttgaactagatatagctcaaaggttacccattcagaacagagcatttcagcctcagggcacctacttagcctctaagatgagaccacatctgaaccagccaagtcagcctgggatgaggttggaggagaaaaattcatgtgataagtcagattacaattaacttttttgttattactttttgagtgaccacaatgtgtgtgggacttcgaaatatggaataatgatgggttttattatttctttttgagaaaaatccagtcactttttttttaacccgaggaagttgaatcctgaagaaggggagatttatctctgccctttgaacttaaagcccataaagtaaaatatatagtttaaaacaattacatgttccccccatctcaccgccgcccgacccttcacagatagtgtttgacaaaacactatttaggaaagtgcctgactggtggtggaggggccttgcttcctgtgaatctgcattccctgtgccacttgcttccttccctgagaggttctggtggccaggtgttatgaatccaggtcaagatgaagaaaacacacttttgtcatttcttcaggcatgtggccgacccgaccgggtctcaggtattccagatatgagcgatgtgccgattgcgcaaggctggaagcattgctcactcggagataccgaggcctgcttgccccgagccctttgttctcctggttgaaagcagttaattagcaactgtctccatagcaacaccctcatagtccaaaaacattgtctagtttttcagtttagcttatcacactgtttacctgaagggcttttcactgctctgagtctcatttgagttggcggcatgcctgttggggaagtgaattgtcaagatagaaaaaaacaccatggtagcaagaagccgaggagacttctctctacccagcccaacccgggccctggattctgggaaaacagaagttgcgcctgcctaacattttcacctgtattttttttttttgttttgccataaaactgctgttctctccaccaagccctgaattgtgaggatttttcccccctttccccgagaggctttctaagctctttaatattccctgtttatagtacatttccatgattagtcatcttgaaaccccgagtgttctcagcccctgtacattcgaggaaattttgcttccctgagggtcttggcatttgcaaaggcccttggatgaaggattatgagtctgaatgtgaattagtcagagcagctttgtttttaggcataatgaggaaaggcttctctttcttggtttaagttcattgtttgtgggaagaaggcaacttcaggtggcttgttggtaaaataggaaaggaaactgtagcttttttataagccatgcaatgaagataattttcatagctttcatggactgagtgcagtctgtgtggccctccatgccagctgtgtggccctctgtgcctgctgtgtggctcatggcgccagctgtgtggctctccgtgctgggacgcttaggagctttttatctcacatctgcaatgggaagacaggaggcagatgggaaagaagactgcatttcctgaatgcctaccacatttcagttgctgagccagactttcacaaaatgaggtctcctgtatccttcacagcaaacctgctaacgaggccctattaagtattttaaagatgggaaactggggttccaaggagtcgttgcctgcccaaggttgtggaattctaatctagacctgttggtttataggacgccaacacttgtcctgaagcagcgttgtggatttggtggtggagttaggcggtacgtatcacagattgcagggctctgggagacttttgctaaggaggttagttagaatttggtggtgtacatgtgtaattagatgcctaagtatgtctcaggaaatcatgaagcttaggtccagtgataaaatagtagaatttaattttgaggcacgtgtgccagagcttatttacccaaacaaatgtaattctctttgaagtattaacttggaaagactgtgctttgtgatatttccattcttcagacctttttaaggaaactttatgggagcaagtgctttcccagcttgcaaaatacggctttgaatgcattcagcagaccattcttgagcattgaactccccttaatatgggcagagaagtatggcttttccctagcggtggtccctgggacctagcatgggttcaccaagaacgagccaccccaggctagcttcgcttctttctctgaaaaccttattaagcagaaaactatagtttatacaatgcataaatgagacctttgatctgctttttaattttatctactgtgttgaaaacagagacatagtctgagctgaatgcaagaactatggtctgaactgccccttagttaatacctaagagtgacaaacatgtgttgtaatgggagatcagtactatgtgatttttgttgactgtgcgatcacagtaagtttgtgatgtggcttctgcagaagcgagtgttacctcggagtgtgcagatagaggaggatgcataccatgttagaacacacttggagccaggggttctgttttccttccttcgctccctgcctctctccactatactgtatgccaggtacctttctatgtgttgggatgcaaaggtggacaaaagaaagcccctttagagagaacgtaaaaactagggtttcttcagagggcagcaccccagatgataaagagaagaaaccacatgtcacacaaaatcattcaaaggatggggtggatgtgggagtggtagtatttgccctgacttagaaaagactctgcagagacatgggtgaagaagcagcacatttgtccagtagactctagttataatcttaaaaggcagtcacattttggctcaattataaaaaagatattcttcacagtcctgcaaaggtggactgggcttctgctttaggatatagcgagaagtattgaagcagggatcaaaagaccatttggtggcttactgtgaaggtcaacaatataatgaatctcctttaaaatttccagtcatgaaaattgtataagtgagcaggcatgtcatctgcctgcaagacacatgctagtaatgaaggaagatgtatatcacaatgaacatgcctgctttatattgtttatttatttctttgggggcagctgaatatgatcaatttagagatgttagaacatttgtaactatagtttgtgagatgggcaattttaactgcaggaagtcttcagaatcacagcacaggttcaattcactgtggttgttatgtcataattatatattgtggatgtctaattccttttcaaacctagaagtaaagatcatgtaacatatcctagccaatattaaagcaatattattataaaaatgatctctgatgtagaaccactagaattagggccttaggtctacccatattgagtttgccctttttatttgcaaaatgcttgatcccagattgctatgagagatagacataatagtgatctttctgcttttgatagttaggtatcatagttttaagacagcccatggagttttagaaattgtgtctgtgtctacagaatcatgtgtgtgattagataaagattagtaggtacagaaactagctgaagcattgattgatacaccttgtaccttccaaagaattgatctgtttaaatcaagttagttttacagctccgtttgttgcttctctagattgattaggtggttttatgatgtttcttttatttttttcactaggaattttgctgagtatttttaatacctgaattgacagactggtttatcggtgttgggggtctgtgtgagcttctcattagtccatttacaatggcagcactttcatgtttaaatgtagacaaacctgtccctaatatttatggagcctgaggcaaagagtgtcagtggaagctcatgtactctatgttgaaatatttaaaggaaaattcgagttaatacactgttaaataacattttctcacctcctactttgacaaatttactttaataataacttggaacccaggttcaaatttagaggcctgcccccttctcttcccactccagctgtatgttgtaacatgttcatatggatgctgcagattgcacaagcaaaccttcttctccttcctcctgctaacagctgttcccaggccactccttgcagtgaagcatactcacacctgtgacacaatctgcccttttgagaacagattcagggaagtggcctacacagaccttggaagtggaaaagggttattggcttgagagttccaaagtcttgggtccttggtcgatggtctaaaaggtgagggtgttaggtgaagtgtcctcttgatcctcaaaggctcctcaccctgggaggaggaggaagatggccagaagaagaccagagcaagaccctctaaagtctagggcccaagttgggccctctggccgaggtctaaggactgtacagaatatggataaaagcatgactaacttccaactgcctttcatacttcagagcttgaaaccgagtagtttcaaccaagtagttgggttggcctaagtagctttgccatttaacctcgtaaatgatctaaacatcaacatagtctgagagttgaataaaaaataagtgaagtagttgttcattgtcaggtcaggtttgaattctctcatacttgaaatccctgcaactgtgaaattgcctgtaggaattgcaggttgtgctaaacaatcaaacgaattggtaggttggctcccataggcaaaatcttgaggctgtttggggcaaaaaaaattacaaaatataactagtaataagtgggatgcaataagaatcaaatgtgatccaattttctggggaagcaaattgcattgcactttgttttattttaaaaaatgatgtgaaaatacagagcatcacagcacagacaaatatcttacaccagttttcacaataaaatccccaaatgtgaaagctctccctttttgcaaaggcactttggaagcaataatgtttgtgtgcatagttgagtttatcagagtatactgattttttatcccatgaggttttcaaggaaagtgcagctggtcaacctttagtgttttctttgccacagggtatagttctgtttctgtccgctcaaatacagtctttcaggaaacgaattctctgtaggataccttaaaatgtctttgtgttgtaacacagggtagggggcagtatgtttaataggttagtgtggatacgtgggtcctgaaatcacagtcctgctttttgctcctggctctgccacttctagttacttgtgtaaccttgagcaagttacttaaccttctctaagtttcagttttctcatcagtaaagtgggttgaataatagtgcctttgttaaaaggtaggtatgaggattgaaaagtataggtaaaggggttagcacatagttaacattcaataaatgcaaactattaatcactattagctcacttgtgtaaggaaggcctatgggtttatagaaaggtaacattttgtggtaagagaacctctccaggggaacctctgtaaactccagagggctgcacggaaaattccactgtggatgatgggccttctcccggagtttacctgttaaggtgaagtaggtcgtgctttgaagtgcttggcagtggccagacctggacaggtactgagagttgcactgggtgctgtggttgctgtgtccccgccttccatcctaggtagcagatggtagtccttactcatctctgaagagtcctaagtagcccgagtcctagatgtaatttgttgcttatccgcaaagtggttttgaaggatatggtttttcttctttgggtatgaaacataagaggatgaaggaaaaatgagaagttttgtttctaaatgaatatagtacacagcctcagaaaatatggggaaaagatgagaaggaaaattatttttatttctaaatgcactattcatttcattttccaagtaacttgtggctatcattatttttagtgatttatgcttaaatagtcttccttgggaataatcaaatactggcttcaaatatagacagggaaattataggtcatagtaggctcataaaataacgcttagaatgaacttgggatgggacgtggaacagggcagcagactttccaccaggcgccattcctgtgttctcagctctacccttgagccttctctagtggggccccaaatgcaccaccatgatgtaagggtctgaccaactacttagtttctagcagcccagagtgaaggcacctctctgtgccttcctcttcgctaagcctcagtttttttgtttttgtttttttcccttgcaaaaattgagacagtagtgtccaatttgcagagggtctctgagaatgaaatcagaggcacgtagcaactgcctggacagtgccagcactccacctgccacccctccccactgccctctatttgtggagaggtggatgattttgctagtcacaaagcctgtcttctttgagacagtagggaaaaagcaaccactgtgattcacagaatttcctgaataggcacagctgcaatttctctgcctttactcatcaccataaacatactttaaagttgtcagttatgttttctttctcatttttggtgttgaaaaaaattaacctttgagtttcagtttccttttctgtaaaatggggagaagaatagctcccattccataaggtggctgtgagaatgtgagaatacaggtgacaggctgcataattctcgcaaaatgctgttggagtccctagaaggggaggaggggagctgtgaaatccggtttggaattgggaattttcatcctgagcttgtgttaaggaaaggaatgaggcccatcccaaagtagaaaccaaaaacgttcttactgaatatggcacaagcactggttttctttcctaatgagtgtggtcattattagagttaagcctttccctgcatggcaagtgtgaacatgtctgcagaccctgaggacaccagagcggcaggctttgaagggagagcagtggacactcagtgacggggccactcacagtctagctctgaccccaccagatcctgtaggttcctggttcttgttcctggtgaattcctgactatcacctttacacagtgatagagcctttatttccactctgcatggaggcatattgcatttgaaagattgaaacccattgctgtccccattgacagggagcatgttaagggtaagatgctgcatttcactcattgctgggcccccatttctgaatctggacttgtgtcttgtaggcattcaagaagtagcagttggaagaatgtcactgatggaattgatgtctctgtgtacacacccccagatcaaagaccatgcttcttggtctagccataggaactctccacccttgagactcagccaggacgtggggcccagcctttctttacctccctggtagtgccctttttagagataggcataaaatgacagtgctgcccctcaagtctaaaggagggggcaaaacgtagcgtcctgtgcttcaccactgggggctggctgggccactgttaaggtctgtggagacttctgtttgcaggagaggttgatgaaaacccttggctttagctgtggccagaggatccaggctttaccttgtatgctccgagccctgtgcctggcaagtctgccacatggttatggaaatgttcctgaggcatgaaggaggcctttctggaccagccgatggggagtgggtgaggaggtgtggaggaggaaagaaagaaaactctttccccattcttttttttttttttttttttttttgagatggagcctccctctgtcgtccaggctgtagtgcagttgtgcaatcttagctcactgcaagctccacctcctgggttcaagcagttctcctgactcagccttccgagtagttgggactataggcgcacaccaccacgcctggctaatttttgtatatttagtagagacagggtttcaccatgttggtcaggctagtcttgaactcttgacctcgtgatccgcccacctcaacctcccaaagtgctgggattaaaggcttgagccactgcgcccttcctctttccccattcttaagtacctagtaacaggtctgagctgtttagaggtgtaagggagcttgcgaagttgggaagtgtccggatgtatggacgctggagcattttccccatgagggtctaagcctgggaaaatggccagattctactcagagacattctcccattttcttaaactaggggtgtgctgggagaactctgggctccttgcccacaggacagccgagaagcttttgtcttcccctctcttgctgagacacatcctccctctgaacttcccaccttagtcttcggagtcgttttagactcgagattgctagtgacttgaaggttctggtctttctgctatgattgggatctgtgctgcacccctgggtctggcagtgtccccagcagtgggatgctgcccagcagtaggtctttcatgctgacgagcacagtggctgatgtcattgtgggggagttccttctgtggccatagaggtcttggtctttaacgctatatctcctcctccctggccctgaaataaattcctttgggctgctaactctccttcctttagtggctgctgttagttaatagtccttttcctagactggtgagatggttgctttcatctcagcctgtgaggctgggagtcatttggatggaggtggccagaagctacttgaatgctccacggctatagaggacattcagcatccattctgtttttcttaccaaatgcatagaggccagccctctcactggctcattgtatgattcaggtgggatgacgtcccttgcaactctggaagtagaccgtgattgatataagcctaaaacagctatgtccacggcgattgattgagggatggtgcctgaccagtcacatccagtgagatagaggagatatctttctggggctgctgggaaagtaaagctttctttcgctgaagctttcagaagagaatcacacatcctgtggatggtgtagggtgaggacatgagttctatatgggagcagttttctttcataagaatcccacacatgtgcaggactggttactggttggaaccactaagtaacctattgggaggcagattggtaatgatgccatctaagctgttggaacaagacttcttagttaaataagccactaagccccctccattgcttaaaagccagtttgatcattgtttcttagaacatagtgacctgatatgcagaccttcctcttgtgaatttgttgaggacttttcctacaaggtcttctccaaggtctgtgtgagggttcggcattagcatctgggaagccagggatcctcatgctaaggcagaacaaaaacaggagtcagggctggagaggggcgtctgtggtctctggggcaaggcagcttgaggtgggacccagaagtccagggaatcagagaggaacagtgggttggagtagatctgtgggttggaataggtctgtgagaggtcttaggggagtggtcttgcccacagtggagtggccccgaatccactgaggatcccgggatgggggtgcaggccttcggttatcatagactgtatatgtgtatctgggtgggggtgggggtgggggtagggtggtgtgtctaagttctttcatgtctggggtggtgttgtagatcgaacttctcccaaacaggctcagccacaccggtaggacgtagtctcttcctgttttgctttatgatgttcctgtctcttaagctgaaaagagcccctgaaagccactatttagttgcctatactgacacacacctgcgattggatggatcgtctcacacagagagttatgcaccattcatagctaacctcagggccggggtggtgctcagaaacactgtctttatgatatacatgggcttttgagctcgtggcttgtggttgtggactgagaaaattgcttcctgggtttatagagatggtaggggaaatgaccctcttgccaccacttattcagtgatggcttcctggtgtgatgcttggggatggatgtgactgaaaggatttcaggagttaattggaagagtacatcatagcatgcatgattgatccctatgtggtattatcattattagaatcccaaaaaggtgatggttaaaagagtacttaactatttgctggtcactggagagatggaaacactgaacatgtttgtccttatcctgcaagagctcagagcctaatatggacagcagatctgtaataaatattgtaggggatggtagagggacagattcacattgacacaaatttttaaaaagtaaatatttaaaagtaaactttttccctccagaatattactggtattcatcttcttccagatagaatatctaatataaaacctatgaaatttatcaagagaaggcttaatacaggagatgctggaagcgcatagattttcctcaaatccctcttggtacatgtgaatccactacatccagaatcaggccatgcatcttcaccaaatcattccctttggggaagtcgtggctcagtgctcttctggttcaggaacactgagccagagtaaatcacccctaatggtcctctctgcagccagtgagatttctaatacagcaagaattcaatagaacaatacctttctaaggtactagctagactgttaagaggggctaatgtggtagcagcctcctggcacaaaggcaagggtctgtggttagtgactgtcgtgtctgtctgagcagggagaatgtccgtgagcagaatagctggtgtccagatgctcctagtgaacttttatcagtgagcagacgtggcctgggagggcaagccagacagtccagccggcttggagctggaagggaggagttcagtcttaggtcaagatactgtgctgagggaggtggagctgtagaggcagtgggcaaactgggggctccctgggagccctggaagcagcttccaccactttggatatttggcaattggaggtggaaggatgccagggaaggtgtttgggtttcttttctctgtgaagttatggcagtgccatcttccaatcagccatcaagagagccacctttaagagtgcctcaagtgagccaaattaggggatcgccgggacagaaaagctgctgaggtgggatgagcactgtggatcatcttctgcccttctggaagtctttgtgggctggacatcccaaatgtgggcctgggaaaataacatttcccatacttcatgtgtgtatgtttcattttttacagtggtgcttttgataagcagtgtaacatcaaagccaagaactgtgctttccatttctggaaatatgaggagcccagaggcttctctttgagataagagctgtgtgactgtgtgagctacttaatttctccaaacttcagtgtgcaccttctttgcagggctgtataaggattcattgagatgctaaccatgacacacttggctcacagtgggtacttagtccttgtcagctttcctgcccgtctgcaggggtggcagtggtgccagggggtggcgtgctgaactgcaagttcatctgggatctcctggttgtgtttggatttagctggggtgtgtcctctcctcctacaccttgagtcaccagccaaggtggaggagagaggatggggtgtagcctgtgtccagctctctcttggacatggttgggaggtgctgaccacaagtccgaggccctgaaaagaagtgctgcaaggaggatgtttctttccccattggcacagcatcaaggttctcaacagctggacacaaacaagctgttctgggagccgtgtctcattccccttcacctcctgcttgctgcctgctacgctcactggtcaccagggctgacgtatggggaggaatggagagtggtctcactgacagtggatgtcattgtttgctctctctggaaggaggatgtctgaccgaggccagagaccacgctcaggggacctggacgcccggggagttcaagcgagcctctgtcctcagtgatggagtcctgggccactggggcagtgtttgggtgctgcttccactctggctcttgacaacagagtttgttccctttgaaacaagtttgtaggaaccagagtgtgtgaggggcctttggcagcgctgaaggaagggcagctggaatctttgaccccctcaggcccccgctggcctggctagagagctctgcctggaaggggacctctgttgctgggcaagggaaggcacctttggctttaggaagcctgagggtcttgtccctgtcctggttgccagggctctgcctagtgccatggaagggaagaccagattggaagtgattcagaagccgaataaatgaagagcgtgacagcacttgagagtctttgcgcatgtcatctcatttaatcccctaatagcagcaagggcgagaggcttagacatgttaggaagcttgtcacaccgtaagcaagacagccaggaattctgatctcaagtccagccacccctgaccatcgcagagctctgtgtgtgtgtgtgtgtgtgtgtgtgtgtgtgtgtgtgtgtgtgtgtgtgtgtgtgtgtgtgtccccgtccgtcccgagctgtgtgtgtgtgtctgtgtgtgtgtgcacgcgtcccggagcgcacgcacccatcagtgaatgctgcctccacgtgggcaaggcatatgcgtttttctttcattattctcagaaacaggcatccagtgcagaacgggcctgtaatggttgctgactaagtgcttaatggagatgtttctgctgataagcctcagttgaaaagggaaagacgcaggcaagctggccaacatcaaagccgggctttgtttatagataagggtaggtttcattctgtgggttccagagcccctgtccccaaatctcagagggggtgagttttaaacagaaactgtgtttatctcccgcagtgggctggaagacaggcctgctgggactcagaagcttccctccctcccatcctcccttccttcctttttccctttcttcttccctccctcccttcccagatagctagccactgccctcatttataacataacataaataatgctctctctgccccagctgtttccgtttggtttttgttcttcacatattttattcgtacttgattgtgggttatttaaagtaatttggaaaatatgaatattaagtagaggaatctggagaagaggtcacagaactgtaatggacccaagctgcaaaaatgcaaaacacagtgtgtaaccatatgtgtgtggaccttccctcttagttaaaactggccatgacatgatggtatgcccctcttaacaggtgtttcaactagatgtaaccaagtaataagtagcttcaatgattgggtgatgacgattggactaaattgtaatctgggcagaagtatagaaattcaacagttttaagggcatttgtgatatatgtgtatgtgttacttatgtgttcttcaggacacagatggggccaaaggacaaattttctgtgttttcagcactggggtgcatgagggagcaggtgtcggccacaccaacacatataagttgttgcctgcgggtacagatcaatgaattctttcctgttacttcatggctcagaggaaagaaggaagagccagcaagttaagatcatgtatatgacgtagagctaatccttttaaattacatgttacagcacttcaggttttgatatgcccaggactgaggtccttttaggttttcagaagactgagaattcttaggaacctagacagggcctctgttaaggctgagcaagctgcggtctgccttcctgtctcttctgttgggcagtcacgggggtgctgatgccaggtggcttgtgagccttcccactttgcactgtgcctgcactcgggtggctttttatcaatccgatactgttgcactcacgtcccactttgaggctggatgaagtcaagctgcccgccttgctgccaccctctctcattccagtgtctctgaccacactctcactaggccctctggaaatcccctgtaggattttggaggagcattctgagaacggttctcttgtatacgctcttgttgtcaggacacttgagccaaagttgttggtcatttgccccaggagccccttttcttctgcacgctctttttccaggggatttcagggtaggttcaacactttaagttaccccgccccctttttggtatttgtagtggcttacacgccccaggtaactgaaaacttttgttggcttattaggggcatttccacattggagctgtaatccgtggagatcaggaagacgttttctttgggtgacttttttctcctggtgatgcagtgggccagtgcaaggaggagggtgagtttagttgctatacacaagccaggtacaagacttccagagtgagagggataatttacaccctgtggctatttatttagcacatcttttgtgtgactctccagtgctagggacagggatctcaagatgagtaagacctggttcctgctcttaagatgctcatggtttagtggaggggacaaagtgggacacaggtgatgatggcattacaatgagaatgtagagaacctacaactgctgcacccctccctgttcttcaagatgccttctctggccatcagggcagcatgtgcagaggcccgctggtttggaatagtgtttctttccatgtgtgatgcagcgttccctcaaagccgaggcgaggtttatgcacactgcccaattgaaatgtgtctcatgttcactcgctgctggatcagcagaacctcgcgcagggcactccttgggctcacgctagctactttgcctttgtttcttcaggccttgcgctgcttggattgaattggattctgccacgctgatattattatctcacgcctttaaagccagaatttgtaataaactactaatgttcttggaataaaggcacttcagagcatgcgtagcttgaaataattcttctaacacctagaaattagccaattttacttttgaaggagatgagaataaacatttagtggtcagccagacggagaataaatggccagcatttgagattttcctgctcctgtttatggagagagactggcatgtacctaattcccaacttgttgatctgttgtaccctattttaattattttgccagatgtaaacattttcccttttttgtgaacggagtgtttacaccatctatcacatttaatgtattcggtgcctgtgagtgccgacctcttcaaaatttgtcgacttcatcatccgtgtgctgtccagaaatgagatcttgatgccccccaaatgaattatgaaaagcttttcatagtaatataattgatccactgttggccacacttataaaaaaatcaatgttaacgtgttaatatttcatgagtacccacgttgccagctccttgcaatgggaccaaactataaagaatgagaattgtttcacagtagcccagcacatggacagagtgccaagaaagggagttcagggttgacttgaaagtttgaagcgcaacagggccattgaaacacagtcctctgactcatgtcagattgttataattatttaatgcccacaatgcagctttgtccccacggatttatactggagaggtttcttacccacacattgtggttattagctgcaaagaaagcggcgtttgtttataatgacatggggtatatctggatggcaaagaaaacactgcagattctgtcttcttaggaaggaggcaggaatttggcagataacctataggaaattgggagacatgctgtcattacttttcatatatgtgggtggttgcagccaataaccattagacaccttttagttttcacctttgtcccaaactcttgagagaatggaattgcatgcttacttttcatctatatgacgttatacagctggtatgcccagagtgtatctcaacttaatctttttaaatgtgtctcccaaaatccctttctcaaggttctacatcctgcctccatgaaatttggtgtcaccaacattgtcttacagaaccactgttactatttttataaagagtttataaatatgttttgaaaagttctcatgtggctagatctcatcaagggattttttttcagacttgaaaaataaagttaaagaagtaaggctttggggcctccctggggacatgtctggtttggagatcagtggtggtgctaatggccctgagtccggcatccggctccttgggagaagaaaggtcattaagtcagagaggaccagtcaagtccagctcctccaaactgcttttctgtgtgtcttccttggatgtcctcccttcttcccctacatggaactctcagttgcctttgctgtcagaggaggttcaatatcaatgggtttctcaagcttagagggcaacagggagacattgaaccacagtagtgtgaaattgtccgcaggtacttacaagctggggtgtgcagatgcaatttataattgcaccggaaatacttgtaacctttatcatgcttagtggtggaaataagaaaatctatgtgagtcagcttagtactaacttgggaccaatatgaagcaactgaatcctcttaggttttgcaagagagctacaaatagaaagcagacacaaaacataggctagagtaacagtaaatgtatctggagcctcaaatcaggactcatatattcaattccttattttttgttttctggttcaacaggaagtctgggagatctataggaatttgaattacctttaatggtttatggggaccagagaacctaaactttagaattgggattgtcctggaaaatctggaacacatattgacccagatccagacagtgggttatggaatatgatgcagatgatgagccaattaagagaaaggtttgcatttaagcatcttcctcttgtactggtgactgagtgactccaaggtggcaccattatcaccggtgcttgtgcagaggtgatttttttttttttttttacactttgctgtctgaaatgctttaaatgattcttttaattaaaaaaattagttacctatataaatattcacttggtaaccccttcatttaaacagtccatttatgccttatgcacttgtatgtgtgtgtgtgttgtgtttcacggtaacaaagttttttgttttttgttttgagatggagtctcgctctgtcacccaggctggagtgtagtggcgcgatctcggctcactgcaagctccgtctccaggttcacgccattctcctgcctcagcctcccaagtagctgggactacaggcgcccgccaccaagcccggctaatttttttttgtatttttagtagagacggggtttcaccatgttagccaggatggtcttgatctcctgaccttttgatccgcccgcctcggtctcccaaagtgctgggattacaggcgtgaaccaccaagcccggccggtaacaaagtcttaaaagcggtcttattctgtaatacgttggccagttttaaaccatttgcagtaatgcatttaaaagatgttatttcatagataacaaaatagcttcttgattttcatgataaacatagacttggagcctttttctttttccccgattgtgagtcagctcttggagggcatggacagtttctcacacctcctgggattagaggtggagaaacagaatgggctgggtgggcagagactgggtggttggagctcagggcctggggcagggagttgtggggagggagggtgggaaggtgaaggggaggtggtggcaggtcatgggggtccactgtgtgccatactgtggaatataaacctctccatcagtgcagagccacacagcaaaggttttaagtggataagtatgtatggggagtgggacgtgatctggtttgaataatgtatactcaggactcttgccatacagtaatttttttcaacccgctagacactgttgctgtggggaagtggagagtggtttcatccatatggcagcatcatggctgtgtagccctaaagccataggcacctcccaccccacccacccacagtggcatccacagttttagtctctaatagcactttgtctcctgagaagaaaagcaaagttgtttttcctttcttcttctctcatccccaaagcgttctccttctcacccaaaccatgatctcagatcttaggagttacaggtcagacatgtcacggagcctgtttgagatcagttgtctacgttggtgatgaaattataacaccctaaaagaagactttggagtaggaacttgccagggtcatcagacatggttgggttgagagaggaaatgcgattatacaaaaaacgtagaatacaaagtagtgcttattctgtgatcatggctactgtttcaggggacaggactagaagggaacccggacaaagaaaaacccttggcctgtgcaggctgtggggttgtgagtgctgtttccccaaattaaaatatctttattattgtcatgattttgttgtgccattgaggtacattaacttaaataaatcaaagcgaacaattttaagatgacgagtaagtctggagaaaaacctaggaccccagaaagaaggcatattgtacatcccagtctgctgtaacttccggagctgctgctgatgacaaagggctttaaggcaagggaagtgtttgcagcactttgggggctctatgcctgtctgcatgcttgtttagtttttgccatggcctgttcaccagcctgtctgccctgaaactgggaaaggtggatccagctgctgtccaggccttcaagaagcagagccccattcaattgtccacttctctgttgctgcccagagccagatcctgtgtgggatacttggcttttcaagggcctgtgtatggtgtgttgttgagtagaaatgtctgagatgctcctttagtagcacctgattcttttggatcagtgatttgccatttcttatatgaaaacgagaagttcagagttttgaattctggccccagttccatcactttcttgccctgtgaccctgttctcctcccaaaacctttctgagtcttcatcattaataatgtttaattggatcacatgaaatgatacaggtgaaagcatttagaaatggaaagcactgtgggggaatatttttgttcataattgtatcataatgtggacatggagagttaacctttgtcagcgcttagtttctcagcctttttatctattaaatgggagtacaaatgataccttcattgggggttccctgagcatgcagtcggaaactatgacctcttctggaggaccatgacttttattttttgactctatagtgtaggaacatcttaattaaagattatggaaaaaaatgaaaaatgggtttataaaaaaatgcccagatccaatttcatgtatttgtaaactattgatcaacaacctgtgtggaacctatggccggatatgaattatccagtattagcattgatatgaatgcttttatcaatagagcattgataaggcatttcatggaacacacatgtcagctcgttctctcactttacctacctcctccgctgtctgcctcccctctgccttagatcttctccctccccttttctctttcctcttttcctatactctctctcctttttctcttttccttttttttttttttttttttgagacagagtctctctctgtcacccaggctggagtgcagtggcgcgatctccgctcactgcaagctccgcctcccaggttcacaccattctcctgcctcagcctcctgagtagctgggactacaggcacccaccaccatgcccggctaattttttgtatttttagtagagacagggtttcaccatgttggccaggatggtctcgatctcctgacccattatccgcccgcctcggcctcccgaagtgttgggattacaggcgtgagccaccggcagttgtgctgcaactgtagagaaactagaggtctaatttctcaaatactggtcctctgtgaattgaaatatagatcctccctcacagatatagattcggtgactgaaataattattttgaaggaaccattgcatacgtgacatacttactgtcagataaagtctttggagggagatgggatagtgtgtggtgtccaccctgtcacttctgccagggcgagggctcacataatttattctaagcttcccatcctcagcttctgcgcaggagtacaatggaagatggggggtggaggccttgcctgtggagccttgactgggagaaggacaaagaaggcatgtagctggagaggtccagtgctttttccagggctggaggctgggaggtgtcctcatgcactcctataagctaagcagaagccagagagctttccctagtcatgcagctcacaggatagtgtgcagtagagctctgctaaaggaccttcagttttaagagcgccttcactccgtagtatcacagataaaattagcatccatattagtaagcccaacccagagaaccatgcaattatctcatgattttatttaatgactgtgctcttttcacagcttatcagggtaatctttggagcatgtcctgattacatgttgtacagaccataaaataagtgaacttaaaaagcaattcaaagctagctctaatttaatttataatttttacatctcaagacaacatttttagtagataattgtccagtatttggttttgtttttttgttttttacatatgtcaatttttacttgtcttgcagtttccattcccccagcacatctcatctttgctcatagcagcgaagaagagagagcatctgtcctggttctccttcaccttgctaatcaggctatccccctcagctcttcagggaatgtataatgacaaattagaccttgtaggacttgtgcatggagcttcagggtcttttctaaatggcaaaccaaagtggccaacacttgctagctgtgtgatcttgagtaagttacttgacttctgagctctgatttcttgcctttaaaatgttcccacttcataggtagtggttgattcacaaggttgccatgaatcaacaacgtacctcagtgaggtacctacctgtgagaagtgcctagtccctgaaggcgtttggaagtcatttcccagggcaggtcagatactgaggcttcccaggctgctgtacaggtgggcatgctggggaccttctcagacaccctggcctctttttctttccatctggcacaagagatgctttttctagttgggacatgcaggaggaaagagagagcaggtgcttccttgatgtgaataatttatttttccttcagatcattctgataatgcaccaacctttggatgggaaaaggtgcaaagctgggatatgcactagtgttacatcactggagttatgttggggatatgtccagtgtcagatttttttgtccaaaatcccattagcagaggaaaggaagaagatacatttccttggcaactattatgtcccaggcacagagattacagaggcaggagtgacagttgttgagggatacagtgggtatgagagggagggatgtaaactgaagagttcccatcataaaatgtggtagaatgttcacaaaggctcacctaccctaccccagggagacatttattctaattttgggggagactaagtgattggggctattcacttctccgagacaccagaaaatgagaacgtctgtaaaattaagaatatgaactctagttctgtctgcatttccaacttcttcattgtttcctttctcacaagattttaaatcccttgaggaagtcatttttcaaacagtattttctgtgaaatccccaattgtaatgtctactttatttactcctccactcatccttccttatcaggtttattgcatagtataatggaatatatgaaattaaaaataactacactggacactgggctctgcatacagtaaatattcagccgttgtctgcagacttgcctaagtgtgtacgcagtagttattctaggcaggtgctgtgctccaggctggaagttgtgtataggatagagagagagggtgcctcagagctggcagtttcctccagcagtcaaattctgaacacccagctatgcctcttgctggggaatctaaactttcacctttcagagaaaacaaggtctttggaaccagtgtgttctttcaaacaatgttggatactgcccgattgtttccatccgggaaccaagttttcaaaaagaagtccggctgctttgttaagataagagactgttgtgtgaaaattgctgagtgagagctcccactggaggctccttgtcttccaggccattaccagtttactcctagctgggtgatgggggtgagggttggggccagattgctagagccccattcctgccagttcctcccagtcctgaactctggggtgagtagaaggtagagagggttgatggggccgggctcctggcctggcagaaccgtgctgacctggagcctgttcggaagctggcagtgattgcagtctctcccggactgttgctgcccttgtttgccctcccttctgtttccttctctctacttcgagcattcattacatgagatggtgctgttttttcatatatttgttatgagtaattttatctttcatctattagatgacatttttgattctgttcttaatttaaaacacacactcattttttaaagtttctaagtacgttttttatttgtatgtgatcatggttcatcagtataagaaaatatttagccagttctgtttcgtaaagtcttcaagaaagataatagcttgggtggactgcttcttcatgcactttattaatgtggcttcctgttaagatctgaagccaggcagagatgtccacttttgctacttatatttaaaattgtactgcaggttcagaaatcaaaggcatccggattgggaagaaagaaagaaaactctctttattttcagatgaattgagcctgtactagaaaacctaaaggaacacatgcccaatcccgattcccccaaagtacgaaccgactaatgagttcagcaaccttacaggataaaagattagtatacaaaaatcaattgtatttttacatactagcaccaagcaatctgaaacccacattatgaacacaattctgaggaataaatttaataaaatcagtgcaagactagtttattgctaaatgagagttatcccatgttcatggattggaagactcaatattgttaaatcttcctaaaatgatttgtagattcagtgcaatccttatacaattttagtatgcatctttttaaaaaaaattgtcaagctgtttctaacagtatagaaatgtagatgacctagaataaacaaaacaattcggaaagggaagaaaaaaagattaggggtcttatatttcttagtttcaaaacttactacaaagctatactattcaaatcagtgtgttactggtgtaaggatagacagtggtgtaagcatagataatggtacagaattgagagtctagaaataaaccattacattattgtcaattgatttctctacagaggtaccaaagcaattcaaaagcaattcaattcaatagtcttttcaatgaatagtgctaggacaattggatatccacatgcaaaaaaggtaaatttaaattcttaccgcacacggtacatagaatttaactcaaaatggatcctaggctaaagtgtagaaggttaagctaaatcttttagcacaacataataaaaagtcttcatgaccttgagttaggcaaagagttcttagatattaaactggaagcacagcatgtcaaattacttttcgagaaggtttgctagctcattcagtgggtgaaaatgggtgaaaagtgagcacattatttaactatattctcttgttcctagttaggttgaacatatttttacttaccactcaaaaatattaccactttctgggctcttgtaggtctctgtcacatcttcgaactcaccaaacctttcaggagaaaatagttccttggagaagtacataaagttgtgggactttgtaccttggattacactttccctgtcaactctgggtcctccatagtggggaatccatagtggtttttgtcctgcaaataaaacagtgtgactaagtaattttccagaaatgaacagcagagtgggaaatagacataagtgagagtaatataacaatcacggtgtgataaattagcatgggatttgaaatcaacctgtttgggttcaaatcatggttcacctcttaccggttttgcaaaccttgggtcagttacttaactccatcaaatccttcacttcatctgcaaaatagagataagaaaattccttttctcttagtgttgctttgagcatcaaatgaaaaaatgtgtgtaaatgtttagtgctttgtacctagcatataggaacccattattaagtaatattacagtttggatttcagacctgtgagcttagggctcagactctagaggttcctgaactaggttttcctaggcattgcatgtagagtcttatcttaaaaaagttttaattgaaagattggcagcaaattcttcttgtcacttcagacatgatttcctttggggctcttgtactcccatggtttgaattcatagagtaactcaagggcaatagggaattcctctcaactctctgtctccaagaatacctctgggtgctggagagatgccacttatcaattctgttgttattgtttttagggctgtaagccttctggatagaactcagtggattttcctgagtagtgaagaattaagtgagatgagggaaaagcattgagagtaattatcagcagtggactatgcctgagtttttgttagccctgaacttacatatcctgactttactagtccatgagttcttcatagtcaggaactgtaccttttaattctctgcatctcctaggggctttctcagtgctaagcaaatagtaaatattcatgagatactgggattgtgcccagcattttctgagttttcaaatagatgaagttatagaatcatattcatatcaaaggaagttcctgtgtataatctcatttcattctgtcaacaaccctaggcttggggtgggtgtgttggtgtggatgagaacacttagtatccctattttacaagtaggaaaagtaagacccagataagttaatgacttgctaaaaatgatacagctcttgagagacagcagacatttgaatcccatctactgattctaggtcctatggtcattcctttgctttatgttgcctgttttgcagactgtcaaacgcatcagacacttccagtggtttttcagtgggtttttgtcctagtgacagtccacacatcctgctctcctattatcacatttgcaggaggaagtgagacatcttttgacactggtgatatgggagaaggagaaaaatcctagaatcaaagatacttactccttgcttccctctactcatactctctggaaagaaacgtttagggacttcttgtgttgtgcctgttgtgccaggacagctcaaatggatgcttttgtcacagcccctccacctttagcagaagttgttgtattcctagccaatgcaaaaataaacaagtgagggaaaatgacatttcctggtaatggaaagtagcagttggtgagactttagacaagaagcgggtgttccagccaatgagcagtgaccacagtggagctagttgtcggtttacttggctgaagaatatgtttgcctgcatcctgattgtcaataaagacgtttaaaaaccccagcttgactctggcgggctgagggtgctgccgtgccactgctgcaggatggagctctcttcctggtggagacttgattcacaaggacgctaattattcattcttcctccgtgcagcccgctgaaacaattgctgtgcttgttcggtgcacagtgtggcgtcggacagtcaggcctttttatgtaactgatggcgctgtatgttcatattgttctttatgtacttattttatagcttatgcagcagacattcgagtcaattagcttcttgtcttgcaaactgggcactgctgttctagaaccaagttagaagggtgtgttgagggcgacccgggcagacctctctcctttctttttgtgctgtgtgggttggtttcaagttacagcatttttattggctcttgtttgctgaaccttggtttcaaaagctgatgtttgagttgaatttcttaaagatacagcttttgttttcacaaaactgaagtcaggcaatatgcatagcccttgggagtgtgggttttttttttttttaactgagtgattttttttttttttaaatggtacctattaaccaaaaaatctaagcgaatggtttcctaactcacttttccttaactggcgtcagcatggagtccttgtttcttattgatttgcatttttttttttttctgtatagccttactcctgactcttttgtcctgaattttttttttttttaccccgtatttcttgaaacctgcctgttttggggacaagttggagtttaaataaattagttaaattctgttgtgtatatttctgcagatgataatgtttatgaagcatagattcactgttttgtgaggatttttaaatatcggaaagaaaatttcctgcttcctctttccatctccttttctgtggttttagccccctcgcccttaagagccatcggtttgttattgctgattgaggtagtggtggtggaagcagaggctctgatccagagaaactccccaagacggaagtgcagcaggcaggatttttatccagcggattttgacccagtagaccctaaagaaggtgcatgacagagactcatatttaccataccattgaattctcagagctttccgtggtggctggcccaaggcaattgttcaaaacatacgtgagagaatgaatgaacaaatgaccttgcctaccaaacgtctccctccctctgtgtaagcatcccttaaactctcccaacccaggtggccttgacatatcccatgctcacccaggaccctgaagtatgcctcggagcaactggtttctcctgaccagttagtgtcaactgagactaatgcagaaaacattgcttaccctaatgtttgcctttagaagtaaaatccaaactgaaggaaaggaccttgaatttgttttttattcttgctgacttggaacattgataatgctcatactgatcctctggctaaacatttttcttcctttatccatgtatttattgagctctccactgttagcatgaaaggtggagaagcaggaatacatggtgtgtgcttctgctagccttttactgtccagttgtagagagtaggcccagtgaactcagtcaggtgtttataagattgagcaattgagcagttgctgtatcctgaagactgtatctggtgctttactcttgtataattcttgagacaggaatacctgggtgttggcatcaaggggctgttgaggccatctttatttctccataacacccagcacaagacatttacatgtatgggttgggtagggtaggagttcatagctgtccatagagcagggcagggacatttctgagaaggtcagagaggtttgatgaggtgattttcctgagctgggccttgggagtggagagatagagggagaacaggtgcatggacacagaggccagaagggcatcagacaaaggacccctggggctgtgggaaagcccccgagccattgggaaatagaggagcttagccttgctaagaggagagaattcagagagccatgaggtgattgaggtttcaaagaccaaataaacaaaggaagacagcatcttggggagtgggcaagaccatgcctcacctggcaggtgaggtcagaggatacctgacctacgaagatccacaaaggctggcagtggggggcatcccagtggacagtgttgtgatgagcaaggggcccagaagtaggaagacttaaggagtcctaggccttaaggaagactcaacccaaacctggctacctctttaggcagcttgagtcttggcctctcctaccagctcctgaagggtagcttcatgttacatctggctgcagagaccctcctttttagaagcaggcagggagtggtgcccaggctctcaggacctcctcttgtctgggagactgcagcctccccacacgacacagcccagcccctttgttcttgagtgcctgctgctcacgtggtcttaataaacaaaatctagaacgtgctcatcctttaaaaaaatctgttagcctggttaacgtgtatataatatgtataaatatatgtatatacactaattatatataaattatattttgtgtcagttatatttgcaatcacacacacacacatgcacgcacacgcacatgcacatgcacatgcacattcacattgtaattcctatttaaagggaaaaacgagccagttttttaaagggaaaaaacaagcaaaaggtgtagggagagggagacacccatctctgcccccatccgctgattctcttcccttttctatcctccctctggctgggtttacggacaggcccttcttcctcctgcccttcatctgccgcaggacctcagtgctggtgatggtgagcccatgaccctccttctctcttgttctctgctcttgtggaggctagttccagccgttcagttccactgaagcaactgctttggcagacgaagctctctctgcctgaaatttcttactttcttccttctttggttcccatttcaccactccatggttcctcctccaggaagccttccttgtctggttttcttccttctaactctccccagccctgtctaaatcttacccttcttcagagcccatctcaaattttgtttcttccatgaattctttcctatagagcttgtccttctcctgccccctctgccagctgagggctttcttctttccctgaattcccccagtgccctgagctgatcttagatctgccttgtttgccattaattgaggagtacatattccccccaaactccttgagggcagatgctctgccttattgtctttgtgtcttaaaaatcttgctcttgtatagtcaagaaattattgtttgaaatggtttttaaaaatagggttctagaggtgtttttgttgttgttgttgtgttttttgtttgtttgttttaccaaaggaaaatattccacctggctgatatagtgagaccttatctctacaaacaattttaaaaattagccaagtgtggtgacgtgtgcctgtagtcccagctactcaggaggctgaggtgggaggattacttgagcctgggtggcagaggttgcaacaagccgagatcatcatgctgctgtactctagcctggtgacagagtgagacgctgtctcaaaaaaaaaaaaaaaatgtagagtctcagtttgcctataatatttatattgcacaataatacatttacttattttttacttattgaaatatgccacttgtttttaaatagcatgtaagatgcagatatttgcacttttaattgatatgccaggcaggagatttactgctctcaacaggtattaagaggtaggaaagctgccccccggcaagtttcttagcactgtggaactgatcctagtgccatggtgagtaagtggcagacctcagattcacaccacgtctctgactcccaataaaccacactgtccccccacccccaaccctcatggtgattaaaatgattactatgtacacacaaaatatattaggttacaggttttttgtttacaattctaagcttctaagctctgttcatttgtatcttcataatttgggggcctatgaaggattgtttatccctaaattgaaagcaagcaaactaacaaaaaatgagatcaaacattgtcagagacggttgttcagttaatccaagcattcaacaagggttataaatacggcatagaagactagggggaaaaatccaagtttttgataaattgtcctcaaagctaaactgtttcttagcaaagtgagaaaaggcataatgttcccaagaccaaatttaatctatacattcttggtaagaccttatttttctcctctttccattaagtttaaggtttccttctgcttcttgcactaatcattaataactatactgttgtcacagctcaaaactttcctattgacacttcagtcatttttaaagatcttgaatgttcaacctctatgaagctaaccttttgcactctattaaaatttaagaaccatttgattctcagtgaatgccccagctactggatcatgaaagcattaccttgtgccaagggcatgatgcagaacactcattcctttttaacaaataagaagaagtttgacttttcatttacacatcctgccaattgctaacaagtttccatctcgttcaaacaccagattgatcctaagaaattgaaaatattgatttaaccctctgtctgatttgtactgcaggcacctgctagtgcagtcttagcacattacaattgcttggctgtaattcctcaggggaccactaataactaccacatctgtcttttcatcttccgaaattatgctagcagttgtccaagtcaattgtgattcatttgatactgctctccttcaagacatattgcaaccaaatagacttgctcaccagtaatatatctgatgacatagttagttcttgttaattgacagaatgattcaggcttttatggatggcattaattggtcccttgtgtccatgcaataattgaccagacagagaaggcagcattttctttcaccaagtcaggagagttttgaggtgagataaatgtagtaaggatgacaaaatgtctatatttttaatcaagactttatcaatgagttgaaaaaagaagatttggggggaattcagatcatcttaattatgaacattgcattgcagcctgcagagatgtgctgaaatgcaggtctgccttctctttggcctccttgtgctgaatattttaatgcagggtacaacatgaatctaatatatgcaaagcagaagagtgctgtacctgaactaagataatgaaaaaggagaactataagtagctttgtttttcttttgacattcatcattagtgacccaatagactgggcatgtaaaatctgaaaatgtggaatttgcattacctcctgcttgctgagagagccagaacgttagttacatttactcctgttgccatgctactaaaaaaaaaagcgttggttccttttttcctacaggataaagttttcatatataacaattttcacaaactgcctccaccatttattcttccttcccatttggtcacacagaattaatatttccaagttatggtaccattttgtcccttttttgtacttagtatgctctttctttaattagtcattttatagattcccactcattcttcaagaatcccataggtgcctcccgaatttctcaaaccaaattagctgccccctccttgtgtttactcatttggttgcttatttccccaactagaccttgagcttgccttgggcgtgggctgtgtctgtttgcttgacacaggcagttatgtaaggacttaataaatgtttatggaattgagttgcaattgttgcattttgaggaatgagaatttaagatttgaatccgagagagatgacttggatcaaactagatgtcaagcaacctgtacttccaatgtgaataagtggctgacgaccagccctggggaataattataatttggtgtaaaacaaaccatttgaggtgtggaagatgaattagtcagttgacgtttgtagaggggagggtgagatatgagttatgtggaatagattttctggtgtttgatttacttagactattctttttaaatcatttgtcacataggatagacagtggctgtaacagatatccatggaaactttggacttgtgaacatctgacatgacctccttttaagggcagtgcaatctgacagacctgggctgaaatcccagtgctaccatttattagatttgtgttttgagtgagctccttaattggtctgaggctgtttcctcatctgtaaaatgaaaataatgacagcctctgttgacttttatgatagtggagagagatgtatgggaagtgtgttgcacaacgcctggtggtatacagtagacacttgataaatggtacctgttaccaattaaagatattttttgtttgtttgtttgtgtgttgttttcttgtagggatggggtctcacagtgttgcccaggctggtcttgaactcctgggctccagcgatcatcctgcctcagcctcccaaagtattgggattacagaggttcacacctctgtgcccactctttttttttttttttcttaattttaagtttgtttgtagaggtgggatcttgctgtgttgcccaggctggtctcaaattcttggcctcaagctatcctcctgccttggcctcccaaagtgctgagattacagagcaattatagataagttttgactctgtttcttcctgagagttctgaaaggcagagggtaaatacaattgtgtatatagagaaaatgctttagagttttgtgatttttttatattgcctctagttgcacaaggctgaccatgtctctgtgacaatatatatcactttcatggggttcagagcttcttgttatagctcaggaagttacagagggagattgggagctaatgcaccaaaaccggcagtgagtatgtgtaatggggtcaaaccttgttggttttttttagctacaaagcagcagatcggccactgtgatagaatttgatttttactggtttgggatagattcctggtgatgctgatagtttattacccaatgtaggtctagaatttatacttgcagagcattttcatatttgtgggagaataaatttatttggctctgaggttggttggttggttggtttgagaaggagtgttgctccgtcacccaggctggagtgcagtggcgcagtctcggtcactgcagcttcagcctcccaagtaggtggaattataggctcgtgccagcacacccggctaattttttttttttttttgtatttttagtagagtaggggtttcgcaatgttgaccaggctggtctcaactcctggcctcatgtgatccgcccgccttggcctcccaaagtgttgggattataggcgtgagccaccgtacccggtggctctgaggtttttaaatggtaacacttaagtaaacaaactctagtttctttctaacatatggctggcctagaagaatgtgttattttttcataatctacaggtagagaaatagaagaagagaacttctattcaaagaggcaaactcagggattctgaatgccttaatgctgctatttggagttttatttgaaagcattaatattttctttttgggggtggatggagaaaggagaggtcttagtcaacgggtacaaagtttcagttaggaggaataagttctagtgatctcttgcacagcatagtgactatagttaataataatgtggcgtatatttcaaaattgccaaaagactaggttttaaatgttctcgtcacaaagaaatgataagaatatgaggtggcagatgtgttaattagcctgatttaatgattctgcaatgtatacatatatgataacatcatatgatatcacaaatttatctgtcagttagaagcaaaattaaaaaaagatcttttaggccgggtgtggtggctcacgcctgtaatcccagcgcttcaggaggccgaggtgggtggatcatgaggtcaggagatgaagaccatcccggctaacacggtgaaaccctgtctctactaaaaatacaaaaaattagccgggcgtggtggcgggcgcctgtagtcccagctactcgggaggctgaggcaggagaatggcgtgaaccgggcaggcggagcttgcagtgagtcaagattgcaccactgccgtctagcctgggtgacagagcgagactccgtctcaaaaaaaaaaaaaaaaattgttgcttttcccgcgatgatgaataaaggggtcacttagtgtagtgtggatgagttcaactagactgcttcctcctaaccccaaactggaatcgttatgttgcgagcatgagactttagcttggaggagagagcgggtttggtaattttggaacctggtaaactttaggggccttagtaaatttcaaatatatgctacaggattgctaattatagtcaacttgctgtatattaaagctccagaatgtatttatttttgtgccacctttcagtttctgatttcagtccctggaaaaccacccattcttgtgctgactattccaccaactagtttatctgccttagaggttattttggtaaactttcactgcatcacggacttagcagggtaaaagtcggagagtaatggtacatttgtcataacaagaaaaagcggatctatttttctttggcaaagatcacctttggaaagtgttgtattatgaaatgcagagttaaatacaactaactcagctttgatgtgtcctttgttaacgttcagcctctaagcgcaagttgattaatgatgcacatcccacagtgactttttctcaagcccagcaaactcatatataccctagtgtataaaagcaaacaacttaattaacttactcttcatccataattatcttgaaattaactacttataatgtccaaaagtttatgctgcaagcatatttaaaaatctgttgagagtaaaagggacggtataattggttaccctcttcctttcttgcccacttagctattaatatgaaaagtagctactcccctcatactctttggctgtgtgcttaaaattattattattttaatttctgcaaacaagaaaagggctttctgttattttttcattgagcccctgccctgggccaggcatcgggtcctcagtaacggacagggcagttttggctactgttctcaatgagattagagtctctttggaagctacagataggttatactagtctggtagggctgccataatagaatactgggtggattaaacaacagaaattaattttctcccagttctgcagcctggaagcccaagagatcaaggtattaacaggtttagttactcctggtacctctctccttggcttgtagatggccgtcttctcattgtgtcctcacacggcctttcctttgtgttcacgcatctctggtctctctttctctccttcttcttccttcttccttctttctcccttctcccttctcccttctcccttctccttctccttcttcttctcctcctccttcttcttcctcctcttcctcttcttcttccttctcttcctcttcttccttctttcttccttcttcttttttttttttttgagactgagttttgcccttgttgcccaggctagagtgcaatggcgcgatctcatctcagtgaaacctctgcctccagagttcaagcgattctcctgcctcagcctcccaagcagctggtgcctgccaccacgcccgctaatttttttgtatttttttagtagagactggttttcaccatgttggccaggctggtctcgaactcctgacctcagatgatctgccctcctgggactcccaaagtgctgggattacaggtgtgagccaccgtgcccagcctaatctatgggattttgaagacaatactgtcacttaatgacttacaacacatcctcatgagacctaataacagaagttctgggttctgtgttaatacgggacttccttttgtgaaacttgtaatacactcaggagaaatgtgtgacaaataggattctactttttaggggcatttggagcactgtattgtccttgggtaataatgcttaatgtggacgatgctacatggcctccaagaatatccctaggcccttgatcctttaagggagaaaaccaacctttacttttcgattgtgtaattgtgatcagaatagcctctgagatataaattccaaatatatctgaattggttttctttaattaagaatacttttggattcaaatcatactggcagcaaattaaagacatgtttcatgtgtttactaaatgttaatgatgggattactttgaagataaattttaacattttaagtaaaacgttcatgtaaaacaaaagtttattatagattggttttaaaatgagcactgcttcagagtcaggatattcttagtaaacccacaagtgttgtggccttgtgcacgtcttttggtttctttttgctttcattttgtcatcagcaaaattgaaattgttagatgaaattgtctctaaagtgttttctagagccaaacatttctgattctctaatattaaagtctctaagagagtttctctaagcccaggcagtacagttaaaaatattttcgttgtttgcttgttggttatagagtgataatattttgcaattaggaagcttggatgagaaaccacacacgtgacataaaatggtttctcaacagaaaatctgtgccgctcaaactggggaaacagacttataaattccttttgacaaaagacacgtcaccacacaagcaagttaggacagaactctgagcattgtttttcatagacttgggacaattcccaaatattcttttttctcaaaacaatatttttcattccaatttacttattaaaaaaaaaaactgggagccgggcatggtggcttacgcctataatcttagcactttgggaggcagaggccagtggatcacctgaggtcaggagtttgagaccagcctggctaacatagtgaaacaccgtctctactaaaaatacaaaaattagccgggtgtggtaatgcacgcctgtagtcccagctgctcgggaggctgagacaggagaattgcttgaacctgggaagtggaggctgcagtgagtcaagagcgtgacactgtactccagcctcggtgacagagtgagattctgtctcaaaacaaaacaaacaaacaaaaaacaaagctctttttgaagatcacgagcttcagaaagaaatactgcatccactctgtccacatgtttctggcctgtccattcagttaacagttattatgtcccaggtgctaggctgtgtcctggggactgaggtaacagaaattacaggataaagctcctgccgtgtagtagtactttagggagtagtagagatgttggttgggaaagaagtgatgccagaatgtggcgggggttatcagagcaggttcagaacgtaaggagcacgaccagggaatcactaacttcgcgtaatggaagggtttgtttcagttggatattaaaagatgaatagaaatttgcaggcagcaacaagagttggcattctaggtgtagtaggggactatatgatagaaagcccacattgaaggtaatgtggtaagactcattaatctaagaaagatccttctggttgtagccttaaggaagggtgagagtgggaacagatggaaagtaaggaaaacagttcggaggcagctttaagagaccagaaacgggcctggcgcggtggttcacgcctgtaatccaagcactttgggaggccgaggcgggtgaatcatgaggtcaggagatcaagaccatcctggctaacatggtgaaatcccgtctctactaaaaatacaaaaaattagccaggtgtggtggcgggcgcctgtagtcccagctacttgggaggctgaggcagaagaatggcgtgaacccgggaggcggagcttgcagtgagcctggatcgcgccactgcactccagcctgggcgacagagcgagactctgcctcaaaaaaaaaaaaaaaagaaaaaaaaaagaccagaaacgaaatcgggccaaggcaagaagggtggaaggtggatgagtctgagagatggatgttttcactatggaatggttgtgtaaggatggggagtcagaagaagccatgagaagcttgtgagagttaagaggccatattcagtgttgtgctggtaaatataacctcctataattaaattgtaaagaggtcagtccaaattcatgtactggggttgatcgtttctgcgtaatagtctttcacttaacttttactcattttcactttcacgaaataaatggccgtgtcttagcctgggggcctaggtctggggttcggctgtgtgctcttcctgcagtttggaagtgccgtctatgttaatagatattcccaactctgcagatcttctctcgaggctgaaggggccccattcctatcagaagcctctcatttttctctgaggtagaaaaactaaggcatagacttcatagggaagtttatatgcaaatggtggctttctgcacgggcccctgtgagtggagtgggatgagatacccagtggctttcagagttctggtggatatttgattgctctccattggtagtaactttattgcttttatagggagagttgtactggaaatttgccctccctgtccttcagctggtttgttcccaagccagacctgtctgaaaattgaaatggaatactttttctcatctcaagttatcagttgtagctgtcaggaatttgttactgtctgctaaagccttttaacatgaaaatacgctaagggcagtgcatgtgtgagtcatgtgggaagttacattattttatggatgcagagagggacacagacccagatttattcataggtgaaaggggaaaaggaacagaatttaaaagggaaatcctgaaaaatatgtagcctctgtggctctgcctcttttcctacctgcgtctcttatacaccatggatagaatgtaagctcagtgggtacagaagagctgtcttttttccctcctttggtcttcttagctgtccccaccaggccatgcctataatcggtgcttagcaagctactggcttaagagagtctctgtctgctgtgagtgcagctcctgagatggtggggatggatgctggttaggaagtgtgttcgctgccttagcataaagaataagtacagtttttctcgattatttttctccaagggaaactcaatggggaatgtcggtttcatgctgttcttggaggggttggtttagaattctctctggcttttctgagaatccctccacattccccctccaggctgctgtcatggtagctgcccttctttcagctacttgcattttttgggagatatgccatcttccttcagtttgcaccctggtagcttagctccttcagtgtttagagggaaatgggagatggagaatcgaagcacactagtgctttctggtgttctctgcatgtgtttggaaggaatgtaaaagtagctagggcttatcgtggtatcatagcattatagggtatgagacctttggggaaactgaggctcacaaaggctgataactttacctagagtcagtgactgctaatggcagactcctagcgtctgtacttttccacacttacccgttcatatgaaatagtctgggaaggtctcttttaaaatgtatcgtgacctctcctataaacctcaaggttacatatgttaaagaaatgtagtcggctttcctcatgtgccgaattctgaatcaagcttacccaaacccccaaatcatttccacagagcagaggaaaaaaacaaaacaaaacaaaacaaaacaggcaaatgtgaatcatgggaacctattataatgatatatagcttgtcataacacattataatattacagcaaatgtatttaactcactgaacgttctcagggggctcttagctccctttaaaagtgttctccaaatctctgcagcaagatggagctgcctagtccacctcacttttgaccaaaccaccgttacgagaatacctattgaaaacccttacactgttgctgtttccctgggcttaaaagtatgtttggttttgtcagtacctggaaacaggaagttgagatttgaggagaaatctttggcagttgtgcactaagcttgcgggagttaggagtctgttgccacggaaaccacactgctgcctcatttattaatggaggcttggtgaacttccggagatactcttagcctgtcctgtaaattcattctagagaaatgcagggtgacttttaagagatttctctgtcgtttctcaagcattctctcctgggtcttcatgagctccagaaaattgcttgtatgcaggttcagaaccactgatttttatctggcaagcatgtctgaaggccgtttcctttttttcatgcttaaatcgtgtttatgcctgcctgccttgtccaataagtgaatttttttttattatgctgcctttaagaattacatggatttcaaatgaaggaagaaggaatacaaaaatgaactaagtaaatatattgaaaaccttctgacactaactttaagagagttataagcatcaaagccttttctaacttttaaaattctaaacttaaaaaatctaaaatgaatggtttatttcttctaattccagtgagatactttaagaacatttgtctgagacattttcaaattttgttctaatttcactaaactaactctattctgctaggcagagtaacagcattggaagttgcttccaggaaaaaaaaaattttttttctagctaattgtttatctgggaggatgcaaatggtggttttaagtcctttaagtcatccatcatgcctggcagcctctattgtctcattgttggatttgagccaagtcaggccctttcttggtcttgggagggtgcacatagatcttgctctgccaaatctgtgttcacaaggagtccgagcccagctctaagggtaggtaatgttgtcagatctatagatcccctcagattggaaaagatcatgcatcctcgttccttatgtcacactaaagtagaaagtagcactctattcaaagtagaagtgacaggacttgttccctcagttcttccagtgtctacgaattactgttagtttttaaacgcatttttgtggatgtaataaaatactgtttatagtcagctacgaagtaagtaattacaatgcgggaaatgaaattcaatatagctttgttgtggttttttgaattttaattaaaccagtcttagagtaaattataaatgctgctgcttttgttgtgacaagtgacattgacaaaatattaatctaatggattgttattcacaaaagctaaatcttttcaaatctgcagggtttggttgtttattttgttttacttttcagtttgtgttttaaaaagtctagagaaaagaataaagttttaaaaccacatgaaataactccatgtatggaatatttcattgttgatgtcttgccagccataattgcatgcatctcatttatggcgctgaaaacttgttctttttaaaaatcagatgtttctgtggtcacttttttgttattaaaactggagccgggttaaataaccaaccattgaccacgaagcctaatattaaaggaataatcagcccatgttcctattagatcatttccgttttcttttactttataaattaccttgttgcttaaaaatgacattttgttggttgtgaagtcctcttatagctaaattattcaagttattttctttggagattcttttaacttgaatttatataaactgtaaagaatgtacattaaatattcagaaacttttctttatgccagtttcttattttcacccatcatgacttaaagcttttttttgttttagcattttaatgtttaaataaatgtaaataatttagttacaaggtctttatggtagtgccgccattgtttttaagaagacaaattttaatccaaggttaaaaacttcacatttgcttatctctttttcctcttaagaactaagagtccagagattagagtaaaatcaccttttcctcatagttttttctttcaacgtgttagaaattcctgtttgaaaaggaaagccagttcctccccctttttatgtttgaggggatgatggtaaaatcacattattcagtcagtttccacatgtgatttgttgcctatattttttaatccagggattaaattgttgccaccaccagcatcaaatcattggggggcaggggtggggaaggtgcgagacagttggttatagacatccaaatatgacgacagaaaaatctccacagcaatatggcagtggagcatttgctgacttcagagtgccagatcaaccccaatatttttttcagggatgctaaacctcttgtaactgctaaattggatttgttactgaatgaagtatcagctgctgttggacaagaccataaaagccagccggctggccctttgtaggcagggcttacccaacgattgatatgttttagcacttttgggattattgtgattaagaggaaaccattctgaatgagtgagcaaagggggtaaggacacacagcccacagctggtgagcagcatgtgttggctccaaggaagtcaccattatggctttctcctggttcctgccctgattgacgtgtatgaaatcttttttttttttttttttttttttggagacagggtctcgcctgtcgcccaggctaaagtgcagtggcgcaatcttggctcactgcaacctctgcctcctggattcaagcaattctctgcctcagcctcctgagtagctgggactacaggcacccactaccatgcccggctaatttttgtatttttagtagacacggggtttcaccatcttggccaggctgttgttgaactcctgacctcaagtgatccaccctcggcctctgaaattgctgggattacaggcatgagccactgtgccgggcctagaatttttatatgaggaagtggtgtccttattttctccagttgcagctctctctgcagggaaagagacatttggaatgttgtggacttgagaactctgaatgctttcaaagcactatcgtgtgtgtgtgcgcacacgcacacacagtagctagaagtgttagtctagcacaggagttaattgagttaatgtgtagggaattcagtaataacaacagagcgtcctctttcatttcccagatccaaagctctgtgacatgcattaacaatatacctccatgtagtttgtgtctcagtctgtgtacacgtgtgtgatggctaaatgggaactgcacagccagtggatttgtgaacttgagcacttgcacctggctaagggtttattaagtgtggaaaccgtactgttgttgtaaaacagttttcatctcaagaaccacctgccccttttagcggtggccttttgcacgtgtcttgcactagccaagacaagtctatccaagagggagcttgtggagtaggttggtgtttgaatctttcccagtactcccaaatgcacatagaattggtcgcctctctgggtgtcccagggggctgtgccccgctcatgttcagagtttgctcagcataccacacaggaaagaggccggcttgccaggtcctgcggagcgcctttccaagcctgtgaaaggcacgaatcatccagcagccgagcatgcttacagctggccctttgctagctttgatctgcgaatcaggccacaccatgaatgcacttattgtcatgttatgtgtacacagtgtgtgaattattgaaaatagggaggcctgagcctcatctggtagagattacagtgcaggcatgctgggcgaaggtctgtaattgaaaatccccagatgctgtttatttggcctttgtcacatgacctgctgcaggaagattgtctgaacaaaatgttgcctgcatggagagtggagcccgccctcccccaccccccagagcctccacaggctcagtctgtgcacagcttaaacacctgcccaaaggatttttaaaggcttaaaatagattcactcatagcatttaaatagagggcatcttgcttgttggtttaaactgcttaagcggttgttgacttgtggaaccttctatccacacaagggtttgctggataatttcactctgagatatctttacaaagcaacattcagggcccgagccacataagtagtttgggctctgcctttttttttttagaagtcaaacttctgtgtggtgaatgagcttgcagataaagctgtgttgactgtatatattccttctgtctgtagaaaatattgtgggtactgagaataaggccctgagttagcatgtctgacttccgtttgtccagttcattcttacctattctgcctataaacaagttgaggtgtttcttagaaaatttgtttttctcaattaaatgctgaatgttatgctctctgtcagtggtggattgaagtaggatactaaatctgaaattgatgaagatcacaagaattaaaaacagggaagattgagctaattttgaagtaagaagggctttaagctttccaggttcattctgttagggaacaaaacagccacatgtcctctttcattgccagtctgtctcagctgtgcttgtggcttcctctttgatttcttggagcttaagaagaggaaagattcatgggtatttctgcattccataagcatccaacacgactgtgagctccttgaaggcaggagccctgttgcattcttctttgcatccccagtgcctgccaacacagtgctttctctgtcttcctgcggcttccccctccctttctgcctgcccattcaaagaagacagtcactgcgtcccatgagccatgatgtcatatattcagatattttttctttcagggagagactcaagtcaacagtagcaatatcattaagtagcacattcttcatgcagggccagaggttgggaggatggagtagttgggagtaggatgtgggtcctgccttcacaaagctcacaatctgccaaggaaaaagcaaaaacaggcagaatgtggtgtagcaagcttgtgctagcagtgtgcacaaagtatggtgagcaggaggggcagacccagcccactgctggggagtgagtggaggaagtgccagctgcagaggcctggcagctcaggaatcattcattgttcagtagatttggtggggtgggggtgggggtggtggccatttcacacaaaggaaatagcacccaacatgacaggaataaggatttttagagacagaagtgtgtgtagagagtggcaggagaaaagacaaaaactgatttgcccatgtaacgttttaattttttacggatagaatgtgttcatgtgttacctagatcattagaaatttattttattttattttagtttttagagacgggtcttgctctgttggccaggttgttcttgaactcctggcctcaagcagtcctcctgtcttggcctcccaaggtgctaggattataggcgtcagccactgtgcccagcctagaaatttaaaaggagaagaaaaaccaagcagctgtcctgaatctaagctcaactgaggaaggtgattttcttggtttgcttggtcatcatctccagtgggaaccctatatcataggccactgctttctctgtcgtgactagctggtatggggttacctctggctgcttctagttttgagataggtctgatgtggctagggcagtggggtcagtgagccagagcatggcaaccctaggaggaaacatctctgggcacctgtctcaggcccttcctgagtacatctatccatctaatcgttccgtctttgattaccattgtttggcttctagcctcatttctcttcctagaccataaactccttgagggcagagagtgtgtattattccagcgtgtttctcttctagagcctagcctaattccttttgtacagaaaatattctataaattttattgaatgggagaggaaagtgccttggggccagattatgtaggccttggatgcttagagagttgaggctttattcttctgtattgtggatgagaaattagagaactttaaagtgatgtgtgtacaattcagtccatttcatggctggattctgccgccatctaagattttgttctcattaaacacttaacagttggtctaatgttaaggattaaggaacttggaagacaaagctgggttcaaatcccgactccactgcttaattagtttgggaacttgggcaagtttcttaacttctttgaactgcagtttcagcatgtataaaatgctgagctaggtagaattaggtgaatgtgaaggttaaatttgtggtgtataagcacagtgctttggccaggtgcagtggcttatgcctgtaatcccagtactttgtgaggctgaagcaggaggattgcttgaggccagtagttcaaaaccagcatgggcaacacagtgagaccccatctctacaaaaaattaaaaaaaaaaatagctgcgtatagtggcacacgtctgtagtcctagctactcaggagactgaggtgggaggattgcttgaaaccaggaggtctaggtggcactgagtcatgatcacaccactgtactccagcctgggcaacagagtgagacgctgcctcaccaaaaaaataaaataaaaaaaagcacagtgctttgcatagtgctggtgcatagtagatacacagtgcatgtcattgcccaactttcttgctttttttttctttctttttattttgagatggaatctcgctctgttgcccaggctggagtgcagtggcactgtctgggctcactgcaacctccgcctctcggattcaagcgattctcctgcctcagcctcccgagtagctgggattagaagcacatgccaccgtgtccagctaatttttttgtatttttagtagagatgggattttgccatgttggccaggctggtctcaaactcctgacctcaagtgatccacctggacctcccaaaagtgctgggattacaggcttgagccaccgttccctgcaaaagcccaactttctatagcctcccaccatctctaaactccgcaatagtgtttcatttagcttattccctgaatttcaatttcttcagtttgagttcattttaaaaatgttattccttctcatcatgcttttcatatttttattagattactgagtgcctagacatttagatactccttcagcatgttttctaagcagcaagtcatccctgagcatgccattttgacttaatgcttgcataacttacctttgtgtagctattgttgtagtagcttcagaagttgatagaattcttctggtgatagttgtttttacaacaagaactaaatactggacgtccagtgagggacatgctgtttaatgcaacacctccagcctattcatagacttaattatacagtctgtcacaaattttaagaattttggctatacttaccttctggcaaaaacctcattcctgctatttattcagtggagaatctatttcaaattaaaagatttgtgccctcttaatgttaagatagtgccctcttaatgttaagatatcacaataagtgctctgtttacttggaaacaatttttaggaccatgtcattttgaaaattgaagaagatacaaagattggaaaagatgttcaatttcaacaacattagcaatagaagcatcatgggtttataccagatgccatgtagtacggtgtcctgaacagaaaacctttttcaacccttttaggaccctatatatcagttcaagcaacgaagacatataaacctggtgcagtgacattacattacagttaaagaactgggccaggtgtggtgacacatgcctataatcccagcactttcggaggccgaggcgtgtgtatcacctgaggtcaggagttcgagcccagcatgaccagcgtggggaaactctgtctctactaaataacaaacaattagcctggcgtggtggctcatgcctgtaatcccagctactcaggaggctgaggcaggagaacagcttgaacccgggaggcggaggctgcagtgagccaaggtcgtgccattgctctccagcctgggcaacaggagtgaaactccatctcaaaaagagttgaaggaccattttagagccccagaaggtgccagagccttcccattttctgttactaatgcatacagcagccctctagagtaggaactgttatttccattttacaggtaaggaaatagaggtctagagaagttgagcaagtttcccaagttcacacagctcataagtccagtttcctcagaagaatctaggcagtcatacctttgagtcaaaaaaccagaaatcggcagcattgcatcattaaagattcttcattataaactagcggtgtttagcacttcaaatgtgtggatttcacacttctctaaggccaaataattaataaatagagtgcttttagcaaaccttttcattaataagactttcttgggttaatgttaagattagctttttttggaccaggtctctatggctgtggcttggggaagtggcagggacatgggtatagggcatgaagaagcaatgagcatgcattggtcataagagacgagaacaaaggtctgaaaaattgtgccacttctcactgaaatagttgcaactttaaaaggatttacagatttcaggtgatattggcagtgctgtctaattttcataatctttttctagatcttttcttcggattttctttatacaaaagaggtgagctccttcattcatttattaaaaccatttattgagcgagacacggaaagaaaaaaactatttcatgatctcacttatacgtggaatcttaaaaaaaagtcatacatatacagagtagagaaaaaacaacaacagaggatactaagaaccagaggaggagagaggaaacggatatgtaggtcaaaagatacaaagtagcagatatgcgtctagaggtctaatgtacaacataaggactatagttagaattatgctagacacttttaggaggattttaactattgtcgtcacacacaaaaaattactatgcgatgatagctatgttaatctgtttcactatggtagccattttattatctatatgtatctcaatatcactttgtaaacttcaaatatatgcagtaaaatttattttttaaaaaaatggctgggcgcagtggctcacacctgtaatcccagcactttgggaggctgaggtggacagatcacctgaggtcaggagttcgagaccagcctggccaacattgtgaaacccccttgtgtctctactaaaaatacaaaaagttagccagacatggtggcgggcaactgtaatcccagctacttgggaagttgaggcaggagaatcacttgaacccaggaggcagaggtgagctgagatcattccactgcactccagactgggcaacagagcaagactccatctccaaaaaaaggaaaaaaaaaaaactatttattgagcacgtacttaatagctaccagatctggggtcacagagaaccagacaggtgctttaccatggagcagtcactattctaggaggtggatgaatagtctgtagataagtaatggcagtgcagcagtagcaggggtgcatgctcagtacttgaggttacaaagcaggaaatgactaactcagtttggatggctcccacagacattggggaggaagtgttccaggtagggtatacaggaatgaataggactttgcaggtaaaagagaagagaaagaacatgtaaggataggtggttccacaaaggcatggaggtatctttggaaaagaatgacagtggtctggggaactctatgaagagccacattctagaatagaggagccctatacaggagtgggctcttagctttaggtaccagactaaggagtttgtgttttgcttgtagtggatgagaacctgttggtataggaaggcaacataactagatgtggaggtgaaagaaaagacaaatgcctgcaagatgagtggcaggacatggtgggcgcctgagagcctgtgggtagcagtctatttaggtcacagttgggggcagcaagttcaggctccattaaatctcatctttttttcctttttttttttttttcgagacagagtctcactctgttgcccaggctggagtgcagcggcgcgatcttggctcactgcaacctccgcccccttggttcaagcaattcccttgcctcagcctccctagtagctgggattacaggtgtgtgccaccacgtcaggctaatttttgtatttttagtagagacggggtttcaccatgttggccaggctggtctcaaactcctgacctcaagtgacccacccgccttggcctcccaaagtgctgggattacaggcatgagccaccatgcctggcctccattaaatctcatctacactttaagtgtatgggataccaagatgtgaaagacatggactgtaccttgaagaggcttgtagtctgttacacagggaactcagcagagtctgattgtgggcggttccctgacacatgaagtaaagaactatgagaccaggacagaatggtgaagctcatgctgcttgcctagttaagagtcaagccatcattcccctcatatactaagtgacttgtttttaattcatagtactttttgtttcactttataatattgtggtctttcccagttgctggtctggtgaagtgggctctgggcacctggctgtctggcttacccctcttcatacactccatgtctagcacatgtttcaggcacgtttcaggtgaggtttcttggaggggacatctgagctggacctggaaagattttccttggtggtcttaagggttattgcagctataataccttagcatggcagggtgggttcagggaactggaagcttggtaggtattttgatggtggtaaaatgaattgtggtggtggtcgtggtggtggtgtgtcatgaaaaatagttaggggccagatggtggggacaacactgaacaccatactaaagcagtttattcctttagatgtgggcagtaggagccttggaaggtcttataactgagaactgtgttttaggtagctgtgtagaggatggattagaaagaaaaatgatcagaggcatagttacagtggtaaggctagtcaaactactcattagaggattaagaaagtgattatgtggcgtatctttattgcctcatagagaatgagccactaagaaaacttcattcatatttctttttcatctagaaatagttagaacagaaataacttctatctaacatagcagtgttgtattcactatgcagccttaaacatttttacttgctcatctctttctgacccctgtaacccaaggcaaatgtgtagtttgtaagcggttcctctaagatgcgggagaacacagtgttctatggagttgtcacatgataatgttatcagctgccgttgactgatacaaactcctgagaaggtgggacttgagttatcgccagacactcactggcagggatatgagatagaagttctgagtaaccaggagttaacacagcctttctctgtatgttctttctctgaaagctgttttttttaataagcccctgggtgaatgcagacacatattatctccagggattgctattgtttacctcctgaaggccgtcagtcctttggtgaacttctagtttgggaacaagtagtaccagcccctgacaaccctgaatgggcggcctggctgtttctggtgattttccacattggtgctgatttctggtcaatgatttatattgaggattaactgagaacttcctcgttggatatgctgtgggactggttcagaggctgtttttcatgagcctgtccttacacctaatcttagcctgtgccccttctccctccctggctctccatccctctcactctgtcatttactccatcagtctgtagccactgaggacctgctgtgttctcagcactggatgcacagtgatgagcaaaacccagtttatgctctgggctcctgtggacttctctgtctggtagtagaggggtaggcacatgttcatcttatagtctcattcagataaatggaacacagtagctgtgctgtgtgctgtgaccgagaggcgtaggttcctgtgagagcacatgttagggtgatctgaccagttctcatgggttggagttcttccaaacaagacataagcacctccaaggcagagatggcgtgttttctttttctttctttttttagacagggtctcactctgttgtccaggctggagtacagtggtgtgatcttggctcactgcatgcttgaactcctgggttcaagcaatcctcctgcttcagcctcctgagtacctgggaccacaggcaggtgctaccaagcctggctgatttttttttttttttttttttaagagatagggtctcactctcagccaggctggtctcaaactcctgggctcaagttatcctcctgcctcagcctcccaaagtgcttggattacaggcgtgagccactgcacccagcttgagatggcatctttttacccccataattttagcatgtttcttgtgttccatccacacacagtccatgtgtgaccagtggatgactggccagcttccgtaggcctcctttcttttccactattgctgggacaagttgctatggcatccgtgtagaagaaatggttaattagtaactcctcacaggttagttaataaatgttctttactgcttcctctggcagtgtccacagatacatacctcctagatcttcaggaagatggatggggagataaaacacccccattctgtagacctctcccaagacagtgacatgtggtttcctcagtgtccccttcatctatactttttggttgttggcttgcttgctttctttttttttcttttttctttctttcttttttcttttttgttgagacggagtctcgctctgtcatcaggctagagtgctgtggcgtgatctcagctcactgcaacctctgactccctggttcaagcgactctcctgcctcagccccccgagtagctgggattacaggcatgtgccaccacgcccagcttatttttgtatttttagtagagatggggtttcaccatattggccaggatggtcttgatctcctgactgcgtgatccacctgccttggcctcccaaagtgctgggattacaggcatgagccattgcgcctgaccaggttgttggctttcatatcctaaaatatttttttccttttgatgaaccccagctgatgaaaacagacttcatgggctaagcacagtagttcacgcctgtaatcccagcactttgggaggccaaggcaggaggatcacttgaggctaggagttcgagactagcctgggcagcatagtgagacctctgtctctacaaaaaaaaaatttaagaattagccaggtgtggtgtacctgcctgtggtcccagctacttgggaggctgaggtgggaggatcacttgagcccgggagatcaaggctacagtgagccatgatcatgccactgcactccagcctgggcaacagagctagaccttgtcttaaaaaaaaaaaaaaaggagtggtgggggcatatgactagaaggcagtttagcactgtcttgtagaatcttgcctgagaaatttctttgtaaaccactctccccatgctttgtgctgatgccggcatggggtctcctgtggaagacatctttctttgcttctttccactgggttatcttcttcctttttttttttttttaactttatgttcatgatctggtgccaaattgggactacagggatgtaggagcctcttttctgacctgaagaatgactcggtccataaatgttgagccacctgagaaagggaggcggagaagagatccatgtcattggttcttgttgccaaggactttatgacttggttgcaatcatgacatgtgctgaaatgatatcacataaggcagaaaaaaatacaagttaccagcaaagaagcccaggtcaaaggctgtgaatgtttagggaaaggggaggcctccaccagctggtaggttcatgaaggatgaggccttgggaaggtaggcagattccagacatgcagaaatgggcaaggacagtacaggccatgacagcagttgtgcacccaggtacaaagttcaaggtgttcacaggaaacattcgataatctagtagtactactgggctgagcggggtggggggatatgtagaagacccttgtttgatgtagctttggtctagcagtcaagggaaatgagttttctttctgattttccttgttttaatatggaagaacggggtggagaatcctcacacatccttcccagtgaagggaaagggccagcagatgtttccttagagaagccaagctagagcttcctaggcccagggcagtccagtccttcatgggtgtgagtttgccttaggactggccacggccagggaagagaagcattgcatttgttgcttctttcttggtggctccctgactccattcaattacaaagtggctcttacactgttaaagcttgagtgtctctgggctacaatttctagccacagaccttcatttgctgtgcctcaaacatgaccttgaggccacatcacattatatatacagcccacaacaacgttaaccagtcttctatctggtaaggcaagcgcagtgcaaactccatgcctttcttctgggatctctctctgtattgcccctttagcaggaaattccatggcaatccaagatgcaagagaagccaatgatgggctcatttcgaactgtgttatattatttaggaaaaagaaaataaaatgaaataaaaactagattacagtgcctggtgaggatcacagtgtaaaagtgacaggtcaggttgtgtttgtccttgctgcttatgtgcagccggtgggaaagacaagggcagctacaactacagcatctgaggcttaaagaggtgacatgttgtgcatttctaaaataatttttatgttgtagagaagctttatatctctctctgactcactggacaggcgtggtgtaaggcagaaaggaagacggtccccaggtgactgcaggattgttttaggaaaataataagtaacttaaagttagctttattgaaagtcatttttgtagcatcaggtttactgaatcaagcatctctctctctctgtctctgtgtgtgtgtgtgtgtgtgtgtgtgtgtgtgtgttagaagatcatggctgcaacaggactatgctgcatagcttggagacccactttcagttacatcagtgatggtgctgcttatcttctggcccttaggaaatgctgcgtcttagtaacatgatcaaaatccagggctgtggaatctgtgagctcacccctttggagggcagggctgtagaaatatacataggggccagtgcggtggctcatgcctgtaatttcagcattttaggaggccgaggtgggcggattgcttgagcgcaggagtttgagaccagcctgggcaacatgatgaaatcctgtctttacaaaaaaatacaaaagttggtctggtatggtggagcaggcctgtagtcccatgagctaccacagtcccgtgctacttggagagctaaggcagaaggatcacttgaacctgagaggttgaggctgcagtgagccgagatcgtgccactgcactccagccagggtgataaatgtgagaccctgtctaaaagaaataaaggaaatagagataggacttaggatgtcgtatcagggccgctgacaagactctcctcagaacctagttgatacaccatgcatatacaatcccaaacagccaaaaagatcttccaaaattgtttggaatggcatacttctgtaaatgggtaagtataattaaattctggaaagatttagaattaaacatataaaattttagtagaattagagccatagtgttaatgtttttgatttaaaggatttatgtatatttgatatttcaagtaattaaaagaaataatttggcctaggtaacagatcagcctgtatttccaaattaaaatgtacaatgaagtagctcatttagacatttgatttgggggaaggttgaaattgtactagttttataagcaacattttagtgcatttaagataatttattaggtttctaagacttgtttaagggaagattttataatttaaaaagcaggtagttctaatatttaaaagaaataattacttattcatggcttgaaacatagatgaaagaaagaacatgggtttttgaaaagtgagcttgctcatctgaaaagcaaggacatgagagtgaagatgagctttcaatgaaataatgactacagcgtaatgcccaggccacagtactcagtaaggacctgttgaagtcataatttttagaagtcactgaacaacaggatacgttctgagaaatacgtcatcaggtgattttagtcattgttagaaaatcgtcaagtgtacttacacaaacctagatggaatagccaactacacacctaggctgcaaacctgtctggtgttaactgtactgaatactgtaggccattgtaacacaatggtaagacttgggtatctaaacataatctaaacatagaaaagacagtaaaaacatgccattataattttatgggaccaccatcatgtatgcagctcattgttgaccaaaatgtcatcatgtggtgcatgattgtacttcagtcaaagtgtgagttgacactgtttaactccaaggggtgccatttgtataggctgtggtacacagtcaaatagggctgtcttggatattgattttattcattcaactccaagtgctgcaagaaattaaaagttagtcaggttatgtgtcacatctatcaaggtattctgtctgttttcccagaaaataaacaagtttgagggtaggagacatttttgtcatctggacaaggttcggacaaaattgtatgtaatacagagccctggatctatttcgccttggccgctcaaatagccctgaacaggatgcacagtgaggccccaggttggaggatgcttggcttgtctgcagacattgtcatttagctctggcttctcgtaattaggtactcctagctgggctctgttgtcagcgagccttcaagacaaattgcaaaatctgtacaaccatctgagagatggagaagtagatccaatgatactacaggggatattggtagttctcaaaagtttgaaagagaatgcttagaaaagcaatcctcaaaactgaatttagaggttcttgtcctgtggtaaaagggttcacaggatctgagaagatcttgcaggcaggaatgatagactgaatctaaggggatgaaatggagtagaaaaaatgtaaggttctgttttgaggtctgaaaatctcagctatgcattaaaaagactggaaacaggggtagggacatatcagaagacgagcccgtatgaaaaagacctaggagtttaagttggcatatattgataatttattgtgctccttaaaaatttaatgcagtgtttggctgcattaacagaggtagagtatttaggatgagagaggtaataaactgactctgatgctatagcaggagcactgccacagttctggactccaagctttgaaaggaagacagacaaaggatggtcacaggatggtgtgtgggagtgttccaaagcttgtcagataacaaagtaacacaggaggtttagcttgtgtacaactccaagaggaccccagagctgctgttaatatctgaaaggcagttaaataaataagggactggacttcttgttaagaggaacaggaaggatctggggatgaaagttaaagcagacccccaaaaggagggtcttcttattcttaaatatgttctaagatagaatgggctacttcctcaattttagaagtgctgactaaggcttatgaggactttcaggaatgcgaatggatgacctaggggtactttctagcccccagatttcatgattcctttgccttccagtgatgaccatgtcctgcacagtcccagcactggcaggtggtggacagagccatgactctaggacattctaggcagtgatgagagagtcttcgcaattctcagacaagatttccctaaggacattttgatgttcgtcttcatcagtgtttccagttctttactctgctagggaagatctgggggatatggtcacttcctttcagcagaggctgtgttatttcctcattcattcttttctctgtgcccagcagtgtgctaggtgctagggggacattgaggaagaagacagagttcttcccctcttcaagtatgcagtatatctgggaggaagtaagacaacaaacacaaattttacaactaactataaagttataaatacagttacagtttgggtacatcctaggaagaagtacagtttttgccaccatgggggtgtagaacaaggcaaccaaacctagttgggcaattagagaagacttccccaagggagtgacatccaagtgaggccttgaaggagaaatagaatctagcacaatggtctcaggctggtgaagcacatgagtgaatgccacagcagcaagcttcagacttgttcttgaccaaaggaatttttcacaaggatagagctgagctgatacaaagccagccaacagtagtgctatgaaatggtggttttccatttactgtagaaagtatgtagaaataatttcagttcctggtattagagcaagttgaagtcgtaaataggacctgcttagaagaacccatgtcttgtatgagtggtttttatttcacgtggtattttggtaatacattctctgcttagcttctggggatattttttcctatcatggttttctgaagtcaggttgtctgagacttctcagtttcctggtgggatagggctagaaggtttttgtttatacttttgggcattgttctttccccagaaggttatataacttggaggagattgagtcatttttttcactgactacctttagggggtgtctgccttcgtactgttagcttcttgtcattgtccggcttccgtggccacagcagctcgttcgttctcttgtggctgtgattttagctggagtaaactatgagtagaaacttgaataagaaggaaagtgaatatgaatgtgaatatgaaaaaccaaagactagaagagaactgggtttgtttagtcccagactaatccttgtctgtatttgttgcttatatgagtgacccaccacccacagcatacaaacagacaaaaaggcacatcttaaaaagataaatttcagctgggtgcggtggctcatgcctgtaatcccagcacttaaggaggccaaggcgggtggatcacctgaggtcgggggttcgagaccagcctgaccaacatggagaaaccctgtctctactaaaaatacaaaattagctgggcgtgatggcgcacgcctgtaatcccagctacttgggatgctgaggcaggagaatcacttgaacctgggaggcagaggttgccatgagccaagatcgtgccattgcactccagcctgggcaacaagagtgaaactctgtcttttttttttttttttttttttaaaaaaaaggataaatttctattcttagatgctggtctaagttcaaatttaaatgcctttcatcttaatttttcctagtaaacatttttgcagacaattgtgctgttttatttttctagtattagtaaacacatagttgtaattttaaaattcttgattctgaattttgttttttgctttcaagggctttgttggtttggtgttttggtaacccacctcatggtaaattcttctttctttcaggtaggaatgaattgatagccagatacatcaaactcaggacaggcaagacgaggaccagaaaacaggtaaaataacccacctggaaattgtgcatgtcagcgaatggcccaaaaaggcattttggctgcagtggctggctatgctttggctcctaggagcccccaatttgagttccctgtaaggacgtcagtgttggaggtattttaaattggctcagttttcactgttcatcatttcagtgaccctttattatgtggtcttacaagttccttttatactcacatgggaaaatgtcactgctaaggacggtgtatgaaccgctcctgtactgtatttcaaagctgacatttctttcccaaaatgtgcacctgtgaacactgcaaaaactgcaagtgcaaatgcacttgcaggtcatgaaattttgaggttttgtgcattgtaaaatcctggagcgattatatattagtcataatttcaatgaaaaagtaacgccagcagccttgagtattggcctgaatgtaatgctaaatgatgtgcgtccagggaactgttgctttttaagcgatggctttttgtcagtagctgctgtgactgaaatgaagttacaacttcaatacctctgtgcagagcagtatcaggaattctctgccctttggcagagctctgcctttcctcgttctttcagatgtaaaacagcccaaatctctgacatgagccagtttagaactggaacgaatgagaaattagtgtttaactaaaaacaaaaaaaagaaaggaggaaaaaaaaaaccctaaaaacctcatgggtgagttgttcacagaaaagaattattttttaatgtcgatttatgctgaatgatacagcatgaaccttaaaaactgtaatcagaccaaaaggctaactaaaccgtggtctcattaagattgagcagcagatttcagttctcttcccagtgaggaattgttttcatgagtgtttataacggggagaggcttttcccaggaatgctacttgtgccacagcctgggagcctggctgctgagtcagcacaaagagaggtggcctcctgccagcacgcagaggcagcgcattgtctgtttgggggatgctagtggccctcgtcaagtcagagaatcacagaagaacaaaattcgggtgaaaacaagtaacagcaggagccagatggagggctgaagaggatgggggagtttctgcttctctgtacttaagaaaagtaccaaagcaaattggaaaaaaaaataattgaataattgaagctcaaagacaaagttaaagataaaaggaccgtttattataaatcctgttttagagccgctggagagttggaaatggggtaatcaccacacagtctgagtcgctgaacttttaaatggaaagttctacatttcggaaaccagtggatctaatcatctacattctgacagtgcgggacctgggctgtctgctggtctgtgagctctggtcatttgcccggtgaccccttcactgagggactcttctaaatttaaccaagtcccactgaaagagatgcagatttcagtggaatcattgtgtttcagaagctgggctcggctacatttccacgccccggcatcctggggatgtttttaggcagcagttggtgatacctctccaatgtgaatttgttgttcagcaaatccatgtggttttcaacccagatttttaacaggatggctggctggctgtattcacacatttcgctttgtaataatatgcaaatccacttggcgcccagtcaatacccaaaagagtggaaggattaaagatttttataagggcaaaaaaaaaaaaaaatagctctgctaactgggtctttccatttctctttgagatctaatttacatgtcagtattattttaacgtttgctacagaatccagagctcttaatgagatcagaatacaaccaacagcttcagctttttgattctgcagaatgtgctaatttatggatagtctcttctaaattgagaaaaagggattttccctcctgatactgagaagctataaatattttcatttacctttactcccacctttttaattttagaatgaaaacagcccctctcatccctcccaaaattagtttttcccagtgcccatgatttctcttgggtgggaagactaagatgagtcttaactttcatcctgaatcaagtcactgcagtgatgacccagtatgaaaagcttagagcagcgctgggggcttgtgtctggctgggactgtgtattcctaactgcagagctttgttgagatgcaaataaccaccccccaaccccaccccaaaaccctcccaaagagtagcgattttatatttgatttccttttttgttttgttttgttttgttttgttttgttttgttttgtttcccctcataaacccgaacaatgtaggtgtctagtcatatacaggtcttagcaagaaagaaagttcgagaaattcaagccgccattaaggtacgtctggcttgcccacttgtagggggcttttcatctccatggttacaggcttttcctttgttttcctcccttcccctaccctgcaggtgtctagtcacattcaggttcttgccagaaggaaatctcgtgattttcattccaagctaaaggtatgcgcttttctgctttttggcttgtggttgctatgcatctcacttcctgttttccatggtgactggtgaatgcctggtgctgggattctcgtaacctagtttccttgcatgtgagagctgtttacatttctttgtgtttaatctctctgtttctgtactagcctcacattaaactcaatgtgtgtgagcgcgtgtgtgtgtttgcgtgtgtgtgtgcgtgtgtatgtgtgtgttcctaataacaatgcaaatgcagcagagagctggtcttgataacttttcagcacagaaacatgattttttttttttaaccttcagatgtccaccaagcagccatgggctaggaaagcttaaaaaaagaaaagtccagagatgcaaaattgagtagaaattatttagaaagaatcatttccaaagtggtcatgaaattacctttttaaaaaatttagaaattattttaactcatgcttttgatgtatttttaagaagacttataaaaaatacgtctttttcatgcatgtctcttccctcagagtattttcagccagatttcttccacattgcttactactgttttttaagtgaatggcgctcttattaaaagagaaatctgagcagtggcctttaaaaaaaaaagatagatcttagagatgggaaaactcttgatcaaacccatttgcagtttcatttgtacttgagtttgcttaaatttttttttacttgtacctcatttttcagtctcaaaatatattttataggaaaaatgggggcattgataatttttcatatacaacttctttctgctttttccctttataaaatttataataaaacatacctgacttttatttttctgtaatgccctattttagaaatgcaaagagattatagtttgcaaggaggagctttcgtttataataaaaattgattttggcacatattgatggctttcccatgtgcctttttcggttctgttctgatatttttctatacagtaattaaatttgtggttttgttctgaactaaaaaacagtgtagtctcacaacacttgagtggtgagcactgggactcttcccaaagtccttcgacttttttttatgcaaacaaggctggctgtggaataggacaagtgattaggaaggagcatttggtgtgccctctgcagtgggcagcatgctggctcgctcgcacgtgtggctgatggtggctggcttttagctgcactggctgagcagttggaagactaagataactttgtagatcctgctttttaaccaaaggtgcaatactctctatatggatgtaactaccccagtttttgctcaagttctgactctgtttctagtttctctgagctaatgaattaatgatgtacaaagaagtttacagataacaatgttgtttccatctgtgatgatatgaattgctctatttctgcactgtctgtgtggttcctgtggactcaccagggcacacagccttagactgaaagccctataagtgaggaataaagctcttctgttcagaagggattcccatgtgatataggaagcactctttttctcacttggtgaattttagagttttcttccatagaaacaatttttctgttgctttatacatgtacatatgtaaaaatacacagcggtatttatgtttgtttctaaaaaaaaattaacaataataaaaaagaaacattcccctgactttcagccctgggccactctcttttggggcaggcacaaggaagagacagaaacagaagcagtaggatagcaactggctcagcatttaagctccaagaaccacctccgtcttcttgtagtttcttccgttctttcctaccatattgttcttggaaaaatggagtcctttgtttttccatctgctaataccaactgagtgttccaggcatggtgcttgctcactgtgatgggcagttaacagccaatatcctgttcagggagctggccatgtaaatgggaatgtaaactagaggagcactttgggtaatagcgggagcagccaaaatgaaatgtggggtgcatcccggggatgagcttcgtggagagtatactgttaagtttggcaattgaaagaggaaaggcagcctaatgcgtgctccctcatttaagctcactatgaagtgacttacagtattctgcttttggggcatgatactgaggaaactggggctgagagagtataattgactagtcacaaagccttcctagtaagtggtgaagccaggatttgaactcagatctttttgcaccctaaacgaatcattgttttagataaaattttatctagtgaaggtgggagaatgttttcaagcagagggcttcacaccagcacactgtacctaaactgtcacccctcacagtctttggggctgggcattcagcctttgctaccagcccttcacttggcatccacattttaactttgagcccttggtcaaaacgtggacttaatttgggttggtgctgtgagggtcatcagtaactgggggaatgacatggtcctggagacagagctgcttggcaccactctgagggcattaggacagtcgcagagagtgaggctgtctgtcacctgcttgcaggagttggtgctgctttctttcactccctccatgagcattttatctcaaaggcagtatacttaaccttcctaaccagccattaccaggatatgggctcaactctgttgatgtcccagctccatccatacccccttgttcagctctggaatctaatagcacatttgtgaggaggcagggacaagcatctttaccgaggtcatcatggggtcaggctgatagccatggtcttcttggcctcccacactagctagtgagataaactcgctacagataattgaggtcatcccaaaagacaacaaggatagcttctgggtgggtggggagcagaggggagtggcaggaagtatccaagcttaaaagagacactgtgctttgcctgggaagatgtaggaaggcctcctggagcaggtggctggtggctgaccatcccagtaactatccttgcagacactgccctagccaggttggttaccacttctccacaaactcagacgtcgaaggggtagacaaaggtctatggtcctcatgtgaagaccgaaaccagacttgcatttgtctgtccctctgtggagttggaaaagtggcttacccgcaatggaggccactgccagatgtgtcttcctggtgagtcttcttgcttataagcttctctttactttccagggaagggtgtggcagagttctttgggctggtgttttccagcctttttaaagtagcaaaactcatgttttgaattgaagcttactccctcaaatccttagtaatggcctcttaggctattccattgaatcaggtttgaaaagccccctgttttaggcagaaggaaaaggaggtgtctacctcttatgctgtcccttccagcctttacagagagctcctgtgtcccatttaaagcccatgtttttaaattctgtagttttgaagttctgccatgttcctaggaagaaaacagactccaggagagagtggtcatttgatgtcacattgatagatgagtcatcctagctacaaaagttactctcctgaaaatccgttagaataaattctaaaggtcagctttatgcttctactaattggcagttgttctcaatgtgcttgtttgtggactagatcacccccaaattgtgtagacttaaattttagtaaagaaaaaaattgttctagtgaaagtctaagatttctacgtagatttgaacttgaaaagcataggaatgattactgaattcagtccagtggttttcattgagaacctaagtgtgttctaggtccttttgtagacgttgggcacatagaattgaatccagagtttctgttcttgaggaacattgaacttttctgttatttttccagtagatatccacagctagggggctctgcagtagaaattaaacaggatagtgcagaggctgcccaagtgaaaagaatgattcattctgggagtgagggaattaaagcttcatggagaagtgtcattagaactaaacatagttgaaggcagagaatttccataaagttgggactatctgggggaccatgaagagcatcatgtaattggggacatgcggtgggaggtaagactggaggagcctaagggaagggccctcgattatcccactgaggagaagggattcatctgtgggcctaggggcatacatggggttcattcaaatttaccctctggaaagacctcgccagccaggttttgcaggatagctaataagagggaggccaagctggagtcagggaggctaattcctgggctgctttaagagtggggaagagagtcacaggctgggaccaggggccaacccacaccccctggggctgctccgtggcacttagcactcatccttggctggctccctgctttggtgctctctgcctgctctgtagtctttcctactcattgtgtttaaagaataaattataagttctgtccttatgaagtctgaaaagtgttgtgtgccagaacttttcagaaagattttcaatagcagcatttaaaaatcaacttattaaaattgggttctcttaaagtaatggtaattgactaggagtgtgcatcaaaattatgaagtttttgttgcaaaatttaaacagtacagaaaatatattaaacactcatgtttatactatctggaattgatcattttcattatataagttttttttaatgaaaaatcaagtggcaaacattattctgtactttttcctctacccaccctccgtcttcaaccaaaattaatcttcctttctttcctaccacccacaatgtattttcttgccacttacttcccttagaaaatcaaatccagtgaaagctctctcttctcattttgctcctagatttttgcccattgtctttttctttttcttttttttttgagacagagtcttgctttgtcgcccgggcgggagtgcagtggcgccatctcggctcattgcaacctccgcctcccgggttcaagcgattctcctgcctcagcctcccaagtagctgggattacaggcgctcatcacgacactcagctaatttttgtatttttaatagagacggggtttcaccatgttggccaggctggtctcgaactcctgacctcaagtgatgcgcctgcctcagcctcccaaagtgctgggattacagacatgagccactgcgcccagccgatttttgcccaattatctaccatgaatttgtgcaatagccattggcaccaacatgagacttttcctctggaatttttagcagcttaagatagactcggccaacaatttggtgaccttggatacagaccctgactgcagaggagagatacgaggttcaggacatataggggatggttgaactagaaagggaataatgcgaggagacagtgaaccaggagcagagaagctgggagagtagagacaaagcgtcagtagactgaagctgagattcaagagctcggtaagatggaaaaaagaaaaaaaaaaaggcatttgtggccagagcacagtgattttggaaattaaatttatacattcagagttgtggggattttctcccccgccccccccggggttggggcattttcaaaatatctaggacaaggctgggcacggtggctcacgcctgtaatcctagcacttcgggaggccgagatgggcagattgcctgagctcaggagttagagaccagcctgggcaacacggtgaaaccccgtctctactaaaatacaaaaaattagccaggtatggcagtgtgcaccggcagttatagctacttgggaggctggggcaggagggttgcttgaacttgggaggtggaggttgcagtgagccgagattgtactgctgtaccccagcctgggcaacagagcgagactctgtctccaaaaaaaagaaaaagaaaaaatgtctaggacagaagctagagtacaaactgcaggcctagaagagagcttagctttgaaggagttgtttcttagtgatgggagtgctatgtgtttgtctcctactcagacaaaacccttttgacccactgctctcaagggggtaggttttatagatgacccacagcctgtagctgggcctgagtctacttctaaagtagaagatgaatccatgcagttgcagtgtgaaagaggcttctaggcctatggaatatccatttaaaaatcctgaggatgctgagttagaggtctcccttggaccttgtgtcaccagctgcagcgacagcagtgtcaccaacaccagctttacctgttgtcttccatctcaccctttcccttagtttagcccctattggcgtctccagtggagtagtgagaagcagcagcatgtctgaggattagctcacagccttagaaattattctctacttcgaattgtttcacttaccattaattcatgaaaaagtcattaactgtttttttaagctccagggatttattatcccagcatgtagaaagaatgcagaagcattctccatgtgttaagcagtctttttcctactcagagtttctttgtagagttccatgcaggagtctctttgcctgtatgttcagttgccctaagaagttgttcagaccctgctcagagtccttctttccccattagcagcaaaaaggcagtcctttcttgctgttttcagaagctcacggtagccacagccaaggtctgggaagcaccaccacactgtgggccatctccatcttcccatgaagatgggccaagccacctctggttcacttctcgagtgtgtttaggtgagtgtatgactcgggacaaaactaagaggaaaggaagtcttcgccgtgccctccgctcggcaggaatacatcttaggcagtagatgtattcacgtcaggctctggatgtgtattgaagaaaaacctgtacttgctgacattgcatcatcccagtagagcagaaagagacctgagcccctctgattatgtccagtcgccggtgactaatttatgagctacatgtgctcccccggggccattttcttgttctcgccctggtggcctttatgatttgatttctgaacaggccattctttccaaactgctgttccttccaataggcagagagcttaaagttcaaattgttgatttaattcttttgagttcaagaacttcactggggcattgctaaagtccacactgctgaatcatgtttgtatcatcactgattccatccaggaatgggcctgtccacagggaaggtagacgtacttcacttcactctgtgttgctccgtgaagccccctgagccactctgctccttcaggacttggctgttagcagtgcaggaggcaaggaaagcctgagcaacaacctcctttgtctgtgtccacaccaagacacttggccttgtcacgggatttgggaaatgatataatctttcctggcatttcccaatcttcagggggagttcttttgcatttatgacatatacgctttctcctcaaagatatttttattaccttgtttttaatttaactgaacgaaaactaagattggagacaatttctcaggcttcagttggaaccacttgccaacagtgtggtgatggagaaattaatgatgggagccagggcactgaatatgtagataaagataattctgtgtgaactgagccaggtctggattttctttataagggcaacagaaacagtctcatcattctacatttttatctcttcatagcgaaatcccattgttaattggcctccaacttagataatgccctagaatgacatctatccaaaaggttatctagtgaggacaagggctcctgagtatttcaggtcccgagcagaatccagcttggaaagccagtccattacctggcccccgtagactgcaagctcacccagggccaaggctgcaagcaccatactaagtacttgaagcagtcctgaacaaaagtgtttttatctttgatttataaattaggacacagaggcgtggaatggctaactggcttgcttagagtcacaagtctgaagttaatccagggatatctggtgccacaagccaagctctttgcaggatgttcttctgccttcccaaagagtactggtccaggatgaggttcattttcctgacttggaatgctttgcattgtctccctccactgagccctcttcattgtgtctttatgtttgaaagaaatagaagaaggactcactctggagcttaacttgagcctggagccagtttaggttcctctggccccttgctgtcacctcttagagaaaagggggctgaggtcagaagggtgccttctcccagacacctggatccggcaggaagctgtcctaaatcccaggcttcctgggagagagtcatgaggcacacctatgagtttgctcgtctgtagtcctcatctacaatcctttatgatgtgaagccccacatcagagttaaaggaaacgatgttgacaattataaaataccaaatatagctgagtatatttaaaaatgaacaatggtaaaagccttgaaaatttttccttggatgtgaatggagtctttggcatttggaaatacaataaaatgaattaattgctgcttattaggcagcgagtcaggagaagcatgaatgtgccttctgtcctctgcgttagctgttacctgactgaagtagtctccttttgtatttactcctgccttttctaatgataagcaaattagagatcatagctagaaaaaaaatcaagtgccctccatcctttttccaaaaccataatatagttctgtgatgtttatctgctcaaggggtatggctaataattgcagaggtcatgtggagccacatagtgcaagattagaaagaacatctgcaagattacttcttaggaaagtattttgtgttttgtctttttctgaaaaagtgattgtgcaagcaaattgctgtctttcctcccttgcactatattgctggttaaagcatatttgaagaaaaaccatttaataactatcaagagtttttgaatccatggtcgtttttttgactttactattttttctgacgtatttgatggacttctatatgaataaattacattggaatcctatctttaaattctgaaatcatggcccatgaataaactgtttggaatatattgattatgctgttcattaaaattccatatatggcagctatcatatattgtatatgcaagcatgtaacctttttatgttatctttaaagtttgttcatggtaatacctatagaatatgagataattgattttgcagaataatcaaaagctgagaagcagaaggaagagaagggaacaagactcctctgatatccagactgatccgtgagatgtccttgagttttaagagtacaccactccagccatgtgcatttgtgatattgctgtcctcctgtcatgtatattacatgtagatattttccaaacattgtgtccatttcaaccataaaaaggaggcaatcagcagaacagagagctatagcagcagtagccttgctctccttcatgaaatatgaaagcctgtttttacttagaacaataacaatttgtaaggcttcaggctgaggagtttatgcatgacacagcctgctggaccatgtagcagaggcagcgagaccattgagtgtggtgtgttggaaattggttaatgataaaagtagggtagatgatgagacaggcatcccgagtctcaggtcagttggaccgtttgttcttagaacccatcctctttcccatcaaaagtccatagaccacccatagttcctgctccatgagtgttttctgcattgcaggtcatgggcttgggttggggttcagttggaaaagggagatttcccttttctttccccactccccaaaacatttggctttttatgtcctcattctttgtaatcttagggatagagggacggaaaatcagcaataagtagtcagtgtgaacttgtccaaacatttttctaggatgcaattttcttattcttgctcatatgcacacgcacgcacacatacacactcagaatatttcctgtaacctaagacttcacagagcataattccgtattaacctaacagtttttcagcatcaaacaatgtgctcacctttgtaaatctcatccacatctcagaaatgttggtgtgaagacatcttaaaattagtgtggtgtacaaatgtagcatgtgtttgaatttacctagcttcgcttgtttggatagattagcctcctcccctttagagtgaggatgagtagtgaggatagagtcgaatgctttaaagtctgggatattaaaccagagtgacacagaggagcagttcactcaggtctgacacttagagttattttttcaaagccaggcaggtatctctgggctgcaaatgacaatttagaggtccttccattgaaatctcttagcttggcattctttcaaattcccgtttcaggataagtgggtctgtaggcagacccttggttctgatttcaagatatccctggtggtgcttattatttccagggtcacattagattttaaacaaaaacattttaatccttttaattttcaatatatattgtagataaaggggagatgttataaaaattaaatgagtagtcagagtagctcgaccacaaaaggtaggaaatcactggtatagacattttagtccatttgcagaaaattgcctattctcaaataggtaggtcaagtgcagaaagaacctctacttgagatgaaatttcctttctacacttagctttctattaggacagcagaccaaagctgcccaaattttaacatcctgctgtcttctcactagtagtttccttgactatatgcattgaaaagtatctgtttataatggaatttaccctcatagctacaaatacctttaaacccagaaggacattaggcagtaatgtgcaacttttaattttataaataaagaaacttcgaagtcattaaatgacttgatccacataatgcagctcattaatgtcaggcagggacaggtttgaagccaggtctccggacaccccagtgggtacaccttttatagtcttggagcaagttggtgtcataaaagcaattgatttgctctcctgctcttgaactcctgttttcatttaggtacctggtagaatgctgggtaatgagagagtcaaaccttactttaacagaagaaaaagatcatgttctgaagctgtgtgacataaacagcaaagataggtgcttttctccttttccacactgactgatttccgtttcaaaaaagaatatcaaacttgtttgaagatttcaaatgatttttaataagcctagcaaatttcaagcaactcaataaagcgggatgtggagatgcagggaactcatttggacctggacttagaattcatgagtcaccccacccaagtgtgcacaaacagattctgtatttgggcaagcagaagtgcctctgtctgcagaatttcaaatacgtggaactcttcgggtctgtgagaggatccacgatgttcttctggaatggagccaagccctcaagttcttttgtagctattgctcagatgtgtcagtcaggcaggcaagacgtctgtgctgccattttccaatccccctagcctgggccccagagaagttgtaaggcttgttctgtgctgaggaaggcacctgtggtcatacctgagccattacctcagtttcagaaatctgccttgagagcatttataacccccttggtagaggttgagtggcttgggggctggagtccaaagtgactggtctaagagaaaccaatggattcgtattgatgtcagggtgatgttgatggggaatggagttggtgtgactagggccatggtttctgttcatgggctaccctctgaggggatggacaagcgaggagcaggtaaagccacagaatagccaacagtagattgcctggcactgaggtctgcatgtgtgggcccagtttgtcagtttatcataaaatcccatacacttcaagatttgccctctttctggcatcctcagtatctgacatgtttcaaatcttaaaaaaaaggttagttgaggaagctagctttaggttagaacatttgacagattagcaaatggagccccaagtcgaagaactgccatctgataagaaggagataacagcagcaaaaggatcattctgagtcactctggccgttcttttgaggcccaggaatcctgccagcttctagggcccttggagtgtcactcggccacgggaggtgtcattacagatgttcataatgaccttgagcatccatgaaaagctgttacttgaggctccttagtttttcagtcacagccagagtaatatataagacataaaaattaatgtggctgggcgtggtggcttacgcctgtaatcccagcactttgggaggccaaggcgggtggatcatctgaggtcgggagttcgagaccagcctggccaacatggtgaaaccccatctctactaaaaagacaaatacaaaaattagccgggcatggtggcatatgcctgtaatcccagctactcaggaggctgaggtaggagaatcacttgaacctgggaagcggaggttgcaatgagctgagatcatgccactgcactccagcccgggcaacaagagtgaaactccatctcaaaaaaaaaaaagaagaaattaatggaagtgttaggctccgttttctttttcccccctcccctccctttccttttttcctcccttcctccttccccttttctccctcccaccctccctttcttccttccttttctccttcattctttttttttctgatggagtcttgctctactgcccaggcttgagtgcagtggcttgatgaacacagctcattgcagccttgacctcccaggttcaaacagtcctcccacctcaggctcttgagtagctggaaccacagaagtacaccaccacacctggctaatttttttttttgtgtgtgtgtgtgtggagacagggtctctctatgtaacccaggctggtcttgaactcctgggcccaagtaatcctcccacctcagcctcacaaagtgctgggattataggtgtgagcagccacacctggtcttcccctttccctttttctttattggctctttttcaaaggttaatgtaagctttttggaaattcacattgtcttcctgacagttatagggcaaagtagtatctacaccctgggaacacctagcacatctttcttagaagcccttagcagttgttcatgagctttgattttttaaaaactcctttggccttgcttttgatgccttgatgtgtttttttcatcacctttggttatatcagtaagcattgaagcaccctctctgctggtacttggtgtcttagcctgaagctccctttgacgttccctggaggtggaaagcactctttttattttgatgtcaccattttgtttttgctttgatggcatttgggcctggaatatagaccctctattggcaccggtagcctttatatgcctacgaggctcaaagccctgcctgtgcccaccgggcctgtctcataccaggaggctatttctctgtctgtcctggggaagccacagaaccagtgcaaaggagttgaggggtagttttttattgttgctgttgttgggtgcccttctcaatcattgcctttctagatagccatctggatcaccttttcttcctaaaatgtgaaaaggcccacacccctatgcattttattgttcccaagtattatatgtttgtgtacatatatacatatgtatatatacacatatatatatgttttttttttaaccaaagaagaaaaaaaatccctttttatgcaatccttttaacaaattgtttattattgtatccaggtaacaagcatggtaagtattttcaccaaactgagtattctgtattttagctgtgcttggcagacttttttggctagctttgtgttgttagccttggctttcctagaaaagacccgttcaggaaaaggagaaaccacgtacctgtagcatcccctaggctcctggcttcagtacgaacccacgtagccttagccccacggcggggatacctgagaaagcatgcaccccgccagcatgctgcttggccctgttacccccaacccccgctgcttctgagcctctccagccaggtgtctgcagggcttccaggccttgcatgaccccagcagctcctgggaccatggccctgtgacagtcaggacacacagatagggctcctcgagctctgtggacggtcctaccccagtccacagctacatctcttctctcactcctcctcccatccgtttgcttaaaagcagggcctttatttttttttcttccttaaatgttttaagtaattggagaaatcttctggaagctgacaagctaaataaatacgttgtccactcttctgagaggcttcacattctgttggaaaatggatttaatccctaaaaaaagccttgccccattgggtcttcccagtaaatgttgagaggtacggtaggttgagtgtggtttagccttctggctgtgttatttatccatgcatgtttgctttttttggcctattttgtggctctgtattttagtccatgtgctcgtggctgtgcctgtgtaacctgcctggtagccatgcgttatgtattaagttggtgtgtcactgtcaccttcaaggatcagactgcaaaggataaggccctgcagcacatggcggccatgtcctcagcccagatcgtctcggccactgccattcataacaagctggggctgcctgggattccacgcccgaccttcccaggggcgccgggggtaagtcatgagctcagtccagtaatgacagctgctggggttggggttggcatgtgccagtgttaagcctcccacctccatttcttgtcatgtgggtcaggtatgtgagagggcaaaggctaccttgtcaactgataactgagtctaaagtggtgaaagtaaggagggaagggaggcagagagctagagagaaagggagggggaggagaaggaggaggagaggaagaaaagaaaaaaggaaaaggaagagggagaaaatcagaagaggaaggaattctgagtccctgaagacatggaattaaatgtgcctttctgggttgggctcaggcgtcttctctctttatctttttcctggcccttggtctctgtccctctgtcttcaggggcaactagcccctaaagggacaaggtattctattaacatttacattttgacacctaccaaaggctgagaagcattatgttataatctcaatcctccaggtaatcttaaatgctgcttattgtcattgccattttgcagatgaaaaagctgaggttattcagtagcaaaacaagagtttggatagctgggatcatagtggaatggatagtgatgtcaagaatcagccccagggttgcttgactcctgaggctgctctttccctcctctatgtcatgccccctttccagcccacaccaatcgcagcagggaagctcgctgcagagaagctgcctgcattgccgcttggagctcctggccttgttcaagctttgtcctctgccttgctgggtcttcactgctgttgacgcagaatattatgcagggaatgtttcagaatgaagggagggtacatggataaatcagtcagttcaaatattggtgagccccctgcagcacgcgcagatctttgcttaggtgtaaggaaaacaggagctgctgcctgcgtctgcccttgggggcattttcaggaaggaggcgctaaggggagctctgggttgccagtccaaggatataggttgtggtctcgtgcaagtggtgaccgcatttgcactctgggaaagcgattctgttgggtgatcgaacctgctgtcttttagcaggggttgtgatgcgtaggcatcctaaactgtgctttgaagtaaactcgtaattctgaggcctttgcattttgccttccagttctggccgggaatgattcaaacagggcagccaggatcctcacaagagtaagtctgaggaggggtgggcactgacaactacgggctggtcccagcccacgtggggagagctcttcctggaccatagtgtctcagggcctggaggagaaaggagcattacactgaggtcccagaaggcatcccctttttattgtgtacttaggcccctggcaggaaagagactggcttttcggatctgggagaggtggaagcaccccattcccaccttaagtattagcagtcatccagctggaagcaagaagtggacccctcttccttcatggtattgaaggctgagctgtggtcctccttgcctgagaaagggcggcacaggtgatcctctagcccatttcattctagccagccctgtagtaggatggctagtagacaaatcctactgatgccttgggggcaagagaagaaagatcagtaaactggaaataagggctatttcgggataaaagaaaggaaaccttgcctatatgctgtaaaaaaaaacttgcattgtttggcctagagaaggagagcctgaagcatgtcccacactttgcctagaagtggtgactgcttgacctcagaggttcaaaggcagatgccacagcacaaggaattcaggctgtctttccagcacatcccattgaactggaatgaggcttggtggtttgatccctacctggctgctggtccctctcagtttatggaacaactgcctctgcctggggtgtgctaccacctgcaggcagggaccacagcggtgaaggacctcccactgggaggtcatggtggggcctgggtaatagcccctgctgcagatgcgatctcttaactctgtctgccatctctctgttcccagcgtcaagccttttgtgcagcaggcctaccccatccagccagcggtcacagcccccattccaggtgagtgtccctgaaactcctttttgggagcacagccccacacagctgacagctgggtctggcactttgttcccagagtcaagagatgctcaactttgccacagccgcacattgcccctgacttgcaggatccttgggtagcctgtagctcaggagggccacagggtcccgattcccatcagtcatctcccaagagcttttcagatggtttgtttaagaaacaggaagcctcctcactttcactgaagacgctggattatcctcagaaggcgaagttgctgcagcatcttcctcaatataaactggccaaattaggcagtctaagtctcaaggccagatagggtttcattcaccctttcttagataagtagatttcggtcctgctacctttctttaaaggagagagtacatggaagctcaaagtggaaaacatgaatctgtctagcctacctgtctccttccccacaaggcgcaccccccatccccacctgtgtgtgtagaattactcctttgcactacttgaggtgtacagtataaaagtcactgctctcccttatggattccccaaactgaaaatgctttcacgtattgccctgtgcccgagtgctacggagcattcagagagaatattctatagtgctagtgaccacagtcttaaggaagatgggcaaacacaagaagtgcatggcatgttcgggtctcacaggaagtctttggaagcattcacttctcactgtcctgtcattcttggcttggtccccaagtagaccccttggtgcaggattagatgtcctcatactgcagcccttaaccttagctgaagttggcttaatgaggaacacatgctttgtgcttatttgactgtttaccatcactggggccctctgccagcatctgtcgtctgagttatcctggccagagccggtggagagggggctgttggcatttccttctgggtcatctgtagagccctgttccagtatttgcctgaggcccaaggggaggtgagtgaccagcatcaaaggtgacgattgctctttcagggtttgagcctgcatcggccccagctccctcagtccctgcctggcaaggtcgctccattggcacaaccaagcttcgcctggtggaattttcagcttttctcgagcagcagcgagacccagactcggtgagtgtgcccagagaggtgtgtcttgaatccaggatttctttccctttactgtttacctccttgcttctctttctttcctcctttaccccgccccatgcctgacaaatatcctgtgtgaaaacgggcctaggaaagaatagccttttgattaagtaaaaagggattcctattggcagatttgtagaaaacagcagagcaggaggtgtattactgtcctggaccccaaggtgctgtggggaatacttgagtcagagagagggacgtttacaagctcttatgttttgtaaaatttaacaagaagtaacatttattgagccttgccatatgcctggtcccatgcagagttatttagatatatgatcacaattcatcctcataaaaaccctaggaagctaggtactaactgacaaatgaggaaacagagagcgtaagtaactttcccagagtcacacagttaatctctgatggattagagattcaagctcgggtcctgaaaactctaaagcctaatcatttagctgttattccatactctctttccaactctgttttctcaagatagcaagttgttctcttcttaagaacaacttcttaagaagaagtggccaggcatggtggctcacgcctgtaatcccagcactttgggaggccgaggcaggtggatcacgaggtcaggagatcaagaccatcttggccaacatggtgaaaccccgtctctactaaaaatacatggccacgcacatgtagtcccagctactcaggaggctgaggcaggataattggttgaacccaggaggcggaggttgcggtgagccaagatcgcgccactgcactccagcctggcgacagagcgagactccgtctcaaaaaaaaaaaaaaaagaagaagtaacaaaatggcactttagcagtttgccatagagtgcagtgcattataatatcataaataccagtaacattggcatctggactctatttgtcactttcttctttcctacctcccccacccccatcttgtacccatcgtcccattgtttctcagccaggcatttcccatacatatgtgatcctcccttctttcccacccaacaagccccgtaccctttcttcacacccactccttggctgtgagtatgagcgttgcatctgtgtgtgggtgagcccaaggcaaaaactgaaggaatccttagtttgtctctgagatcctcaccaactctcaccacgttctctatctcaccccatccttcccatctcataagtcccatgctgtctgtgtgttgcctgccttaatgtcatttctattatcgggagacagtgtcaagaatgagctaagagcctgtggtagataaccgagatgctgaacaattggaggtgacctctcacgggagtgtttgcacttcagcttgagggaaggcctcccgtggggcagaggggcttgaccagtcatcaccagagtggagaacccacatgtggcccactcatgtctttgtccacaaatcatgaactttgggagctggtggaaaaatagagctgcttccaaattagggggaaaaatgagggaaggaatgtaaattgggcccatcaggacaggtacaagaaaatggggctattcagaccaggaaagagaagaaaaggccaactggatgactccttccaagcagctgagtggctaacaggaagagtgatggtgagggttaaatccgtctaggtggaaggcattaagacaaactgaaagatgccctgcgtgactctgtcctgctggttctttctgggaagcatacatagttctttggttgaaggctgggctttggcccagatgctgcttctgcctcttgtaactggtgtttccatgacactttgttgtttacagagtactttgtggttgagtatttcattctgtccttacagtgccccatcagataggttctgttttccccatgataggttctgttttccccattttacagataaagaaactgaggcccagacatactaagtgacttaagattaaacagaaggaaacaggagcccaaatcttgtatttcattgtatccttttcactatcgtaaaagatcacctcccagttttgagggtctcttgaattgtctttttttttttttttttttgagacagcgtctcgctctgttgcccaggctggagtgcagtggtgtgatctccactcactgcaagctctgcctcccgggttcacgccattctcctgcctcagcctcccgagtagctgggactacaggcgcccgccactacgcctggctaattttttttgtatttttagtagagacggggtttcaccgtgttagccagggtggtctcgatctcctgaccttgtgatctgcccgcctaggcctcccgaagtgctgggattacaggcgtgaggcaccgcacccgggcttgaattgtcttttcagtctgaatatctcctgtgtaagcaaatttctgtttgcatatgactgttttttaggaaacagctccaagacactgggaggcaaaagtccccacatgatttttgcttccctggttaaaatactatggaatcatttataaaaattctctttttttaaaagaaattaaaataatgtggtagctccctcattgttaactgtgctctccagttatggacctcttagggcccagaaggctcgattgcctctttttgttgttagtatttgttgggctaaacattttgaatcattcagaccattctgcaaacattcgtgtgcacctgcatgtgcaagaagctgtacaggagaggggctcatcgctgcccagacggccacagcctccgcccctggggagtataatgcctagcaggggagacagacacgaaacagatgattatctgagagatcattgcaaagtgctgtgacttctaggaaggaagaatactgaacgctgtgagtaacaggaaacagggcaagcttccttgaggaagtagcccttaagccgaaagatggaggattggacagggagagaataagggagcagaatattccagaggtgatgaagctgaagtgtatgtggcagtatattaaatcagtgactatttttggaaagtcaaggcccactaagttgctagagtagaggccagagataagtgtttcaggtacgttcaggatacatatgataatctgaatgggtaaactggatctggcctgctgttgttgaataaaaaagcttgacttacatagactccaccacatgacttaaaaggccctggaatgaaaggaaggcctggtgtaacatccttgggacctttgagaaagatagttatattttaggggatatgaattggggattgggagaaattagaatttatttaacaagtattttttgagcacctactacacgccagccactgtttcaggtgttagaaattcagcagtgaacaaaacaaagttctttttctcatggagcccacacttgggtggagaacacaagaactacccaagcacataaatacccagtatgtcaggggatgctaactgcttatgtggaataatggtcctttgtcacaactgatttttttttttttttgagatggggtcttactgtgttgcccaggctggcctcaaactcctgggctgaagtgatcctcatgtctcaggctcctgagtagctgggactacagttatgcactgccatgccccaaccttcttcacaattgaaagttacttgctttttggatttaaagtatataatttcagaaaataataataccccctaatagatatgttgatgtttctggcttgtattatgatactaagtgatgtgcattagacattaccagccagagctctgtcactgctgtgaaattattttgcctaacctcagtcactattgttggtgtcgcttctgatattcctatgttacaaacactcattcttcagttgaacacaaatgatttaatatatgcaaatgaatgtggaagtttttttgtttttttttttgtttgttttttttttttttggagacacagagtcttgctctgtcactcaggctggagtgcggtggcgcgatcttggctcactgcaagctccgcctcccaggttcactccattctcctgcctcagcctcccaagtagctgggactacaggcatccaccaccacgcccggctaattttttgtatttttagtgagacagggtttcaccgtgttagccaagatggtctcgatctcctgacctcgtgatctgcccgcctcggcctcccaaagtgctgggattacaggcgtgaaccaccgtgcccggccgcagattgttaataggatctatatttgattttagtggacatgtgagggcctgaaggttggttcttgtgctagagggaaaaagtggtggctgaccagttgaagtgatggagaattaataaaattatttaaagcatttgacagtatcttaagtaccagcctctcaagttatatactgtgtgctttattggacaaacacaacgtgctattacaatcaaggtataatggtacttcagggctaaggttacactgaaaaatttgtatcatgtagatagtttctttggctcttagagtttttgtgacttctcagactttaattttgctatagttttgttccaacaacagaaacattaaggccatctaagataaactcagctgatacattttaacaaatttgggcatacagtacttaaaatataacatccagcattaaccacattaatttgataagcgaacaaagtgaccaataattaaagggccctaagtaagttaaactttgcatttgaattctctagatgtttgttacagacagacatgtacatatgtttccccctacttctttgtaacggcttaggctcattagacccaaggggttataaaatatttttagtagagaagagaacttataggtagtgctggcaaaaaaagaaattatgtagccaggttccatgctatttgtcattagtgacttctttcatctttattgagctctgtgaggtaggttattctattcccttctacagaagaggcttggagagatgctgccttacagtagccagctttgcaccccagcctgcctgtagcatctcttaagacaagataagacatgattgctggctgggtgtgatggctcacgcctgtaatcccagcactttgggaggccaaggcgggtgggtcacttgaggccagaagtttaagaccagcctggccaacatggtgaaaccctatctctactaaaaatacaaaaattagctgggcatggtggagggtacctataatctcagctactcgggagactgaggcaggagaatcgcttgaacccaaaaggcggaggtggcggtgagctgagatcacgccactgcactccagcctgggtgacaagagtgaaactccatctgaaaaaaagacatggttgcatactttggtaccaccaaagccaagagaagaaccttagtttatctcctccttagtctgaagtggccttagaaccagcattttctgaaatttactcgttggctcaccacatatgtcacccttgccaacattgaagacttcctcacaaccccaccactcctagcaatagtgatggccaacatttactaaatattttctgtatgccaacactatgcattatcttatgtaatccttatgaagtagcttgcccagtgttagacagccagctgacatgggaagtaggattcagatccaggtctgttgactccacatcctgagatagtgaccaaaaggctatacggtccatttgtagctgatgagtagtctgtttttgtagcccagggccgtaaggagctaatgggagaataattagggggatgatcgccccctgctggctctgtgtcatgtgtaaaccagacggcagcttccccaagttggtggtggtttatgttggaggagaaccagcgagtcagtccctctgttacctttggctctactggaagctaagagaaaaacagcagagggtgaagaaaggaaggaagagtgtaaaaaacaaagactattttagttggaaatatactttctacatgatttcagtgttgcatatcaaaggatctcaagtgttaagtgtgatatcctccacccagggtgggctatttaaaaggggcctccctgaaatcagggtccagtttctggaggccaagttaggcagatgaaaacccggcctggctgagctgtcagctgaatcctgaaagtacacagggagtggttttcctgataaagcctggagtgatgcctccacctcaattctggggcacggcgggttcctccagccccccaccagggcagcagctggcaaacccctgcctgctcagactgcccggtcaccaggctgtgtgtctcatgcctgttgtggtctggatgccatagtgagcaggagccaggaagaaagcacagaaaggatttactcaggcgggagttacacaaccagaggagggaagagttgggggtggagaaagaggcaaagagattgttctctttagattttgaggaagcactcactgccttgcagaagagaagttccatgatacagtagaggaacaaacccgatcagggaaggcacacgtttgctcaacatatgaaactcatttatttttatttttatttttttaattgaggcagggtctcactgcattgcccaggctggaatgtagtggcacaatcacagctgactgcagcctcgacctcccaggctcaagggattgtcccatctcagcctaccaagttgctgggactacaggcatgcaccaccacacccagctgatttctgtatttttagtagagatggggttttactatgttgcccaagctggtcttgaactcctgggctcaagcgatccacccacctcggcctcccaaagtgctgggattacaggtgtgagccaccgtgcccagccaagcaacttatttatatattatgtcaataatgatcatcaccagcacttatgagctctgtattagtatgctgagcattatgtccagtctgtacataaaggaaccgtggctcagaaacgttaaataaagttatcaagctctacctccaaaaacggtgactgtgccaaagtttaccaccactctgtattcttaaccatgtcactgtacttttgaagaaataaagacaaagttcaaaagttaaaaacagctgcctgcaaagtaggagctccccaagcaaggccagacctctgagggccttccacattgggtagatggttactctgggtttcctctgagttcctattccaacccatggaaaattgtcttccacaaaatcagtctctggtgccaaaaaggggaccgctgctttagagcctatctttcatcatgctctagtggcagcaaagaggtgactgatactagaattcttagcagctgtttgagatttggggcagattaccgcagctcagcctcagtttccagtctgtcttaagtggacataacaggatcgctgccatgcttactgtgatgattacatttagtaatatccctgaacatactgagcactccacaaatgcttctgaacctgaatgtcttacagtaatgtgaaaggaaattgagccagagctctggacagggatcaagcttgcgagaatgtgctcactaagtgctttggactctactgaaattctaacaggagtcagaatatttttcaattacttttgagatggagttttgcttcgtcgcccaggctggagtacagtggcacaaccttggctcactgcaacctccacctcctgggttcaagcaattcccctgcctcagcctcccacatagctgggattacaggcatgtaccatcatgcctggctaatttttgtatttttagtagagacaaggttttgtcatgttggccaggctggtctcaaactcctgacctcaaatgatttgcctgcctcagcctcccaaagtgctgggattacagatgtgaaccaccatgcacggcctcaattagtttttaaaatcaattaaacttttcataaaggtagtaaattaatgtggtcaaaaaatctccaagcataagagaatggaagggagatgtcccttccttctcattcctatcctacccttaagtaggtagccactgctactattctcttatgaggctttgtagtgattttagtgcatatacaatctaatatgaatatgtattctcccaccccaccctgctttttaaagagaggatgtgatctaatttgtgcttcaggaacacgatggctgcatcaggtgagagcaggggctggaggaaactatactgttggccagctggtggctgatgaggaccaaaccagggcaggggccatggctgaggaaatggcagaggggagagatgttatggagataaaattaaaaagccttgtggattaatgagctgtgagaagaggaggataaatggtaatgactgggtgttggagaccaaggatgctgataagatttgaagagtcctggaacagaggaggaagcaggattgctaagaactgacttgatgataatgcttttgcctttcattctcaaaataagcttgttgaaatacctattagagacaggaaagctcagagagtttaagtaacttcatctgggacctggctaatagatggcagggttgactatttgaactttgtctgaatttcacagtgtatgagaaaatgacacttaccccactatctgggaaaatgggaagggcagggattgttctccattcacagatggacatttgatttgggctccaggacaggagagagttcctgaagggtcacctgggcttggtgatggcagcccctcagccagaaggaagggagttttgctgcctggtgttctggcccttatctttattccaaggggctggacctcctggacgtggatgtgggagttagcagtcttcatagtcagagggagcccaaggtctcccctctgggggactggcaggcctgtggttgagcccgcatggaaggtctgtaaatatatcctgcagataacatgattctttctcgtaaaggcagttggtcaaacgtgggcccaaggatgatttaatttcacatttttatacttctttcaatggcctaaatttacagatcaactaaaattccgttgtcagaacacagatcctttcttggtttggaaaatgtgaccaggacagctctaaggaaatatgacattaatgaggcctgtggaagaaagaagagggggatggctgtgcatgggggattaggttggagacacaagataaaaagcaaggtttcagccgggcgcagtggttcatgcctgtaaacccagcactttgggaggccaagcaaggcgtgtgggtcacctgaggtcaggcattcaagaccagcctggccaacatggtgaatcccccgcttctacaaaaatacaaaaattagctgggcatgatggtgggtgcctgtaatcccagctactcgggaggctgaggcaggagatttgcttgaacctgggaagcagaggttgcagtgagctgagatcgcgccattgctctccagcctgggcaacagaggagactctgtctcaaaaaaataaataaacaaaaataaaaaagaagcagcagcagtaaggttttaattcccgattgccaggagggttcttgcctttatcctgggcaggacagagaagggcaccggtgtctctggaggagcttcctagttttatagtggctgctgaggcagttgctccatcttggggtggagaatggctgtttgaacaaatctggttcctggtccttcagaaaagaggctccttctctcctgtaattcagggcttggaagtgatctcatgccagtaagccaggtcaccagcatctgtgcagctctgtgtggcctgggcggaattttcacattgactgtttcatttgaccttgtagacaggctagggttcatcactgctcagatgaggaagccagggcccagaaaggttaagcaacttgcctcaagccactcagctcaaaaatagcagagcctagatattctaacccaggtgtcattaatgttcccatctcatgcttcggaataagtggtcggaaagtacatttggccttccaggtttggggaggaaggctgcagctgatctaacggttggctctgcttagtccttgaatgtctctcaggtttttctcatgtttttccaagcctggtcttccagcaggacgtaggagatggagtgtctcccggggaaggagatgatggctcagtgtggagcacccccatgcccctcacagtcctgagcccttgccgagccacctgcgagcccctcccggcccagggcacactctcttgtggcagcagacattgtactgtgtttctaagatgctctggccacttcccctgtttcttcattaccctttgggaaggaggccactgaaagcgtctggaaatccgggttctatagacatttcacagaggccccagtcaggccccctctgctttctttggcaggtccgcaccccacgcaccttcctggttgctcactcagtcggtgggcctttcagctgcacttctgtggggaagacacactcctgtctgaggaagcagcagcccctctgtagagatggtgctgggagtgggaggtgggaaggatgcatctcggtgtgagatcccggaaggaggcattcacttgctccttgtttccaatgatgtttctctctgggaagaacgaggggcatgggatgaagtggcatatcagggccaagtggccagaacagggctggtgccctggacagtgagctgaggagagaacccacttcagattcactttctcctgggcaggaaccgtgagcacaggcaagctcctgggctgaatgtgcgggaacctgtcttggcttggctccgcagccattccctgtccccccaggggccaccgcaggctgcccagcctgccctggggggtaggtggacagacattccaggcaggaccgtgacaagaagtaaatgtaggtgatttgtccttgttctgttccagcttgtacattagcataccttgacatgagttatttgtcttgatttctttaaattcctaagtggattataatttttttcttggtattatttgacagcagtcatttttcaaggtttcactacgttcttcaaatacttagaatttttggaacaaatttaggaaaagactgccatcttcaggttggacggtgcagtgcaggacccggtgtgtctgagggcacctcgcagatgctgaggactagcagatttgtagggctttttcttccttttccacaaagattgaactgccttcatcagttcaatacatctagattcaatacatctagaatgtattgtcagtccttttaaaaaaaagagaaaaaagccccagtgaccactgttggaagttgtactgttgtggtttgtttcatctacagtgatggacaacctcctaggctgtccccactccacttttgggaacagactttgcatgccttagaggaaggtaggaagcaggtatctggagagggtactgtgtgcctgagggaaatgcggacgccagaccccacaaggcttccccacactgccactaccctagcaccgatggtaacatcagaacagaatcgccttaatgagtctgaaactttccctgtcttcatttatgctttaagttttagtatgtccaggtttttgttatcagagggaccgtattgatttcacattatttcgtccaaagtaaagaaacatcatgattcttccggaaagtaataacaacagcaaattacgtgctatgtacagtgttatgtgttttccttgcattatctcatttaatattcttgacactccagtacagtaggtactattattattcctgcattatagttctactaagtatacatatttccactatggctgtggaaactgcagcagagagagagggctataatcacttgccctggatgactcagttaggaagtggtgctactgctcagattcaaacccagatcccatctgacaccacagtccaggtgttcatcactcctcactgcaggctccctaagcagcaaagaacagcagggaccaggaaacaaagtgacccatagagcagctttgaaggaagacgaaagtcctttattaaccccccccgggtatctcagaagccctttgcaagtgaatggttgactttcgagggttgcattcacctttattattatttgcaactgctatgaagaataactggagggattatagcaaaacaaagagaaaatggacatttctccaagtcaaaatagaaatccacatattaagatggcatcaggtactgcgtggcatccttgatccaggtagggttttactggtgcaacatctttttggtgaaccctacctgcagacaagcgtcccagctcctgtccagctgtcctgagcgtttgagctgtaggaaagctttgcagtctgacccgagctcctttaaagcccaaggaacttgtggctaacacagagtaaacatcctgaagtaatgttttttgcttccttttatggttctttcccttcctcagaaaaactccataatctttcaagatagtttttgattggtggtttatttaataaaataattgtataagccagattgaagcacgtggcccataggaaaagcagtattctgctccttcatggctcctcaccttccagttctactttttggggaccattgcttgcagccttttcagccatttctttgtattaatatatttacctccacatttctaaataacatgcttatattgtatatctcattctattaattttaggcatcatctgttgacttcttaacatagaagactacgatttagttctctaaatttagtatatgcccccctccgtcttcctttcagtccccctatgtgcttttctctaaatttagtatatgcccccctccgtcttcctttcagtcaccctatgtgcttatatcacattaaaaaaaattagcattcagttaattttacaaacccatataaattttgcacacagcgtggttaatgttatatattggaaccatttccttaattgtaaaacgtttttttctggggtgtatggttgtcttcttaaaaaattgttcagttttacatagctacaccaattcaccctcaaagtttcgaggagaactcatactcttctccagatggtgagatataaatcaggtccgctctcttggtgacatccttccaggagtcctcagctccacggatccactctggactggttgctgacctggctggtttctttacctttcttctatgttaggccccatctctttttaaaacgtattccatccttttgtaggaacataccctcctatagctccctgggaacaagttgcaaggaaggtcagttttctgataccttaaatatctgaaagagtattctactttcatgtgtaatggataatttgatgttcattatggtttttgccttggacttgtgaaactttattcatgttttctaggtgatttccacatattttctccttgctaatgaacaatatgtttaatgctggagaataaggtcattcttataaaaagagcaggtaaatgctaatttagttcatgtgatatgtagaagtggtgttgactgtctttattatccccatcttctctgtaggaatttatgagaacatatatttatttgggaaagatagaattctaagtatcgaggtaataagcttgctctgtacagtcactctgtaggttctatgaagatgagcactttgttgttagctcatggattcctggtgtctagcacagtgcctggcatgtatgatggatgataggtgtgctggttcattctattaaaatctgtaaaacaggcagagtgagtaccttttccatcgttgaccttgagatgttgataatcagttgtgcctctactgagtgcctaggggactcttttggagaagtcaaaattagcctccgttttggatattgaggaaatcgagtcttgggccttgcatatgtgagtcattgacattcgccctttttctgctcatatcttgatcccaaatgccagttttctttcccaaatgccagttttctcttatgagtatttgttttgtgccccatagaatagaattgccctttttttgttttatgtgccaccttcacttttggggaaactaccactgctggagaagaaacgagatttatttgggaaggagagaagcaaataaataatccaccttggcccacttcccttataaggagaactggcaagactggaaatagagccttcaccaaagggtttttagaattcatttcattaaaacttgaacccaacatacagatttcttcctttcagccttctggatttggggacagagggattcctgacctacccaggttgaatgaaggggagagggtggtctgtttgtttcaatgctgtggtctccagggcaccttctgtagtactttgtattcttagaaacagagtcaccacctcttggcagcagtgaagccactcagatgccaatggtcagagtttggtttcaagtcaccagccttgtagagacagtgcccagtttcctttggcaaagacagcctgccccttctctattcatttcagccttgaacacagaggtaaattcctcaaaatagaaacctttgtggactctatctgatgcatttgtgaatcatgtttgtcactaattctaatttaacttcatagaagttttaaaacgctgtttagtttttttgctgttgttcctttcccaaatcaactttcaaaaaacgttggtttaacggtgttagaaaggcttagacattttcttttgggggacagtgtgattaatgtttgcagcaaacgcaagggctgtggtgttgacagatccaagttttattaactccaggactattcctggatgtgtgacctcaggcaagtcagttcatctctaagcttctatttcctcatctgtaaaatgatttaaattaaatccacctccagcagcgtcatgaggcaaagattacctgagatcacatctataaacaacacattgctcacagcgcccagtggacacaaggtctcttccttccttccttcaggcacaggtgagaggcccacactctgagcagctggttatgagtgggccattatcagggatttgaacagtcacttggcttcactgcttgctcccagctcttggcttgtgtttcttttttctttactaggcaggagggatagcaaaagcaggaaagttattttgcttctacctcaggatctagtgaatgtcacatgataataaactataacaatggtcatcttagctataatttattgaacatgaacacttttttttttttttgagacggagtatctctctgatgctcaggctggagtgcagtggtgtgatcttggctcactgcagcctccgtctcctgggttcaagcaattctcctgcctcagcctcccgagtagctgggattacaggtgtgtgccaccacacccggctaatttttgtatttttagtagagatggggtttctccgtgttggccaggctggtctcgaactcctgacctcaagtgatccaccctcctcagcctcccaagtgctgggattacaggtgtgagccaccaatcctggcccctatcaaacatttcttatatggcaggtcctatgccaagcaccttctgagcattagctcctttaatattcacatatgttgcaaatattacaggtattatatccccattgcacatatgagaagtcttgaggtttcaggtttgtgtctggctccaaggctttcgtgctttacactcagcaccttgcttttcagctgtaccttcatggtccccattggtatgtggtagattttacccccattcaccttcttgacctgtagatgtcagggccgtggttcccatttccagcagtgcagtgcagggacattttgatgttaagcacaaagacttcaagtttcccagcttctcaacttcaccccagctctgacctggcccaggggcagctagcgaggcagaacagctaggagtgaggagcctaaagggagactgggattcagctcagtgagtccctaaggcttgtatctcatgccttccataaactcactccttgcagaaggcgctagaatggacagaagcggtgccttctggaactggggcggtctgagagctagctgtaagcagaggttgttaatcagggttggatggacggatacatagccagttgtctaggtaataaacaatgccttttgccctgtactccccattccattttgtgtttctgattgcctttataccaacgtctgtgcccacacctttgcccatgttattcttttttacttttgcccactgagactagaaagactagaagcttcttagcagctgtgactgtgtctcatacatttccatgggctgttgtttataattggaaaaagtgatgtggcaacatttgaaaaaatgtataaaaagctcaaagatgttccctcctacccttataatctcacctcttcccacccccataatctcacttccctaacacaatggcttttacttttaacctttttaaaaataatttcttccttctgaggcagaccctgttgttttatagtatctcccagcttctgtcttacctgccaggtggctagtccatgcagctgcatccatgtcagagcttgatagggttctctctttcacctcacctgataccttttaggatttttgaagctttggaaaagataccactctgatgttgaacaggagagggacctggccctctccaaaagatactggcctcagttgcactgccccttatatgcaacactggcatcagatggagtgtccagcctcctgtcttttggcatggtggccagagatccaaatgtgggtagcaggttatagatttaaaccagtattccttcaggatatatttcatagggttttgtgaccaactgagtttgagaaactctagattatatgtttaaaaatgtttctttatggaagtgcctttttaagagacaaggtcttactgtgttgcccaggctggagtgcaacagcatgatcatagctccattacaccttcgatcttccaggctcaagtgatcctcctgctttagcctcccaggtagctggaactacaggcatgcaccaccacacctggtgattttttttttttttctggtagagatgtctcactgtgttgtccaggctggtctcaaactcttgggcttgaatgagtttccctccttggccttccaaagtgctgatattaaaggcatgagccaccatggccagtcaatggcactgcttttaatacgctagtatttactgtgaatctctaagagaggtcttattaaaagaataatagctagattttattgactgcttattcttgttagatctaggatccctgatgaagtctgtggagtgtcttatttaaaccctgtaacaatccagtgaagtgaatgccatcactgtccccattttagagacttgagaggcacttgcgcagtatcatagctagtttgccttgggcagtgttttgtgcttgagtaggatgagtctagacccacacaatctttttttttttaaagcaggtcccagtgattaagttccatggactgtacattcttaacccatgtataatactcagctttgcccaagccttctgttagttgggacttcctgtggaatagattagtactcagggacagtagttggagaattgccagttttaacttggaatgtgagcagacttggactgctagataaagaaggcggatggagtttctcagtgaaccctatttggttctgaggcccatggagcctctgcatccccaggtttcttggtctgtgtcacattaagttggtattaatgcctattcagtgggagaggcatgcccgaagagtctggagtataacgtctagaccagtggtctcaaatttggctgtgtattggaattcactgaagaagctttaaaaattatgatgtttggcctctctcagggattccagtttaatccagattatgcccaggcctttgtgatgtttaaatgatccttgggtattctgatgtagcctgggttgagaaccattggtttggacacactcctttgtggtccagttaccatgtcttatcccaaagcaaggggaagaaaagggttcactttgtgagtgaaatgacttaatgtggtttagagttttttgtttgttttttcatgaatgagtgacctgtgttctttttcatcagccatgtatggccttgtagatcttctctgtgatctgtaccccagtcctaactttgcactgacagtgacatattgagcagcccttatgtagaagttttggattggttactaaggggactggtgacaaagaggctcagcactcttattcctgctggaagaaggaagtgggtaccattgctcagaccactgtatctacgctgtcccaggagagttgggacaagaagtgcattctgggttatgacatgagctaactgcacacagatttcttattgggctccaaagagtatcactttcattttcagttgggtcaggtgaaattgggtaatacaattgtttcttggtttggtagctgggtaacttaagctgttgttattaatgtgtccgcaaaaaagccttttttagatatttcggaaaatatatgcccttgtcagtaaaaagcaatgattgtctcaaccctaagctataatcgcttttctaaacatactcatcatttcaaaagcattgatcctggactggaaggcctaattccagaattttggtactactgctctttatccagttcaagatggatgagttccaggttgatcaaagagtttgtaatgggaatgtttctgttggtttcttacagtacaacaaacacctcttcgtgcacattgggcatgccaaccattcttacagtgacccattgcttgaatcagtggacattcgtcagatttatgacaaatttcctgaaaagaaaggtggcttaaaggaactgtttggaaagggccctcaaaatgccttcttcctcgtaaaattctgggtgagtaagacattgctgtgatttccgtggtttttgtctgaatggtcacatctcttacatgagcacagtgcagcacagctggctttggatttacactgagtgcaccttcatgtgcttctgcacaattgccaagggagcacggactcacacctgtgaactgtcctcatgccggccttatgcatccacatggtgcacctgggtgacattctctgtccctgccaaagggcacaagggacaagcagcctctttggacttcacttaaattcccggagctgggatgaaaataaagttacatgcttcaagattttgtaagcatcagagaggaaacagaattgctttgcccagtgtatacttcatttgtgctttaaaatgacgggcaaagtcccctggctgctgcagctttgctgatgttccagagcctctgagaggagctttgccaccctttggcactagtcagccttgggccaggggaatgctaatgggtcagaatgggcataagtataatgtgtgtgtgctaagggattggggcaccagataacctgctagcgctgcgagtttatgattcctcagcctttacacacatttttttttaaaactgttttaagtgtttgtgccccttagcatggcattaaaggccctaagcgacctggttccagggtagcttcctcttgtgtcctgccaaacccctgttgccccacctgtccagtctatgctctgccttctgtttgtctagatggactttctgctcctttctccctgtaccactgggccagctccttctcctccatgagacaatagctccactataatagaaccttccccatttgagcagaccattgatttctcttttaatcccattgcatttggtaatcacttcccatgctgtgtcatgattgtttggaggtgtcccccttcctctgggctctgcctcagggggccttattcatatagtggcttccttttttattgaatgcttgctttgtgctaggagctgtgctgaatgctttacgtgcatttcatttcatcctccacgttttaggtggaatttgcctcagctccacctaggaaaaaaggctcgtagatcaccagagacaggcttgtaggttgggtacctggagcttgacatcagatctgtgtgactttaatgcctctgctctgtttcctcgttgcataatcccttgtggaccctgaccacaggatctgtcaacctaagcctctacgtatctctataccaagcaagaaccttacacaacaaagcccaacagatgtgagaacaaatggatgaattaaagaaaaatttatgttttagattccttggaaggaaatttgcatattaaattagtttgtttcgtttcttttagccttccatgataactagatttcattttttgtgcttccattattgaaatttggttagtagtccaggcacagtggctcacgcctgtaattccagcactttgggaggctgaggcaggggtattacatgagctcaggagtttaagaccagcctgggccaaatagtgaaaccctgtctacgaaaaatacaaaattagtcaggcgtggtggtgcacacctgtagtctgagctactcaggaggctgaggtgggaggatagcttgagcccaggaggtcgaagctgcactgagctatgattgtgcccctgcactccagcctgagtaacagagcaagaccctgttccaaaaaaaaagaaatttggatagtagatgtagccttctacttatattaatggatgttggatctgtaatacacatggacaacctgaaaaagcgatcacagtcacattttccttttctgaattggtggctgccttctagtaatttggatggtggttggagatcagttatatggtaacagggtagctttcaaaatgtggcctgcgaacccctagggagttccttgatatcattttaatgggttgacaaggtcaaaactatttttgttataatacaaagacatgatttgccttttccattctgcttatattcacactgatggtacaagagcagtgggatagaactgctttagtatgaatcagagcagtggctttgctgctaaaattcatgcagttgaaaaaaaaagtccttcatgaattttattacaacctagagtacacattgaaagtgaacacataagttttatcacatcaaggaaaacaaatgacattatttgttgccaaagataaaatttgggctttcaaatgaaaattagaatactgggaaatttgtgcctaccttagtgaacttctcagtacttaaagacttttctgatgagatccacgatgatattgacaaaatgtaatttgatattgtgttagagcaatggattttaatgtaacagagttggaaaaattcattgatatggtttcagactccatattccagcctaccattaagaaactactactgcttgttgacttttgatatagtatcaaaggaaaatgaccactgttatctgaggagtctgtcacataatgtaaagcagcactacctgtctcactaattttttaaaaatacaggcatgtttaatttttttaaaaagatgtatatcaacatgtaattagcttattatttcttaaaatgaatgaatattttaaaatttgctcagttttaatttccagtacagaaaatatagatataacctgtagtaagcaaaaggtctttgaggtcctcaataatttatttggtcctgtttgcagtatcgtacatgatcaccaaactgctgctagaatgctcacacctgttacggcaaattcaaaacccaggaaaggcgtctcctgggaatttacttgaggtcagggtcaggctgtctggtacatcaataatttatttacgagtgtaaaggggtcctgtgatcaaaaagtttgagagccactattttaaaggatgtaaaaaggggttgtttatccaagtgaatgaaaagctaattcggaattatagaatgttatgaagagaaaccattttcagtaatttcaaattcaacagtagtgtttttaaataaggtttctgataattagcatattgtttgaatataaagtagcatagagtgcgcttagaaagtcttttttggttttgcctccaaaattgcccttattttacccagtggatgattttaataaatgttttccatggtggggcccttcagtcatgaatcctcaaataacaaagtctagattgcagatgtttagagtatggtagctgttgggagatgtgcaaatttagaaacagttactccgagatcagatacttgtttattaagatttgcagaattaaaatggagaacttccatgaatatgatagaaaacatcactccttcagtagagttgttaggaatatttaacctttataaagaaattcagtcataactatgttaaaataaaggagggaaggcaatttaaattcggtttgcaatttgaaatgtcattggcttcctctaatgactcagtaagaatgaattacatttagaatatctatccttggatatcagtaggtgcttccagtgggtgtttccgaagtaggtttaacactcccttcgaaatatcttttagcaatatgcttagcagatgtgcttatttttgttacaacagagactctatacccagtccttttcttctctctttttcaaatggcctaaagtctctaggctgtcagtatcagcctgactcttacctgtttatttgatcgttcctgaatttggttttcagaatatctgctacgtccaacctgggctcggtcaggctagaccacgtgaggggtttgctatggaagaatactatgtgttacctaaagtacctgcatttaagccccagatgcaggcacctcagttctgccagttgacacttggaggcgaatgggatggtgatgagccaagtagtagtcactccactgattttagggtggaagattctactggcatcccaggccccagagcataaatgaataacagagtcaaggatgccagcatgagtacccctctaccatataagctttacagtgtctcatgccttcatggtgtgggaccccttaaagcccgtatgaatggctgtttatctgttaagatctttctaaagagccttattgaggtataatttatatactataaagatcactcatgttaaatgtacaatttaggcctggcgtggtggctcacacctgtaatcctagcactttgggaggccgagatgggcagatcatgaggtcaggagatcaagaccatcctggctaacacggtgaaaccccatccctactaaaaatacaaaaaattagccgggtgtggtggcgggcccctctagtcccagctacttgggaggctgaggcaggagaatggcgtgaacctgggaggcggaggttgcagtgagccaaagatcacgccactgcactctagcctgggcgacagagtgagactccttctcaaaaaaaaaaaaaaaaagaaagaaagaaaagtacaatttaattatttttagaaaaatttacagagttgcataatcatactaaaatccagcgttggaatttgtctgtcaccccgcgaggatctcctgtgcccatttgtagttagttcttatttccacccccagccccaggcaactgtggatctactttctgtctggatcaatttgcctgttctagacatttcatatgaatgaaatcattcagtgtattgtttttcacagctggcttcttttacttttgttgtatttgaggtgcatcctttttattgtagaattagtgtcccatccaatgtatataccacattttgctttgttcattcactggttgataggcatgtggatcatttccacttcaggctattatgaataatggtgctatcgagtctttgtagacaagtctgtgtggacataccgtttcatctttcttggggagctacctaggagtggaattgctgggtcctacggtaactctatgtttaacattttaagatactgctaaacttcttttttatgtggttgtaccattttacattctcaccagtaagatcttaggggttcttctccttcagccattatgtctgcaagtattggggtacagattacaggggacatcttagatgaggggctggtaagcaaaggcactgagacagggtgtgtgtaacgtatgcttcaggtgcattgaggtgtgttgcagctgaatcttcactggtaatggaaagataggtgagtagaaaaatttggaaagagaaggaatccagaatttagttgtgacagcagtagggagcagtcggtgttttaacaatttttcagtcaacagagtaatgggattctttttactgagtgttacagagactctgcattttgccttttctagttttattatattttccttttcatgacagcctcttactcatttcctttctatttcttttgccctctttttatttactcctatgtgttttaattctacagcgtatttaattacaaagagagaaaaggtgattttgcaggaatggaagggaagggaagaggttcctctctttttcagcagtacctgaacctgacgcttaactggtaccttctttaagccaggcactgtgccagggctaagcacatacttgatattatttaatccttgtgagatacatgtgatgagtcccacttcacacatgaagaaatcaaaccatacaaaggcaaagtgacttctgtgacatcatattgctagtaaatgccacatctgctagactccagaatccatgctctttgtgtaaacctgtgcatggcctcttcagggagcacggttctgtcactagaaaccatcccaacatagcttcacttaaatggaagctaatggtgattgctgaaggatagcagccttggtagtttctctttgaagtcctgtcattatgagatgctctggtgtgtttacatgggagctaaggtgtattttcatatatatgttctgtatattattatgttctgattttttttaaaaagcctttcttgctgggaaaagactggcctttctgggtctagccaattcttagagtaggaacatgattctgtctaacagaggatagtccaggagcctgcttttcatatgcaaaccaaccagtccagaaccagacctcctctatgtggtccaggcaccccaggatacagtgttcctctgccctaatcattccctggaatggtaccagacaactagggaccacctctgaagcttagagccagctggagttattcgaactagtcaatccttaattggtcattctgtttcccctgccctgcccatggaaagcccaggaaaggctctggtctaagctggcctcttgtcttctgcctcctgaccaccctagtatctttccatgtggcccttgatggcctgccatgcttcctgtcttggggacctttgagtgtaataaatttttttcctgaacttctcctgtgctctgtggccgcacctgactgaccatcacataaaagaatacaaaacgtaaggtgaataaactattaccaggaaattcaggttggagtctaagtcttaactagacaagttagtgagatcctgcaactaccattaggagaaagcagtgttgtttttatattatgattatgaaggtataacattctagacagttgggaatatataatttttaattcagtcctaaatgcatcatgaatataacctaatgtgatacatatttatgtagttttgatcaaggaatacgtgaaatctgacactccacttttataccttatgaaatatcatgttagctatatgtcagtatacttcaaattatctgtttttttttttttgagacagtgttgctctgctgcccaggctgaagtgcagtggtgtgatttacacacatggttatgtgtgtaaataaccatgttgctttctaaaatagttgtagcagttactctctcaggccatgcatgaatagaccaggcatcttcatcagccttgactggtgcaatttaaaacaaaacaaaaaacaatcttctattgtcacttgttatttgagttcttctacatctgcttttattttttcttcctactcaaaagtcttcgattcttcctcattctctgtagaaacaatgattactattaaggttgaaataccatatttcttcaattctgagacatggacttgttcccatttcaacagttctaaaattggaatgcttctgtcagttgatatccaaagcactttgccacattttctttatatccagtctattattgaatactatgcagccataaaaaggaatgagatcatgtcctttgcagggacatggatgaagctggaagccatcatcgttagcaaactaacacaggaacagaaaaccaaacaccacgtgttttcactcataagtgggagttgaacaatgagaacacagggacacagggaggggaacatcacataccagggcctgttgcggggtggggggcgaggggagggaacttagaggacaggtcaataggtgccacagaccaccatggcacacgtatacctatataacaaaccagcacgttctgcacatgtatcccagaaattgaagcaaaattaaacaaaaaagcatcttctccacccctaggcagaggagtaggttgtgactggttattatcacctgaccctggccagcatagaagacatcttgccattccctggacaccttagttgagttatttgcactttatagtaccatagcagttgaattttagcttaaatttaaatccctaattaaaccatctcggaaaattacgcattgatgtggcattgaaattgttattatggttcaagaggagttttggaaccagattttttataaatgaggcaagtacttgtactggcagctagtcatacttcttttttccttacaaaacatgatcaggtgctgtgtaggctctaggaaagagggatgtccacccacaaatggatgaagctgtgcttcattgcagcattgagattcaggcagatggattgccagtgacgtggcagacagtgcaattaatgtaacaaaatgtcaacagccttgggaattgatcatagattgaattcccagagctagaagacatgagtatgattcagtcatgcatcccgaaggacaaaaacccaagtgtagctcacagctgactgtcaaaagcagttaatttctagctatatgaagtttacagaaggaaataaaattacagatttaaccaaataagacatgcaattgagactaatacctttggaggggcctcagaattctatttcctgtcctaataatgttcaagggtgtcaagattggaaacactgctctaaagaaagctgtatgcttttaacattctattcataaacattataacccaaaactattcataataataattagtacagtaaaggcttagtcttaaactttgattggaataataaagaagaaagcaatatgaaagtgaaatcttacggatttgtatcatgttgccaggttataacaaatttttaaatatacatttaatatttctgctttcactctaatcattatcaaattagtcatatcttagaaaccaggatatatgatgttatcctatacttatttaaaattgttttgtattttaaaattcttgggattatgatcattcagtgtaaacaatactgtctacatagttacttaatttgctttttttttttttttttgagatggagtctcgctctgtctcacaggctggagtgcagtggcacagtctcggctcactgcaacctctgcctgtcgggttcaagcgattctcctgcctcagcctcccgagtagctgggattacaggcacctgccactgtgcccagctaatttttgtatttttggtagagatggggtttcgccatgttggccaggctggtcttgaactcctgacctcaggtgatccacccgccttggcctcccaaagtgctgggattacaggcgtgagccaccatgcctggccaatttactttcttaacctattatttttaaaggaagaaaaagcaagcctacttttactaaccatagcagatgtgagaagattttataaaacaaaaaaaggggaagcaagttacctggaaagaggacagccattagaagatgcttttgtcttggtagaaatgaaatcacatttgttcaacaaaatgacagtcactctacataaaactgggttttatttaaagagaagaaactgggcgcacaataacccagcagaacagaccccacccccattggagtctcagcttgtttctaattgtattctgcatgatttagattggaattgtagacctgagtctgtcatttggaaccaaacgtcctgttgctattcatggaagagggagttaacaatacgaaatcgtttgctttccacatgttttgaactgctatcaggaaggaggggcctttcagctcaataagttttccatttctccctacttctgtctcatctcaaaatgcgttttaaagttaactgaacaatattaagtgatgaaatgatttaagtagaagaaagattagtgagaagtatcacgatattcagaggtacttgggggctaatacatgttaaattttaagtagactgtggttacatgagtcttttttttttttttttaattatctcttgataggccctgctattgtaagcacaggaagagagaaatcaatacatttgtatatctgcccattttggtttgttttcgtaagaaaaatatctggagcttgtgagcactttctgtggtgactgctgcttgggattgctccttcctggttcccgaaccctggatgccaaacttctttgtaggcctttctaagggagcgtaccctgtctgtggcctgtgttcagtgctgcaatgtatataatagattttcaaggctttttttttttaagttacctggaaagttattttatttcaatcagtaaatggtcctaaagaaattgctgtgcattgggcactctgccacattgccaactcacattaccacctgagagtttgttgaggaatcatccgcaagcaattcgtaggaggaaaaggagacctcaagagactcacttgaaagcttttctgggccatctcgttgctagaaagtcattcaacaaacatttgccaatgtcgtctttgcttctggaaaactgggaagcagatgtgattgagagttctgatttgcaggctcagggtctggtgagggatggcagacatgtgggcaggtgaacaacagcaccgaggggtgggagctgtagtggaagtgggcagaagttgctgtggaagcacagaggtggaaccctttttgcctgagaacatttcggaagggctcacaaagacatggcatttaaacagaatcttgatagaatttggtcagtgcaaggggagtgagaaggagttttcagggcagtggatactcatgtacagacaaggagtcctgggaggtggcgagaggtccccatggccactggggcttaccgaactcagagaatagggagagatgtgggtggaaaccctggtcacaggggcattcacttcaaaagaccatacctgaatcctctgaaagcctaaaacgtagtaggaatgaaatcatggatttcacaggataggatagcttggaaaatgagcacaagagcttacattgcttttcctcccatcctcttctatcaaaccacagatacttctcttttttttaaacctttgactctgaagtcttcagggcttccgggcagaatctcttgcattgggagttgccttgacctggaggaattcattccaacagctattcctaaaagactttctgtcctgggtcctttgtctctgtgattgctaagaaagcccaggtcaggggtctgtcccttccttctggggccatttaattccactcccttctgtggctacagactgagatgctaagccacgatcccacctgagctgctgccacaattagcttgattcatgctgtcacctttaccatttcacctcaagaaaaacctgagaaggaaagaattgatgtgccatagtcggggtggctgcatattttcagacccagttttgcaaggcgtagttggattaactggacacttcagggatctcagtcagttgcttaaaactgaacctaggcccttggtggtgtgagagaccccctctccatgtgcaggtaaagatccacggtacctcctaccccccagtccaccccatgttaatttactttttaaattaaaaaagtgatgcaggtttgttatgaatagtttgagcagttgaaaagaatatagaataaaaagtgagatcctccttgcacacatacatgcctgtggtcagccagatcccaaaatttggaatgtatccttttagacttatacgtatgtatctacaaccattatacgtatacatatacatcacttgtttttactaaaaagggattatgctccaagtgtttcctgcaacttcattttccctacctaaagtgtcttggacatatgatgccttttacagcaatgagaatttgagggtaagtctcagtttttattctctgtggtaaaggtttcttgataagtagagttgtcagatttatcaggttgcccagttaaatttgcatttcaaataaacagtgaatacttttttggtgtacatgtcctatacagtatttggtatatatgttcatatgtactgaaaaagtatttgctgttcatttgagatgtgagttaactgggttccccgttttatctggcagctctgcacttgttagttcacttacgtatcattggcttggggttgttattgttgttctatgaaaaacttttcatgcacaaaaccttgaaaccataaaaaggtcctgtttcctgggaaaggtggtgtctgggccagtgttcacacacctgatgaatgagaaaggtttggggccagctcagctgggcacccagaattcattacttgcctctattggaaagaactggcccgtgtagctgctttgtagttggagctgagacctgactctttcatcctagccactatgtgaagttgccactagtggtcacctgaagttgtgtgggtgatattaattgaatttttgaaaaactaaatgctggtatttgtaggaatttgcagtgcagacgggcagcctttcaaccagtgcatagcataattagagcaagcttttaagattctttgaagtgccaaatgtttatgaaattcaaataggggtgccaatctgcacaataaaggggcccttggtggtgtttttaaaaatcttctattttgtagatgtaaatatatgccataattagcgggaagtaacttgaagagccacggctgagtttattcctattattcttatttaaaacagctgtggcaggcaggctacagctgctgtctcatcattgggttgggcagggcataagggccgaagtgaacacactcaaagactcttttctgagggcagctcgttcactccccctacatgctggcttccttgctggggagctgtctcacggttggcccagcttccccacccaccccaagcctctgaatgtcaatgggactggcttcaagggtcttagccagaaggcacttgcctgcaaatgagagggcgaggagccttttagagcagccagctttctccagacctcccccttctctctgcccatggcagtgctgcctctaggggcactgttgccccacagccccaggcccagtgcagagcgattgtcctttggtgcctgtgggagcagctgcaatgccgcactgcgtgccctgcctggccgagccttaccatgtggcaggcctggacggctgcccgccacagggcccagctcccagcaccgcctgccaaggagccagatgctaccattggaaaaaattgcttcacaatttgaaatcttggttctttgatcattgctcggagaggatgaagaagagaggttcaaagtagtgttttaaaatgccagcgtctcgttgcagccatcagtgcctattagactgtctctggttggggacagtcctcttgatgttttcatttttgcaaccaggtcattctccccagctcttccaagccctctggataggaagggaaggtccacagcctgctcctgaccctgtgcccctgctgtccccctgcctcgcgccttagaggttatctgcttgcctttgttccagcaggcttttccccaataaagcttgtaacaaagttgttgtcatccgccaaatgctgccaccgcgtgagctgctcactcccattcttcactgggcaggagtagccttcacttcctgatccttctgcccccacagccaggtctccagaggacggaggttttgcagggatgatccactctgtcccctggcctagcacccgcctccaaggacttcagatcccacatacttgggtgaggcttcattcttccttacccttgaaatgggaagggtcagtctttggagagtgttgcatttttcatatttactgccaaaaggcaaaaacatgaaatttaaaccaaacagatccaggatggctgggcatggtggcccacgcgtataatcccagcactttgggaggccgaggcaggtggatcacttgatgtcaggagttcaagaccaacctggccaacatagtgaaaccccatctctactaaaaaatacaaaaattagtgtggtggcgcacatctgtaatcccagctacttgggaggctgaggcagtagaatctcttgaacccagaaggtcgaggttgcagtgagccaacattgtgccactgcactccagcctgggcagcagagtgagactctgtctcagaaaaaagaacagatccatgaataaatgggcttactgagtaagaggtaatagaggagaaacgaatccagactcttatctggggactaaactgtttcagttgtggaagtaatgagtataagagaaggatgatttgggaaagaatttggaaacttttgatggggtgtatttttgttttctgttgctgtccgcttcctctgcccatcattgaaaccggcttctgcttcgactttttgttgtttttcaggacttgcccacaaatagaccctaaagtctttaattcactcaacacacgtgttaatgatggccttttttttagtcccagaaagaattctataacatgtctaatcatgccttttgagaaatttatacctgtttgagctgttatactcaatacgtaagacccgtcataaacacaaatcagaaaaagtcctaatttttctgtttggaaaaagccagtgttgcatctgtgccacacacccgacaaacgtgggttggggccaagactggctccatggtgacagtctttatcgtgtttattgattacagactcttgtctcgttgaggaaaggtgtcagtgtctctagatgtgatttgaggctctgtcttcatctctattgtggtcaatatttcaaattgacaagtgaacaggagtgatgataggtattgttaatgactgtgaattttatagtacattatagattacaggtgaattttatatgcattatctcctcatattaccaccgtggcctttggaaacacatcatcttccctgtggataaagatgagaaaagcgagacccaaaaagtgattccaaatctctcacttctgctgcctgtgctgtcagtccagtgtctgagatgagatgacaaatgagaagcagcattcacagacgcctggaccagtgtcggactggatgggatgagtggaggactgaactttgtagagtttaacaaaagtaaatgtaaaacttgaatcttgggaagcaaacagaacctgaagaactatgtgggtgaggaggaggagaggaatggtgaagttaaggaggaaaggagagaaaactgcagaattgtgttacagaagtgttcttcggtctgtggtacccgaagttctggatggaagttacagaggagctcatttcaacttaacagatgtaataggcagcatcatggatccccagacatgcctcctctgtagccatggaatctgtggataatggtacattacatggcaaaggggaattaaaagttgttaatcagcagatagaatatcttggattatctaagtgggcctagcatggtcccaaggtcccttaaagcagaagagggagacaaaaaaagacatccagagagacgacagctggcaatgtgagaaggattcggctggtgtttctggctttgaaaatggagcaaggggctccgggacaaggaatgtgggtggtctcagaagctggaagaggcaaggaaacagaaccctcttcagagcctctgtctagtaaggagttgcgtcccttctagttccttgatcttagccagcctggagctgaattaaatttctgacctacaggaatataaaataattagtttgtcttgttttaaggcactaaatgtgtgataatttgtagcagagaaaattaatataacagaaaaaagcattaacagttaaggctgtctggcaatattattattatttataaatagagatggggtcttgctgtgttgcccaggctggtctcaaactcctgggcgtaagtggccagcgtgcctggcccagcagcattattgaagtgattttcctgtgtctgaaagtatttagctttaaggcagtgcaggtcaggatgctgtggaaaggatttctgcttttggaggtaggagagagttgacctctgaactaagtttcagcttagcgtttagggtctctgtttctagagcaaacagggagaagatttcttagaaggactcatttccctggacttaccttccccagccatatttctaagtgttgttttttaacactgcagaacctggcctatgaccagcctttttggctagcttgtgcccagaagatgggatatggtttgactttggaatttattggaaagataagttttactagttttcaactgtttcttggatttttgtttttatttacttttagaaaatatcctgtggttaggtaaaagctgattaggcagaaatagtttgtatctctgatagtggtacatttttaaaaactcattttcttgccttcagaactacatgaaataggtttgctttccacctggagtgattttcagttgggaggggggacgtgtcagtagggtagataatgaactctgcaaatcccagacttctttgttgttgacttaatgctagcattctttctttgatattaccttcacttcatgggagttcagtgactgcatttctttctggaatagccataacactatcagctgacagataattatatatatataaaattatatatatcttgataattatatatatatcttgataattatattttacatcaatacttcctcctagaaaattcctgaagagcatctgtgatatggttggatagctacataattattttccatgttcaagggtaattacaaagcagttgtaatggcaaattggttatttactgttagttgggaagccttttaaaatctaatctcttaaatttacactaataattaaatagagaattttctcagactgtttctccctacctcttatctaaatgaaggataaaatgcacgtagactctatgaccgagtaattacactcctaggaacgtccaacagaaacacatccatatgtccctcaaaagcatattcaagaacgttcatagtagcactcttcttaataggtccatttggaagcctcgcaaatgtccctaagtaatagggtggatagatcgtggcatttttcattcaatggaatattctacagtaatgaggatgaatgaactatatacaacaacatggttgagtctcacaaataaaatgctgagtaaacaaaactaaacactgtaaaccctgttgcacttgcttaaagttcagaaaccagacaaaactaatgtgtgatgtttcaggatcatggttacgctggcaaggtgtatagatgattgtgcctggaaggaaggatatttgggggagagagggacttccatttcttcatctgggtgctggctcacttgatgaaaattaatcaagctgtaaacttccagtttgtgtacttttctgaatgtatattttaattttatgtaaaactgttaactttgacagctttaaaacatgtaatttgttgggatggtttctgagggtaggttgggtattctttaataactttgttttgaataattctatcattgtaactacagatcatccattccaaatggaagctatattaaagttgtttggggagttctaagagataatggtaaaccaatggtgaggtggtaggaatggtctgccgcagctgcaagcagtaaggactttgcttggctgtagggaatttacaaacaatggcaaaaccatctaaaaaatcaattttctttttattatcaccatattaactgacaaaacctcctttgttggcctgagtcctaaataattggtgaagttagtgttgaatttttttaattactttttttttgagacagcatctagttctgttacccaggctggagtgcagtggtacaaatcatggctcattgcagcctcaaactcctgggctctaggaagcttcctattttagcctcccaggtagctgggactacaggcacatgccaccatgtccggctaattaaaaaaaaaaaattatttgtagagatggcatctccctatgttgcccaggctggtctcgaactcctgggctcaagcaatcctcctgcctcaacctctgaaagtgctgggattataggtgtgagctgaatttttattttttatatatgtatgtatacaacatatgttgaatttttattttatatatagaacatctatatgcttcaaattagcaagcacattatccattatattacttctccttcagtaacacatgtggactcagcctagtactcatttcaggtgcagtctgagtccacagtccccatggtgctccttgttccagtggttaaacagatttgtcaatgagcaacaatagtagaatgattatgaagatgaggaaacagaactttttttccattccttcattctctgtttctgctttgggaatttttacgtttacaattttaaataactgaagtagagtgctggttattgttgaaagtcattttgtcaaataaaggaaggcggtcttaaaaatgcgtcagatctgctaggtgtgccactgctgtgggacagctgctttcaccagcgttacttaagcatggaacctcgtacagacagaaccgtaacagttgtgaacatattcagcaattttactaacatcatgatgaataataccattctaaacttagttaacattttaaaattatatatattgacagattattttttctgttttaaggttgacagtttttaaaaacaatctatttactctcccagtgacccacctgcccccatacacaattgcttatttcactgtgttcccttccatagtccagtctgtacaccaaaatcactagactgctttcccccatgcttagaaatagggtcttgctacgttgcctaggctggtctcaaactcctgggcttaagcgagcctcctgcctcagcctcctgagtaattgggactacaggtattctaccacacccagcttgctagactgcatttgattatttactagtctttcagaacaacttgattaatcaaaatcaactagtacaatgttagcttacagtgtattcatagcacatggagactctttttcaaagctaggaatttaaagttgaaagaaagaaaaataatttctaatgcaccttttctgctcaacacaaacttattgcagcatcattgggaagcatcatagatattcatcagtagagcgtgtattaaattatggtgtatctgtgccatagaatagtgtgcagccactagaaagtgtggctgttcattatttcaaatggctgtactttatagtactgaaattccatgttagtactatatgagttctaagtggcataggtatatatatatgtttaacgcaaggttttagaaaagttaatataatgtgctactgtttgtgtgataaaggaggaatgtatatgcttgaatacctaagtgctgaatatctctgaaaggacacttgagaaatggataacattggttacctttagggaggttggcaaattttggggttcatgcccattttacagttttatttttcccccgtctttaccacatgcatgttttcacttttttaaaaaatgttgggctgcgccaggcatggtggcttaggcctgtaatcccagcactttgggaggccgaggtgggcggatcacctgaggatgggagttcgagaccagcctgaccaacgtggagaaacctcgtctctaccaaaaatacaaaaaaaattatccgggcatggtggcgcctgcctgtaatcccagttacttgggaggctgaggcaggagagtcgctcaaacccaggaggcagaggttgcggtgagccaagatcgtgccattgcactccagtctgcaacaagagcaaaactccatctcaaaaaaaaaaaaaaaaaatctggaacgttttggcacaggctacatcataataataacagcattaatcctgccaccataaagcacctgaactgcttttcacagcgaagtattctaaggtgtcagcaaagcgaggcagtggcagttcttgaaggtaacactgccatgttgaaagctcgatgggaattccagtgttcagagcccctgtgtgcctgaggtgtatggtagcccctctgccctggagactggagctcagttagacccaggggcctcttcagccttgggagttcagatgctgatctcatttagggaaagacatgcatgatttcctgctgagctgctcttttgtggagccaaatgttaaacctttgaatgtgagaaaaatgcacacctgggtatttttgtttgtttatgatttataccccataaaatccaaaatgcagaatgtgaggaaagctcactacatttatgggtaacataaaaccggataagtacaagttaaagcagattggaaaccagtaaaaggagctgtaccctgactgttagtagctattagaagcacctgagacaagttaattattgtagttgaactctgaatttagctttgaatttcttggcacataaggtgaaaaggggaatgtggagtacatggttctcttttttttttttttttttttttgagacggagtctcgctctgtcgcccaggctggagtgcagtggcgggatctcggctcactgcaagctccgcctcccgggttcacgccattctcctgcctcagcctcccaagtagctgggactacaggcgcccgccactacgcccggctaattttttgtatttttagtagagacggggtttcaccgttttagccgggatggtctcgatctcctgaccttgtgatccgcccgcctcggcctcccaaagtgcggttctctttatttgtagacagaaagtaggaagttttgcctaaggagttggacattttcctaataaccaattcaaaaaggaaatttaaatgtagatacttattttaaagtatatgatgactcaggtcttagtggttagtgcctgtcaaggtataaaaattagccagtcagaatctgccaaatctggagcaatacggtgcctcacacccgtaatctcagcacttagagtggctgaggtgggcagataacttgaggccaggagtttgagaccagcctgggcaccaaggcaaaaccctgttactactagaaatacagaaattagttgggcgtggtggcacatgcctgtaatctcagctactcaggaggctgaggcgggagaatccactgaacctgggaggtggaggttgcagtgagcctcgcaccagtgattccagcctagacgacagggccagaccctgtctcaaaaaaaaaaaaaaaaaaaaaaaaaagtgccaaaccgcacaaaatataaaatctcatttgagtgtcagatccacgtacctctgcttcaacaaccaccacggcagtccacatttatcatctctcgcttggactgctataatggcctcctagtatatatatatatacatactttctgctctcttccggagtcttctccgagccatggtcagaggtgccttttggaaggcagagctggttgtgccctgtcactgttccaggcctgtctgctcactgtgtcctttggtctcaggatatttcacctctccagctctcctgccatcctctctctcttgctttctctttagcgcttctttctggctctgtgccctcttctctcttatggaatgcttctcttgcctaagcctcgtcttctttcttgggatctgagttgcatcatcattagaagtgtccctgaccctgggggcccactcctcaccgtttgtgctcgtgtccccccgtacctctctccctggtgcttagttccgtgtggtatgttcctcacttaattgtaagcctcacgagagcaggccctggctcagcttttgctttttttatccgcagctctgagcattgtgccggatgcggagcagggggttggtagatacttgagggaaggcagctattactctgtggctgtctttggtctgttttgtgctgctacaacagaatgccacagcctgggtaatttataaagaacaaaaattcatttctcacatttctagaggctgggatgtccaagatcgaatctgtagcatctggtggaaggcacatgaagggccagagagagccagcttactcctgaaagccctacttatagcagcgttaacccatatgcaagggcagaggctcaacacctaaacccatcccaaaaggcctcacctccaacactgttgcactggggtttaagcttccaatgcatgaatttggtgggggcacattcagaccactgcaatgatcaaacgctgcagcagccagtttccccagtggacattgcatcctgctgaagacatttctctctgaagcacagtgctaatcataccacttccttggcacgcaggctttcaagggagtatccatttcctacaaaatacaatctaaactgtcttcttcgcccccataacctgtgcccaagttgcatttccaaactcccagtctgaggtccttaatccatgcccagaagctagaatgcagcactccaggccttggcctgcactgtacccccagccttccctgcatgtgccagtctaaatcattcctcaactgagaccacctgtggaaagtcataccttccattgctgcaactctaagtatctctgacatggtacttattttctatctgaatgatagttattttatgtatcttccatatcagttgtaggcaaaacccgtacattgtctagcatgaacctttcatagtaggtgcttaataaaaatgtgttaaatgaatggcaacttaagtcattatttaacatctttgtaagccagtctttaataggaaccatttcccctccagatattctaatttttaagaaagtttctgtttgtacatatatgacaaatggctagtcagctgcagtctcttgttttttttaaaaaatatctctaaagatgagtgaacatgaatccaattaatatcctgctttctgtgcatatttcaaagaccttgtggatcttttattgcaagggtatagtagtattctgatactgaatgcaagaaagtaaaacaaaattgatacttgtagcatgtcatttcaagagaggactgcccaaattagcaaactctttaaaaaacgacagatgggtattgaacttgtttctagatgagcatcaccttcccaagccagccctcttcattcagccaagcagaggtcttaccctgaaagttactgctcggtgccatgactcctgggatgagagaataacccacacctccatttcctttccaacaggctgatttaaactgcaatattcaagatgatgctggggctttttatggtgtaaccagtcagtacgagagttctgaaaatatgacagtcacctgttccaccaaagtttgctcctttgggaagcaagtagtagaaaaagtagaggtaagttggcctctgtatactggaaacttcattcaagggcagactgttgccttcctttaaaccttccttggggcagagagttgtatttttggatgtctgcttcttaccttctgtattagtccattctcacactgctatgaagaactacctgaaaatgggtagtttatgaagaaaagatgtttcattgactcacagttccacaggcttaacaggaagcatgatttggggggtgtcaggaaacttagaatcatggtggctgaaggtgaaggggaagcaaggcacgtcttctcatggtggcaggagaaaggtgggtgggaaccaccacacacttttaaaccatcagatctggtgagaactcccacagtatcacaggaacagcctgggggccacctgccaccaggcccctcctctgacatgtggggattacgattcgagttgagatttgggtggggatacaaccaaaccatatcaccctccttctttctcccacttctttttcctgttaacttctaaaaagccaaagtgatttggaagcacctgaaaggaagcaaataggatgtcccgtgccagtcctctgactgtgtctgaagtcagctgtgccctgctcagccagtgctgtgcacctttgcttgaggccttgtggggtagtgtggtatgaaagctgggtcgagataggccctgccactcagaatgatgccctccctacacccaacccctaggtccaagggcactcccaggcattgtagatagacgtcaaggtggtactcagctgattggcacctgccctctgaaaccatgataccttgagtttgatattgttgcttttgccatttccactgccttcgcttttaattgttttagatagagtttattatatattaggatccaatctctttttacggcttttatgtttcataccttcctccctttaaaaagatgtatatttgtttgatcagggtgagttgctttgttgaataatgtttgttgttggcattccttaaaggttgtattttttagtgtcttctatccatcacccaattaattgatccatgttcagtgagcagtttttatttgcagtggccccagacctttcaggttcaagagcccaccttagctgtacaaagactttgtgctgaggagggagagagggagaaggatatatttcttaagaccctgggctaagcaatgaggatttgggatgctgcaggccctcgtagcacaagccccctgagcaatggacaggccttatgagaatgttgttgaggaaaggttatgctggcagaagaggatccaggggagttgactcagatggacaatttaagcttaggggtcatgagctttcccacaatggtggcagtgggaatcctgtaagatgttttgaatggaacttagaaactaactggatattaatgaggaggaagagtcaaaagtcacactcacattttatgcttggaaggatggtactgccactaatagagataaggaaataaggtgttcaagaggaaataggcaatgattatagatgcaagactagaacttggatgacaggtaaagactggaaatataaattgggaatcctgagcattaaggattgggaatggagacctagctgcagagagggaatagaaagggcacaggaataaggattaaatttggggagcagccactagccctaggataagtagagggagacataaacagaagaacagaggacaaaaatgagtggggagggcgggaattggctcaacataatgtctaggaagcccaggaggtgagaaggtggctgtatcatgaaacatggctgggacgcctggaaccagatgacctcctcgcctctaagaaggaggaagcaaagttacctgtgtgtgattgggagtgtggaagatgagtgttaggcaatgttagtgaatagctaagttgtcagggatgttctctgtagttgaaattccctgcctggacaggtgcatttgagaaaagatgaaccagacagcttactcaatttcccaaatgtcaaattactggtgtcctcagacgatacacccaaagctctatgcaaattcagggagcagggaaaggttgctcttgactgataaaatcacaggaatttttatggagaaggtggtgtgcatggtaggtggggttttacctttaagccttttatctgtttagaatgtgtgtctgcatttggtgtgaagtagtagtccacttatattttcttccagataggcgtttgtatcaaaaccacttatgaaatgattcattctttcccagttaaacagatctgtcccctttaaattaccatatattctgagagctgttcctggagtcccactgttctattccacccactatttgtgtctacgtatcccagtaccatgtggatttgattacagtggctttatagtatatactgatatttgatgaggcgagtcaggctcactattctttttcatatattttctaagctagtaaccaacatttattcttccaaataattcaatcacttaaacatataaagaaaaacaaaaaccttgtttgagcaatctaattgtaattgcatcaaacttagatgttcttttggaaaaattttatattaaatatttctaatcaagaatgtatttgcattctcatttcattttatgtatttcaataagattttatcattttcattatacaggtttgtctctttcttgttaaatatatttctaaatattatataatatgttgtaatttcctgtttctagattcgaattaatagagaaaagctcttgattttgcatatctgtcttcaatatggccatcttagcaaattctcatacttaactttagtttttcccccagattcctggggtacccttgtatagttaactgatgttagttgaaaaagttttggtgttttgccctttaggattatatttactgtaggcttttattaatggtctttattactaatttaagtgttttctttctattcctattttacttaggatttttattagttacagctgcaatacgttatcaaatgcttttcagcaactgttgctatatgatttttcttccaagttgttgacataacaagttaatacatttcctcaatgtgtatgaaacaccatagcatttctgaaacagtcttactttggatttattgttgcattctatttgctgatattttacacagaattttcacattacatttcataagtaatattcgtctatacttttttcttttcctttttttttttttttgagatggggtctcactctgtcacccacactggaatgcagtggcatgatcttggctcactgcagcctcagcctcactgggctcaagcaatcctcccacctcagcctcctgagtatctgggactacaggcctgtgccaccatgcctggctaattttttgtattgttttgtagaaatgtggtttcgctggtctgaaactcctgggctcaagcgatctgcctacctcagcctaccaaagtgctaggattaaaggtgtgagctgtcacacccaactatatacctttttcaataacctgtttgccaaatttcagtcttgaatgtacactagtttcataaaaagaataacactggaaataactattctttaaagattacataaaacttactcctgtgaaactatttggtctttatatgttttttagcatgtacttttaattaattatttttaattgatagataaaaattttatacatttatggtgtataacatgatgttgtgaaatatgcatacacagtagaatggctgaatcgagctaattaacatgtattacctcacatagcttaccaatttttgtggtgagaacacttaaatattctcttagcagttttcgaggatacagcgccttggtattaactgtagtcaccatgttgtacagtagatctcttgagcttacttctcctaactgagattttatatcacttgtggcctccacctttttcagtggtaaatagctaaacttgttagttgtggtcatttccacaatgactgatctatttgttgacattttccccttctttttgactcagtgttagcaagttgtatttttctgggaaagcatctctatctgctgtgttttctttgctttgccgtgtgtgtgtgtgtgtgtgtgtgtgtgtgtgtgtgtgtctgctttagggttatgtgaaataatctcttatgtatcttctaatttgtactgtaattgtggttttgccacttttcttttttctcctttttacttgtatgaagagtttattttgtctgtctaaaggaccagtttttaattctgtctgcattttaaatttctatttcattgatttgagcttttatctttattaattcccttttcctggcttcctttgatttctttgtggtttgggtttttttttttaaggatgtgtgttttattctgtaaatttttacctttaatgatgaagacatatgaggctacttcattaagtttccttcaagtgcagcttcatcatggctgatacgttttgatgtaaaatatctcccttttcattgctctttagtttataattttcttaattccttttgatccaaggttatctaggaagccttgtttcttatttctgagttattgaaactgcatatatactagtattttcttagtttcttcctttcataaacaggtgacattcaggggctcatgatccgtgagaaataatcagttttttctaaagtagagagattagctatattggttgttaacctatgaggctttatcacaataaagagattttctttgaagaactgtagctagctggggcctgctcttacagatctcctccaggtaaagcatcataattaggcagttttatttttttctgacctttgctaaaaggatctgtcaacgcttcttaaagctctcatctttccaactaattttttaaaaaacttccagaaaaataatggattctatgtatagcaataaatttggagatagtttttttttaattaagtagattacgtaagtagtatagcatatagaagatgattcatgttgaaaaactaaaatgcttttatgggcagtaatatctgtttcatgtgttttggagtcaaaagtgtaaaaatactgaaatccttttttcctcacagacggagtatgcaaggtttgagaatggccgatttgtataccgaataaaccgctccccaatgtgtgaatatatgatcaacttcatccacaagctcaaacacttaccagagaaatatatgatgaacagtgttttggaaaacttcacaattttattggtaatggttttgtctctttcctctgtgggcagatgctgccatgaggcttgacagaagtgaggaaggtgggcctgggaggcgctgggcctgcgccgagggaactgaccaggttgttggattgggttcctagtggtcagtcagcagttgaatttgcatcatccatagggaaaacttgggcttgattctgtagaagagaaggggttttatctggctggggtttctaaggttcgcagaactggaattcagttgggtaataaaaagtgatgtgtttttatctctggctgcagagtagaaaggcctggagaacttttaaacatccggctgtatcctagatcaattaaatcaggatctgtgagaacaggacccaggcatgtgtatttttttaagttccgcaggtaatttcaacattagccaagttttagtctcagcagcaacatggtatgcaaatcaggcaaaagctgagttggtatgtttgtacttcagacataccttgacatgttccatgatggacttccaaggccttctaagaagttacatgcattaaggcaggaaaatataagctctcagtaccagaagaaatataaattagaatagaatgcatggaatgcagtgaccaggaggaggaaaatgttcttcataggctaaaaaatctggctaggctgagtacagtggcttatgcctctaatctcaacactttgggaggccaaggtgggaggatcccctgagcccaggagttcaagaccagcctgggtgacatagtgacaccctatctcaaaacaaacagacaaaacaaacttaatgggcagctaaaggaaagggaaaatagtgttcaaggtccatgatgggaaaactcaccagtgcccctggatggttctatgtgggttttcccctaatacttaactttaaaacaaatttcttctgggagctttatttggggacttcagaagttgttaggaacaatgtcatcctcaaaatagaaaatactcagtaatgggtttcataaggctcatttaaaaaagtaacattacttgattaaagggaaaatgccaaaacaaaacttgagggaaacaatcttagcaaaagaggggcaacaaggctatactgtggccaaatactcctctgaaagcctactttattcctttttgttactaggattaagaatccatacagcaggaattctttacttggtgtttttggttccattgggacagtggctttcaatcagcagtgttctgtttttttgttttgttttgttttgtttttgttttttagaaaggctgtttcccagtttcccaaaactctaatttataccttttacctatttctgtggtgtaaatatgcccttcatgggcaatttcaagctaccgatagctattcagctaatgaaattccttaatatttaacaataatttttatgagccagtaggagccagcttctatacaccattgtataaaaaaaaataagtaacatttaaaaataaaaaccctgtgcatattagattcatccaggaaggtttaaaacatctaaggcctaggccccaccctggatgaataaaatgagtccctggagatggggcccagcatcctggtttttattttttaagctctgcatgtagttgaagtgtgcaaccaggtagagacccactgctgtaagagattgggaaatgagccgcaaggactctcagagtttatagacacatgattggcatacaactagcaaacagataattttgcatataattttcgtttgttccaagaagagaatcttaatgggttctcagatgtgcccatgtccttctaaaatttagaagccagcattcaggggaagtttggaatacatgctctttaataacattgatcagtattcctttctttaatggccctttggtgaaaatagagcaattcaaggtttgcaggactggcatatagcaggtgcttgacatataggtgcttcctgttgctatctaagaatagatgcatcactttagcagtcagacgagtagaaggtaagtgtgacatctactgaggatcttaagtggcctcaggaattaaccaaaactctgaatgaatggcttccctgcctctcttgggggggagtcttagctgtttattaaaaatcaattctgattctgtttctgcatgctaaggatgcatgttctcagtccgtaaaactctacctcagagagcacagctaagataaatgtggcctggaaaagtgttaaagcccctgttacccacagaacctgactacagttgtgcactgcatagcagtgtgaagggcggaccacgtgtatggtagtgctcccataagatgataatggaggtgaaaaattcctgtcacctagtgatgatgcaactattatataatacagcataattatttttaaaaataaatttaggttagcctaagtgtacagtacaaaagtttacagtagtatacagtgatgccctaggccttcccattcactcgtcacttactcagtgactcacctagagcaaatttcaggcctgtaagctccacgcatggtaagtgccctatataggtgaactactttttaccttttataccatatttttactgtactttatgtgtagatatgtttagatacaaaaaatacttaccattgtgttgtaatagcctacagtaatcagtacagtaacatgctatacagatttgtaccctaggagcaataggctacaccatatagcctaggtgtgtagtaggctgtaccgtctaggtctgagtaagtacactctatgctgttggttcgcatgacaaaaccacctgattacacattaggaggtgtcctcattgttaagcaactcatcactgtatatcattaatgctgccttgcaaaatatgacttcaaccaatacagccatccagataacttagcaggttagattaatttcaaaatgtgtcattaagcaactaaataaattcctttaatatggagaattaatacctatcaatcaatatatattagaattaatagtttagttttagaaaaactgaaattaagccagcactcttggattttgaaaataaaatcatctaattgatgaacaggagaaattgtacctcatataaaatgacatagtatttgcagataacttatacaaatcatctcttatactttaaatcatctctagattacttataataccaaatacaatgtaaatgctatgtaaatagttgttatactatatttctaaaatttttattatttttattatgtcttttttcgtccccaaatattttccaatctgatattgattggatctgccagtgtggaatcgcagattgggagggccaactgtattcttatttaatagaaagcttgcaagaagtttgaataggttgtagaggtgccaggtgctgtgctagaccctttgtaaatgttatgtaattctcactttcagactatgaggtcatttttctcattttatggataaagaatgtcaggccaccccgaggtcacagagccagtgatggaaataaatttgagataccatctcacaccagttagaatggcgatcattaaaaagtcaggaaacaacaggtcctggagaggatgtggagaaataggaacacttttacactgttgttgggactataaactagttccaaccattgtggaagtcagtgtggcgattcctcagggatctagaactagaaatacaatttgacccagccatcccattactgggtatatacccaaaggattataaatcatgctgctataaagacacatgcacacgtatgtttattagagcactattcacactagcaaagacttggaaccaacccaaatgtccaacagtgatagactggattaagaaaatgtggcacatatacatcatggaatactatgcagccataaaaaatgatgagttcatgtcctttgtagggacgtggatgaagctggaaaccatcattctcagcaaactattgcaaggacaaaaaaaccaaacaccgcatgttctcactcataggtgggaattgaacaatgagaacacatggacacaggaaggggaacatcacacaccggggcctgttgtggggtgggagtagagggggaagggatagcattaggagataatacctaatgttaaatgatgagttaatgggtgcagcacaccaacatggcacatgtatacatatgtaacaaacctgcacgttgtgcacatgtaccctaaaacttaaagtataataaaaaataaataaataaataaagctaaacttaaaaaaaaaaaagaatggatagaaaagaccttgcaaggtatcttatggtcatgaaatcaaaagacttgagtttaagactttatggccttggtcacttagtcttcagacatcagtttcaccttgatttataaacagaatgctcaagtctgcactttctacctcagaggttatcattgaaatattttaattcagctaagctgtgagagatggtactgccttctgggatacaatgcaaataaaacccagcacttgtcacgtagtaattcatggtccttcaggatgaaagaggcaggtaaataaaccattgcaagcaaatgatggctgtagtgtactcgtgaaacaggtacctctgaaatgcagagtgatgaggtagggattctcagggatgttgcctcgatggataaggagacatctttctgattactaagaataggggtatcccatgggtacatacttaggtaccaggggctggggtgctatggtgaattaggcaggtgggccgccatcctgggttctgatgcaggaggcaggcatgcatcaagtcatcacaaaataaatgaaaactgtagctcttgctacctggcagagggacgcagggcattcgtagaacaggggaatttgacctagttcaggcggaagctgaggaaggcttcctgaggaagaaacagttgagagctctctgcgtggtgaatatgcaaccatgaccaaacgaacctctcagctccttccctgtcaaagagcacccactcctagaggtcgtatgatatcatatgagacaatctgtgtaaagcatttgatactgagtagatggatagtaaacactcaatatttgttggctattctgatgtgaattttcattcattcagcaattatttatttatttatttatttatttatttatttttgaggtagagtcttgctctgttgcccaggctaaagtgcagtggtgcaatcttggctcgctgcaacctctgcctcccgggctcaagtgattctcctgcctcagcctcctgagtagctgggattacaggctcccgccactgtgcccagctaatttttgtgtttttagtagagacggggtttcacagtgttggccaggcgggtctcgaactcctgaccttgtgatccacctgcattggcctcccgaagtgctgggattacaggcgtgagccaccacgcccggcccagcaaatatttattaaatgacttgtgtgccatgtcctcaagctagttgctgggaaacagggcccctgttccttaggaacttatattccactgggtgagatggatattagaaaaaaaattgtacacgccagtatgtgtttaccaactgtatagcatgctgtgatgggaaaatgagatgtactgcaagactattctttaagtagggactggaagcttggataccttaagagcaagggaaactaaacaggggaaacagcctgatacttagagggaaattaggcctataacaaactggaagaggctctcaagttcaaaatgttttcattcaaacaatgctttggcgtaatcaaacacaaaagtaacagagtcactgacgcgtttcatgtttttgcttgattagatttgctcttagaaagttccttctgagaatagcatggggaattgagaccagagtgaggacagaaaggagtcagggtctgtgtggtgtggagggagctgcaatgatttgggctggagaactcaaaatacgagggataattagagggattcaagagactggaggggaagcatgagtatttcacaatacattttgaaagataaagcccatgtctatggaaagaatgtcattccacaggattctacctatcccactgttccttgattcagcagatacttttctgggtctaggcactactggttaacatagtggtgagggaggcactcctgcagcttctctgtccttggctattgtgaaacaagatttagcagaagtttaagactaggatgggaaaaagagtggattttaaatgttctcatcacaaagaagtacgtgaagtgcttggtatgttagcctgatgtaatcgtcccacaaggtatatacatctatcatcacattgtagcccataaatatatgtactgcaagactttattcttttaggtagggactggaattattacttgtcaatttaaaaattcagataaaaaataagacaatttcttagagtaaatgattgccttgcgggacagaattaaagagaattctttgttgtaaagaaatcagccccctaaaaaacaaaaacacaaatgtgctaatttttgtggtcctttcttgggcatagattatgagtgaccctatctagaaggtatttcttacttatgataaccacgtttagatgggcttcaggtcatagttgtagtgttctgaatctgtgttagaggacacagagtgaggctgagcaaatctctcttggacttaagacttgttcttctccaattaagtcatagtcgtcatacacagatggaatatgttttcatccttttggtattatatactttttttttatcttaacaggtggtaacaaacagggatacacaagaaactctactctgcatggcctgtgtgtttgaagtttcaaatagtgaacacggagcacaacatcatatttacaggcttgtaaaggactgaacatggttatttatatatatagatatctgtatatacacacacacatatgtgcacacacacactctctctccattatcgaacgactgactgtaaacctcaccacacagggtggtgccctggccccgaggtcaccccgacttttctaaatcttgtttgagtgaagtcattttttcatgtgttcatactatcattgtagctgtgaagttctggtacagttgtaaaaagagaaattgagttgtttctctatgttcttcagatgtgcagcccacaattcctcgggaaaggtgaacctgaacaacccaagtctctctctgcagagccctgtttctaattgtggtagaaaatattgagacagagcatttgccatgggacatttacagcctttatacaaatgtatttagttctcttttttccaacataaaattcttgttttaagatacaagtaaaattaatctttaaatataaatgtaaattagtacacaaaactaagaatctttagacttatctttgtaactaattagggtggaagttatgaaagaatgtaattcactaaattattttttaaatgaaacctttttttttctttttgaaaccaaatgttaaactatagccttaagaaatgcttggtagaagtgtcctaatgagacaaatttgtacttttatcctcaaggttaacactaatctcctaatccattaaactcttgaacaggtattacaaaggaagaaaacttcaccccttatccttaacatatatagtatatttaaaaaatataaaattgtattgtactaatgtgatgatggattatttaatgaaaaagaaaaaatggctctttttgcaataagtagatacatactgaaaaaatctaaacttacaatgtttatagtcttgtgtgtgcagttatattttatatggacgaccaaattttttattaagatgagtaaatatttgaaccactgaattttaataacaaaattttaaaattggcatgaatacggaatactgcactgtgagatgcaaagtatacagaatctgtggctgggagaaaatttcatcaaatagacaagtaaaaggctcatcagttttagcatctctgctccccagaaaattgtaagcatcctcaccagcctgtggatacattctttatttctagtgacccaatatgcatattaacctgctataactagggctatatgtgtaggtatgtgtatacatatacacaaatgcacatatagagttaacacatttagtgaacacttgtttagtgtcactcagtttgctaggtgctgatatgtacgtatatctcaatgtgtctgtagacttagatacatcctcttgaagcacatccatttctttagcgtctctcagtaagttacagtacttgtttgacttaggtttaagaggcccagctacctatctctgaccttttcaaataggctcatttgggagattcttttgccaggagagattcaactttccaatctaagtattccagagcattgcccaggcagagttggtttgatgtggccagatgttttgagttatttcccttaagtgtttcactggggagagaacagggagtgctcctccagcttcccaaagaaatatgtttttgtaagtggtaggaacatgtgcacacaatagaacatgaaataagttttttaacttgtaaaacatgtcaagatttttccaccaagctagaaaataaaaaacttagttctaccacatccaattaacttacacacccccttccctgtctcaacacctgctttgaccctgcttttctattattacatcagtcagcatcttgtggtccctaacatgaggatgtggctggctcgtgggaaacagcaaaacactaagcctgacctctcccaaattgggaagaccagaggagaaagtgcaaaactgtccccatttggaatgcccattccttctagaaaccagttggacagtgctcctctgcccttcataaacagactactgttgggtccctgattccaggctggcctgtgaaggattgccccaggtgtcccctttcacggttgtcacatttacagtgacttctgttgaacacccctcttagggatgtttcttttgctcttatttcctgcatctttccttaagggaagccccatcctctcccaggaccaggagtttatgaccaggcgagcacaaatggctaaaagccaagctgtcctagaacttcagtgggagagctgtctggttcatattctacccaggaatggtacttttcagtgcagccaggagggctcttgggatttcctttccaaagcacaaaaatactgggacccaagaagaacagctagaggacaactctgttggcacagagacggggacagcccagtctgctgacctcacagggtcagctgggcccccctggtgcttcaccacctgcatcctcttgctcagaatgcctttgcagttgagttttctgggtttctatgattgaccttgaggtttactccttgctcttacaacatttctaaggatttttaaaagtttacttcttgtcttgttcttctaaagctttctccaggacagatattttccctgtcttaaccactggtccagtcatcccagtgggcttctctttgtctctcccagattagacctttgggtgagattggcatcacaacatctaatctgagtctgtcttttgtccttcattctgtatggcagtctccctttgttataaaagctttctaaagcatactaaagaagccttcccagagccccgtcttgcttctcttccaggtgctctatcccctcgagaccctctggtgccaggcttgcttcacggccatcttgtgttgtcactgcagagtttggaggccagttttccacagcctaaacagggaggagctgcagaatggggctctggtctctgggcattcatttccctcatagaggctgagaataaaacaaggacttattcacacatgttctagaaccccagaatggcccaagttacctgagaccagggtttctcaaccttgacaccattgacattttggactgggtaattctttgttctgcagagctgtcctttgcactgtaggagatttactaatatccctggcctctacccagtagtaccactagcacctattccccacccagcgtgtctccagatattgtcaaatatcccatcgggtgcaaaatgatccctggtcaagatctgttgcccaagatgttacaggtcacaatgaccacatttgaaattgttttccctttcattttaccctgtgaaagcatctctcctagagccttgcaagaggcaggtgacattgtgtccatatttcttcctgtttcagaacttctgtttcacaacaatttctctctcgctacaagtattctttcactcagcactggggaagttgggaacagctggtcaccatcatccctttaatcaactcacacctgtttaaagagtgtttctgatttgaccttcatcccttagtttactggcgttaaaaaaagtctcagcaattttcattatttctcgtgggtctcattatcaaacctttacttatttcggcatatttcctctgggcttcttctagtttctgccttacaagcaatgctgttctgtaaatttattgaaacctctggaacatttcacctttagagatggaggatggaaggattggtaccagaagagggctaagatacgttttctgtcttgagctgaaagcacagtctactctccttcgttttgtcgatgagaaagttgaggccagaggggaggtgacatgtttagagtcacccagctggttagtgacagaaaaagcgtgagagttgtctaggattcctgccactttggtccctggcctctcctgggggaggctgctgttcttaggtgctctaagcttaatccctcagaatgtgtggacaggtcagcttagaagagatggggagattcaggatccccctgtgccagagcacagcctcaccggatgctgcttcccacactgaagtgtcctgtccgaccattgctatctgaggcatccacaagcaggtaggaaagctggcgagccattttacttcctgaggacaattccccagccacaggctctgagtcaaatttctatttggtaagcatcctagcagcaaagtcctgcactcagaccagccaaaaaacagcccccattccaagtacttggtgtcaaaagtccccgaacgacttttaaacccaagtcttcttaaggtttcagtactgtggtggctttagcagttgtttttgtgcaactataaattatttaaatcatctgagatgacagtcaattttacaaaccaggtacatattaatttgtataattttgtatatgctctggtacactacctgaactaacgaagggtagaactaattctgtttgtcagtgttcacacctgtaacattaggaggatatgtctgcattgcttatttctttatgttggtgtttctgtggcaaagccctgcacatggcatttctgaaaagccttaaatctttaagatgttgcatgtagggtatgcagtgcaaaaggctgcctcagaactgtgagcccttttgtaagctggaagcatttctcttactactgttacttttgtaggaagttttcaattcagagctgccaaagtgttcccgtaagcagtgccttagtaataccttagtcatgccgccagccttttcttacaccaattcctaatgttcatttacgaattggcccaatattggaaacaaaacaagcaaaaattgtcttcatttttgttttgtaagcccattttttctccagttctataggaaactgactgcttggtgtaaaatccgaaactggacacaagtcagttctttcaccacactcaaatgtatataccaaaacaaaaggttgcaacttcatagtttactatgaaaagcaaattgtactttttaatgttgccttttaaattcatgaccaaatacttagctatttgtgaatcttctgcactctagcatgaaagtgcctttggtttgagattccagcttagaaaagtgctgccataataacgataatttgtagagagaccaaaaatattttgagatcaccgtaatgcctttggtttaccgggatgagtaaccaaccacaggcctctgttcacaagagcacgacgtggtccccgcctgctgctagtctgtctgccactgggggcctcccaacatccatagcacacttcagcggaaggaccccagaaactgttgtgtttgtgtgtgctgatgacctagtgtgtcatttcacctcgtcacccagccctgcgtccggatgaggggacttctgcacaaatgacagaatctcggctggtggacagatactacagctttctcctcctccttgtgttcgtgttcagtctctgtggagactttcttttccattcaaatgacagtgcgcacttatctggtttacacaatgataccattttgaaagttggaagcctcaaactgagacgacagtgcagaacaaaacaaaagtgagttagggtcgttaaaattgaagtgttcttcttagggcaaacatgttgactccgagtattgtgtatgaatgtgctacgagaaacttccaaagagcaccattcacaatttggcattttcaaagaatgttccagccctcaaaggggcaactctttaaagtccttgttggcttttatccaaaccttgtagaaattgggaaagctgatagaggtaaggaagacgagtgaaaaggacaagaaggccaaacaccagccaaaaagaaactaggaaaaaaagattttctttgctaatatagatgtaaaaataacatcagacatctttgaaaattagcctctaaactcttaatacatacgttctgtgtgtctctacctggcgtctttaagaatatcctctctgggctctgaaattttaggagtgattcttatccactccaagttgtaagtatttgtagaaatttgtgcaaacaaacaaaaactatcaaatgaaaagaaaatgtactcaacctaacttatagttagcagctggaattctcaactcttccctgccagcactataccacagtgtggaagaaattagtcaaatgcttgttttcctgcttctcttttcaactgttactgtgctttgtttgaaagtagttttctctctcaaagccgttgcttatatcgttaagaatgaaggtttgtgtttaaaatttattgcattgcaaagggtagtttcactgaagtcatgcaccattaaataagatgaaatatttgtatttattgtcctacttcctaagccgtaacttcttttcctctgtgaatttgcattgagtcactcatgctacactacatcgctttagtatttgagatggcatttatgtttcctctcgtttatcatgaaatggggtcagattccatcagattccacctctgtcaggtggactcttgtctgccttccatgatgagattttttttctccttcccctttctttaagagaggctgacagatctaggtgtcaatcaattggaaaccagtctctgattttttttcattagttattttctatcattagtttcactgtgtaaattagatatcaactgcacttctttaaaaaaaaatacatctccctattacctccttgaaagatttacttctgtaggcctttttcaataggctcatgactgcagacaaggaaaaaaaaagtaaaaacaaaaacagtatgtgcctgaaaatgacaaaaaaaaaatttgtaacatttaaaaaagaaacctgaatagcctttaattctttaataatacacttaaattttatgtaaatcggttttcgccacgtgtgtttgttcacattctaaatgacttaatgggattctcacggtctgtgtctttgtgtcacgtgtataaaatgggcttgtgatgtaagcgtttcatctggtcagtggttcctttgatattgtactgctgctgggagtgggctgtggaacctgccttcgggtaactgggttcctcttgggtagattggagagatgggggtgggcgtgggcaaattctcacacatgttttcttaacctatttgcagaaactttcaaaaggcatttgattaaacctcttggcagtacagtattcttgtatttgttaacgtctgtgtttaggtactggtacctttttgttttaaaatgttctaagtgttggctttaaagtgaatttatctttagtatgatagttatatgaaaattataggatttgtgtgcagagaatttttttataaagtgctttgtaaaaaaaaaaaaatgtattctagcttttgcggtacatatgtgtgataactttaatacccatgacagttaagtgcaattatttcatcactctaaaaatgctatttttgtgtcagttcctgcaggtgttttcatgtctttgcaaagtgacacattttgatgccttcttgataaagtggtagacattttgtagctttctagaaactttgtattcatacggtatcaatgaaaaataaagaaaatgaaagtgtgggtcaccttttttatctgcagaagtgtatgttgttaggaatgaaatgtgctttatgtattgtgagtgatgatatgaaagacagagtaaaggaggtcacagctttcatctttttgaaggtgtccaccaagcttgataattggaactttaggtgttacatctaacagcgtttcttaaacaatacccacaagtcaatcaatccacttgcctatctcactctttagtgcatcattaaaattgacataagttttgcagaatggcttgtctgtcgatcccagacttaccctgagaagccaggtcccatgggctttagcacaccagcccaaccattgagtgttttttgttgctgttatcccaacttgttgggcacatgccaggaatgagggatagagcagaggatggggtacagagataaatgcagcatggctgtttcctacacagtacttaaattctcaggagtgggattgcacattgagctataactcctcccgacccctgtcctcagcatcaccatggggttcatgattcaggtgtatgcagcacaggtgcctaacaaaactttggattccccaagcgtttactgtatgctgggcactgtgccaagtgtgttggtacaatgtatatgtacattgtactttaaaattctcactatagttccagtgacatcattcccccaaactgaggcccagaaaggaaaggatagcttattaaaagtcatgactagtatgtggtggagccttaaagaaggtcactctgacagttcagcctggactcttggcccctgcatcttggctcactgcactgtggaagcagctcaagactagaggagaaatctggcttgggggcaaagaactttcttaaacgatgattatcttggacttctgacaatgagactcaaatgtaccttgggatccttcatttgtgtgaactagatctcagagggtcttgcttctccttatttccttgaagtctgaggcaaagcacgctctggaggggagcatgaacagagaaataacttgcctgcccctttgaaaagggatgattttcagcaagccaccatttgagaggaatgccatggtccagtgaattgctcagagcagagggaaggaaatgatttagcattttgttgaagtcctatgccaagcatcttcaccatttactttaacccaaatactcttgaaacgtggaatcatttctaatttttcaataaggaaatcgaagccttagagatggtagaggcccttgttaaggtcatacaagctggtaagtggcaagaatttagaggtgacagcacctccttgcagttctggtgcggccactcatgacacctttctacctcctcctctaaaacaaggtactttaatacctcaaaaacatcctttgttagtgcctagggttccagtcaccttgagttcagcaaagagagtgacccgctaggtaaaccaacatcattgagtaaagagactagaggagcaaagaggaaggttctggtgtgatcaaggaacaa

SEQ ID NO: 608 - DNA, 982319 bp, Homo sapiens
  source 1..982319: mol_type = genomic DNA
tcgtaccctctttttcattgccaagtgtcaaacaaaattgtccacaattacaggcaatatttgatacagtgtacacgtagtatagattgggggagggggtccctgagatctagaagaactcctggtgtgaaaaaacaagggaggggctacttggcttctggtgtctgcaggcaaatgtcatccacattgctgtgcatagctatcttattatagtgtggtaaaatagccaaggaagagcagaggggttcaaaactatagatctgctccccaagtatttcctgacatattgaggaggcagtgagcaacagtagcctggagaaaaatcattgccctggctctgggttgcattttccattttaattaaaattcgtatttgtccattctgtccaggtcctggccctgtggtctatgctattttgcatggcaaatgaaatcaataagagcctatgatttggaacttggaggcgcctaagcattttggtcatatttgctaagcagaaggcgagtgttttctgagtgatgtttggcatacacttccagtctgagggtgtcaaatgccagactgtggggctccctggttgccagttcatatgttagagaggttccttcccttcagctttcctcattttttttttcggttctatagtgggtatcccagcaatgaaggtgacagaatggcttggggtgattatcaggtggctgtaccagtaagactgcctgtcagcagttatcatgttggtgggtgactaggcagaagaagtaaccaggtgtgtccaagacacagatctgcaagggagaaaaaactgggagtttgccaaaagctcgttgaagaaattggagaaagattgtttgcatgtcgagaacaacttttattcttattctccagacaaagctaggaaatgttatgttagttgaatgtgacttggtatcactacaaagtattaatagcacatatttatgccttatgctcaaatctgctgctgcacctttctttgccttttgtttattttttcttttggagggggggtggtatttgttttctacccaagccttctatagcatagagagaatgtaattaaagaaggataagatcaatttggctttgaattgcttcacagtaagatcttgcattagagtgacagactgatcatgtcatctgtgcatacaaaaaatctaaagatgagtatttgttgttactatttttttccaaatctattaaattaaacagcaagaaaattaatttactgtatcgagttcttctatttaggctgattgtttagttaacattaaacttttgcaaaagagattgtgcagggctgaccaaggctgcatgttcatgttttcgtctgagtcagagcatgaatcagaactgaaggcagcatttcttgtaatcacagtcttgggttttttcttctatgttttcaggtggcaaagtgacaagtgccaaaactcaggcctgacttttctgaaaacatcagcattctgccatatctggaataatggatgtaaaggaccggcgacaccgctctttgaccagaggacgctgtggcaaagagtgtcgctacacaagctcctctctggacagtgaggactgccgcgtgcccacacagaaatcctacagctccagtgagactctgaaggcctatgaccatgacagcaggatgcactatggaaaccgagtcacagacctcatccaccgggagtcagatgagtttcctagacaaggtttgtagggtttcccctgctgatttgctctcaactgtctaacttacttgatttacatggttgatggctgcttttggagatccagcatggtggtttttgacagatgtaccctacagcagacccttggttccataaaggacattcctaacaacatggtgaatctctatcctgagaaacctaagattatctgtggtttctcaaaactattctcctcatagtccacttacaagcctcaaatttctattccttttcccattgggtttctcacttagattctccttgaacaaatggtgtatcttggttaaaacatctttgaaatagtgtataataatacgcccttttccctctactaaaatatgatgttaattctgagttatacgtttctctttttgtgtttcagagcatgggtggccacatgtatgttattttccaattccactgatgtaattatccctcctactttccccaagtcttaattttcctttccttatactgttttgatttcttttgggaggagaatatttttctcccaagcactaacagttggcactctcttcatgtccaatatttataaagagttctgttatcacttctccagggttgctgtaaatgcatcaacacgtagaataaagcaaagcagtgctgagaggtggtgtgacaaagctcactctctagctccatgtcttactagtcccagcctcgctgtgtgtgcactttacattgatggctcagcaaaattacaggcaaacgcacaaaactgtaccgaatgcctcgggaagggtcactctgccagtgccaaagggctaagccctgctctgctaggttattgcctcatttgttttataacactgattctttatttcttgttccatgtccttgggagtaaatgttgcaatgggtttaatttctaatgaaataacttagcttggaattctagtcctggtttctcagcttccttaaactactttttactactttttattacaaaatgtgcatgtgtgtatatatgttattaattagcactatgcccacggtttataaatctacaatccagaggttgttgtagataacatctttttatacactcctggtttaccctagcttcagcttttatatttaacataggattgaaaaaataaatcaacagagaaactgttagaattgtgtttccattgccattataactcttgcaggatacaatttttatttaatcttccttcttattttctgagttatcttcatgtaaatgaaacacatgctgatcctcctccatgagaaaatgggggcagaggctgcttgaaaattgctctggatcaaatgcctttgatctgtaacttcaacaagtgtttttgctttgttaagtcctcaccattccccaaatttcaggtagtggcaattggaaaaaaaatatgaagaatcatggcttaattaactgagagagagcttacatttccaatataataaaattgggacacctctctgttgtttcccagagctgcactaacacgagactcagatattttgaaaggtgatgcacgttcaacgtggttcaaagcctttcattttctgctgtagtttttgtctcatttacgttgttcctgcatacgtttttgtgtctcataattctgtgctgaaatgttcacttttcttcctaagttttattaaaagtgcatcctggcttctggatcattgtgcactgacatgtagattccagatgattgttgaattgtagataggcctgtcaccttttcctttattaatatttacataaaataaaaccaaggactgggattttattttcaaatatacctttattcttcctgtttagtcttgttcccctccattgataataatggaggttgcttggccatatcaaactcatagctttgcaattaacaattcacacatgccgcatgttgttattgagcccatatttgtttgtgtaatgtgtttgcatgaattaaaaactgtgcaggccaaaagtagaaataaaaagcatcagaaggtatttgcatatgcaagtgcaattccttctgaagacatctatgaatttatgcatgaaaatgtagtcagagtctgagtggatctactttgatgggttctaaaattgaactctgcaggaagtaaataagcacatatttaaggagaggaggaacaggagatacaatctggcaagcagtacattcaacttgaaacttagccactacagacagggttaaaataaattttacactcagtaataacaataatttttttaaatgtcatgcatttcccattttattttcttattcatgaaatcaaagagcaggatcatctccgtacttattagcctagaggtacattaacaaggatcatagtgggatcatctcttgcagtattcttatttaaaacccaagacactgatcataaaacaaacacacttctcacatacaaccaagttttgcaaacacagttggatgactctacagatgctcagggtggaaaagaattgccagccagcaaaagtgatgggggcccagagtcagaccttgtccagttaccccagctggcccattcaagtatcaaatgcaagaacctgccatctcccagcaggagaaatgagccaggtgttcccatgagaagtttacggaagctcggtcaaattgtgcccatctttgcttgctttcaacacagaatcctcctctgccttcttctattgtggcttcttctcttgagtatgcaaatcacctgtctggcctctattatgctggatcctcctggtgtgaaagaagaaaattgctgaccttcggtctgtggccactggagtaattagtaattagtaaatgactaatcctgcactaaatagcatcctagtggtctgagagctaatgcacctgacaaaagtgagcagtggtctgatccctggtcagacccagccctaatccaacctgtgaaatagatgccactttgaataatgaaggtcggccaagttcccaggcagtttgtacaagcttgtctttttttttggaccccggagttagggtgaagagcaatgtgatatacaagacattctcctggggcttaggagtctagagttggacgtgaattctgcttttgcatgtgtatgtgcctgggactctgctctgcattctgtgtttcatcaggattactacatggtttttaggtatattaaacaaacaacaataataacaatgacaaaggaataatggcgaacaggcgggcgcggtggctcacacctgtaatcccagcactttgggaggccgaggtgggcggatcacgaggtcaagagatggagaccatcctggctaacacggtgaaacgctatctctactaaaaatacaaaaaattagtcgggcgcggtggcgggcgcctgtagtcccagctactcagcaggctgaggcaggggaatggcgtgaacctgggaggcggagcttgcagtgagcggagatcgcgccactgcactccagcctgggcgacagagcgagactccgtctcaaaaaaaaaaaaaaaagaaaaagaaaagaataatggcgaacatttgttgagtagtttgtgtcaggagccaatctaagcattttgcttgcattaactcagttaatgctcacaacagctttgcgaggtggatactatcactcccttgtttacttatattaggaaactgagtcagagagagattaaataagtcatccaggttgaaaacatggaaagagccggagataggcttcaaacctaaggggctgtattcaagacctgtgttttaaaccaatgtgtttcatcacgtcccaaaaaaataagtaaacaaaacaaaaatatctttaaatccttagtcaaaggctgggaaggatctatgaaattcactttctaagccttttaagaatccatacctttaaatctttcttaatgatacaggaactgtagttaacagtattgattgaacatataatgttcaccaccagctcccagccctgctgatctaattcctgttctcatccattcacctccatctcacaatcattcctgactctccagaagcattcctgcctacaatacctctctaccaaccaccactgtaggaaaacgtttcgactgtagggatgtgtactgggctgtcagcactgattctatgccctcccttatggtcatcacctttttgcacaaactctcaacctggaacactaacaaagaaaggtgtcactatctaaatgatattgctcaggtaagtagaactgacttgtttctgtgctaaccaagacccagtgggccagagagttcagccagccctcttattcctcaaaaagtgcttctttccagttagcagttcaagtctctcgagagggggccaagattgaattctttctctgtacgtcaggctggctgtctaggtcaaggtcgaagaaaaaattgggggaagattgaatttttgaaagtatgcttgcatcagttctctcaatcagttaaagcaaagagataaatcctaccggctatttgatgtgctttaaaaagcatgtaaacaaaaatcaacacacatacacattttaggctaggtttggttttggtactccataaactaattcttgctcctatgatctttaaaataatgtgggcaataacttttgctctgtataatttggcataatgtacatttaaacagtgttaatgagctgaaaactcatgaaccactagtaagctagagtattacctgcaatgattcaattaacttatataataattgtgggaatactttggaaattgtaaatatttctttctatgcctttgtcttaaaatagccatttttccactatacctaaataataattaaaaggttctagtttgaaaacctcagcactttaatttacctacaaagaataccttgtagatgttagtaaagttcaagagtttctgtggtcagtatcttgaaggctgaaatgtaccttgagaagattgctttccatttattttcccacttccaggtaggacttcttttcataactcaactaagaataacacaatgccttctagtctttggttgtattgttttttcttttttaaaaaatatccttagaaaaagagaatctacaacttttcaatgttatctttttgctggataacttgaatccttgttgttttatatgggaggcatatgtgaaaagagtaatgaatgaagactctggagttcaactttgtccatatcccagtgctgatgggtaccgctagtgtgatcttgatcaaattctagaacacagactgagtctcattttctccatttgtaaaagctctaccatatataggtattgggtttatttcttacaattgtgtatttattagatctggacattatctttcttttaataagtgctagtagttatcgttacagttattgtcactttaaccctactaccagcagaagtggcgatcacttgctctccgaccctaataatactttggtgcaacagaaatttttctttcctcttgatttgtttcccatgacttgcaaaaattctgacattttcaaactcagaacttttttccagcttgttcatagagtgtgtctgactctctatccaccatacatttctttcccaaagatgaacataactcatacattattttcctatttttagacaggaatgaaagatactatctaacaactgtcaactgatgccaacacactgtaagagagttgctagtcagacaattttacaagtcaaaaaaaaaaaaaatagattggaaaaactgctctaaggtagtgtcataggatacaaacactttttttaagtgtgcattttatggcatgtaaatccatacatatttcagaaatgagtttaagagtagatttaatccatataaatgctggataaaattaatccattttcgtcactttatgggcaataatttggagtctatgtcagagagtcaatgttttggattttcatcattgatgcttactacccttctaggaatatgtctatattttttgataactttagccatttggcaactatcttcatgtttgcccaactgttatcctcccagtaattatctattgtcaattctgtgttcaactttatatttaactttctttgaattaccttccttctcctgctctttctcagtggaaattccccagagtttcaccctaatcctatactcttcttctccatagcactttctttagaacactcttattcatatgacttcagtggccactatttctgcttctgaaaactttttcatttacaaacaatagtatcccagttcaaattagcttacttgaaagggtaatgttttggcagacatcaccagtaatctaagaaagcatctgccctcacacttatcatctctcacaagattctcattctcatatattggctttattctttggagcgatctctttgaagatgtctgctgattacccccactctcacattttctcatttggtaacatcactggaaagagtcccttgtttatatatatggttggggtttattttgctgttttcagcagaatattctccaggtagatattcaggctggcctggcatgggacacatgctgatgatacctatatctaccattttacggctgtagctggccacatcttggatgtaggtttatcctgtgcttggagatagcttacagtgagtgcctcctaaacctgatggaatgaattccgcacaggaaagaaagactctgatagctgcagtagactgtaaacactaactggcctgataacaaatgctcctaatgctagtgaggctgaagtttaaggcttcctttctgtagtctatctaagctgtattggtccattctcacactgctaataaagacatacctgagactgggtaatttataaggaaaaagaggtttaatggacttacagttccacatggctgggaggcctcacaatcatggtagaaggcaaaggaggagcaaaggcacatcttacatggcggcagggaagagcacctgtacagaggaactgcccttcataaaaccatcaaatctcatgagacttattcactatcatgagaacagcatgggaaaaacttacccccatgattcaattacctcccaccaggtccctcccatcacacatggggattatgggagctacaattcaagatgagatttgagtggggacacagccaaaccatattataagcttcacatccactttgctactgggccttggaatattttatctttacatatccaagtgggaaatttaattgtctttccctcaaaatttgtttccgtttttcatttctcagctttggggaatggtatcacagccttgcattttagataaagtcttccaagcctcttttttcttgatcctttatattgatgtttaccacatcacacctattattcctgcttcatttatctcagtttcaagtttctcattccatgggcagcttccaatatttcaacactggacaattgcttgagcatttcaatcgcctccttccctaattctttcctctggcatgttttccataacatggatagttttgagtttttaaaacacggccttatttttcccacttccctcaaattgattcaaaaatatttcaggggttcctaaaaggcaactgcaatttgtgggacacaacaataaaaaaaggtaaacatggtttctaacctcacagaacctggcagttttaaaatggtaagatataacagatatgtaactaggtaccttataaaaaacactacaaaagggataatattggatggttttggagagacctctaacccagatttatgtccggaatggcatcccagaaattgtggcattcctgcatacatttgagggatggggaggaggttggacaatcaaagaggcaagacagtgttcaggcaagagtcatggcatgtgcaaaggcccagaggtgactacattttgttgttccaaggatgtcaaagaagtgtaggttggatgagctagagtggcagagagagacagtcatgaagacatttcagggagacagtgctggtttcagcttgtggagagaggaaagatggtcagttagaggttgtgtcttcatctaagcaagggagcctggtggcctgaactaggatagcagagattgtttgagaaatgttattgagataaaaagagtgttggcttttttgtttgtttgtttgttttaaggcagagcttcactcttgttgcccaggctggagtgcaatggtgcaatctctgctcacagcaatctccgcctcccaggttcaagcgattctcctgcctcagcctcccaagtagctggcattacagggatgcgtcaccatgtccggctaattttttttttttttttttttttgtattttttagtagagacggggtttctccatgttggtcaggctgttctcaaactcctgatcttaggtgatccacccgcctcgggcttccaaagtgctgggattacaggcatgagccaccgcacctggcccctgattgttggctttttaggataccttaaaagtggaggcagatatactgttctgagactcctgggcattgactgcttttttctcttggaaagagaatattgcctttctgatgctgagtttacttaaagagccaggaaaggtcaacgcttgcaaataaccccttaagtggaagtacatagattgttagttcaggttcttctggaatgttggacataaacctaagtataaaaaatgtagtgttgcaacaaaaatttggatttttttttaaaatttgttagattcctgcctatgcaaagggtagcaccagctacagagcacttcatacggatcccaggcaaggaaaaaatagagaagagattatgctgcatctgccccttctctgtgtggaccatgataccattgtttgttctctatcatggactaaataaatcagagactctaagtagatgtgagttctgtgtgtgtgtgtgtgtgtgtgtgtgtgttcaactgagtgtgtgttttatccctgccaatggtaactttatttgcaaagctgagtacgtttggaagatagaaacaatactttcttgcaactgatggggtaagcaggctaagcaaaaaaagaaaagtcaaggacatccctgaagtttctggttatggcaactgacaagatgttaccatcaatccccagggcttgagacagaggatggcctggtttgtgggttagatgggataggtaactgtcaaccttttgaattggaggtatcctgtaggctctccatgtgcagatgtctaataggctgtggctgtccagtcttgaaattctggagagaggcttgagctggataaagatttagcagttgacagctaataatttcatgggacttggtatgatcatctgagaaaaaaatgtacaaggaagagaaataagaagttcacatgacagtgcaggtactcaaggaataggaaggggaagaaaatcctgtgaaacaagtgggggaaaaaaaagaacaccttactttcctttacatgtgctattcactcagtgcaaacttgacctgtcattccacagggcgagttttattccccatcccaccactcagagttgacctcctttatgtcccctaaatcagaggccacaaaattaatgtacataggacatattcggcccctagataggttttatttggcctatggatttctttagaattttgaatcaagtgccagtctattcacatttcagtttgccacaggccccgtttctgccttctgtcttacaccagtcctattcctctcaggcctttattttatatgccaaacctctgaaagctctcacaattgcaaaaatatcacggatcttcctatgtctatttttttcttgtggaatacctctctgcctattgcaaatctattcatcccacagggtgtgacctgtggttcacgtctttggtgaagcttcctgccctctgaatttttatagcccttaatgggttgttattgttgttattattctcttgatgagtgactcagcatacatagcacatggattctatgactcctatgaatagggaaataaacaaagggctctgcagttttgtgctctgactcatagatgcaactaccagggaatttgctctttttagtggcttgtttcctgttctaatgagaaaaatggaaagcacagctcagaaacagactctacttagaaaatgtggatggtatgtctgtccagcatgacaatgtcaaatctcacattttgaaatgccaacttacaacttttctgccatttactctgacactagcatgttgagttgcactaacagttcctttttctgattattggtgatgcaatattatcagcttctcttggctggtgccacatgttgcagttaagtctctgcagctgtctactctgcggtatgtataggagggctttggtgcatatgtgatctgtgcagggatgcctttctgaccagaacctttgggaaaactgcacagtgagagacggaagaattgccaggatcagccttaccatgctttacaatctgtgtccaggagtggcactgccccacccactgatgaatcatcacactgatattatcaaaggagacattacattttcaatgtcatgttttaggtttataatttaattttcagctctggcaattccagaagcatccctagggacatatgaagaggaaggggctagcgtgtactcgaaatgaatacatgttcatttcttgagcaccttaattggcatgcacatctcacaagctccctttttctctgctgcagccaaactctctcacaccaccaagttactcaatattcctcctgcactgactgccttcctttccactcaacctcaagtcagatctactttagtaataaatctctgctgggaatgatcagaacaaatactgagtgtgcaccacaatattaaaaataagtgtaatatagacttatttaataaggtccaacagacttttataacatttggaatattttaccaaaggtactatcagcattatgtttaatgcattttctccaagacagaaaaatcttttcaagaatgaggggggaaaagaaaaaaaacacaaaacacagagaaaagtcagatgggctctgatgcattctcactcaactaaatctgtgattctccttcctttcccagatctttctcttcggccagacccacaaaatgtgaagcctctttgtgttcaccctgatttatgaatagtcggcactgggcaattgcggtcccagtgggatacatttcagtttaaaaatagtctgaagcactttctttcaaattcccacatgtccactgccacctcataatatgtgcttctccttctgtccttgtgcagttaaagtcggatccatgtacggggaatgaaagcactgaatttgtttgtagcactttgaaccaaaatggtgaatttatttagagagtagttccagcgagttaagttagtttcaatggacatattggctgcaactggagcattgatggaagggaggcatactactttaatgtcctcaaaaagaaaaaaagaaagaaagaaaataaataaataaaatccagtcaactgcaggataagtatccataggccaaacaaatccctctcaaaatgactgcaagttcaggtgacaccaacagctgtcaaaagacccctgtttgcctggcggcagctttgggttcaaattcttcctagtttacagtgacatttcatttaatgcttgcactctgactccatttgtctgccctgcaaaagctctgcaaagagctgacccagttaacactttctgtttcacaaacccagagactgaacagcagggaggctacagcaaagtgctgagttgtcctagctgagcagtaaggggacaatgactgtggccacagtccatgtcatttttgtttctagaccagtggtgactcattggactctcctgggcagttctgaaaagtctgcatgtcctagtctcacccaagaccaattaaatcccaatctgtggcagggaggacccaggcatcagcattttttaaaaccaaatctttatataaataaaatgtctcaagggatttgagtgcaaaaggacatactctatagaatataatatttctttggtaactgatgacatttcaagcttataggacctcatacttagcatagtgacttagaatctcacttttcactcagaagctcataatagagtcttttgattcttcaggggtttaggttaataaatgcaatataaccgaagctcattatgtagtgtttctaaaccactatcgagtaatcatttgctggtgtattaggcattgcaagcccttggtgccatagtccatctccttgtttctgagtcagaagaagcaggtggactgattcttctggcacccctgcttctcagcccacattgtgtcaaacattaaaagtgaggttttaatttgagtacctggcttggaatgtaacaggtaacagttgattatgttaattgatccaacgtcttcaaagtcaaagcagtaatgatgaatctggacctactattggaagaaaatgatcaagttacatttatgttgaaagatgaagtcagtagggaaagattctgttaaaatagtgggtttcatgcgcatccatgtgaagagaccaccaaacaggctttgtgtgagtaacaaggctgtttatttcacctgggtgcaggcgggctgagtctgaaaagagagtcagcaaagggagataggggtggggccattttataagatttgggtaggtaaaggaaaattacagtcaaaggggggttgttctctggtgggctggagtgggggtcacagggtgttcagtaggggagcttttgagccaggatgagccaggagaaggaatttcacaagataatgtcatcagttaaggcaggaacaggccattttcatttcttttgtggtggaatgtcatcagttaaggcaggaaccggccatctggatgtgtacgtgcaggtcacaggggatatgatggcttagcttgggctcagaggcctgacattcctgtcttcttatattaataagaaaaataaaatgaaatagtggtaaaatgttggggaaaatttttgggggtgggatggagagataatgggcgacgtttctcagggctgcctcgagcgggattggggcggcgtgggaacctagagtgggagagattaagctgaaggaagattttgtggtaaggggtgatattgtggggttgttagaagaaacatttgtcatttagaattattggtgatggcctggatatggttttgtatgaattgaaaaactaaatggggccgggtgcggtggctcacgcctgtaatcccagcacttcgggaggccgaggggggcggatcacgaggtcaggagattgagaccatcctggctaacacggtgaaaccccttctttactaaaaatacaaaaaattagccgggcgaggtggcgggcgcctgaagtcccagctactcgggaggctgaggcaggagaatggcgtaaaccccagggggcggagcctgcagtgagccgagatcgtgccactgcactccagcctgggcgacagcgagactccgtctcaaaaaaacaaacaaacaaacaaaaaacccaaaaactaaatggaataagagaaggagaaaaacaggtattaaaggtctaagaattgggaggacccagggcatctaattagagagtgcctaaggagattcagcatagtcctgccagcaaagattatttatttactttaagagttaagagtggcagtttggggatagcacgaggaggtatcagctgtgatggcttggagaaacagtgtaaactggcagtgtaaacaagagcagggcatgtatgagtagttgagaacggtgaataggagtgtgactagacagaagatagtagggatgacaagtttttgggggcacagtccgagttggtctggtgtctggactgagactggggcttaataaaaaggagcgtccatacaggagctcaaatgggctgtaccctgtagcattccgaggacaggcctgacttctgagaagggaaagtggtaaaagtattgtccagtcctttttaagttggtggctgagcctggtgaggtgtgtttttaaaggacctttagtccgttctacctttcctgaagactgaggactgtaagggatataaaggtttcaccgaataccaagagcctgaaaaactgcttggctgatttgactaataaaggctggtctgttaacagactgtatagaggtgggaaggctaaactgaggaattatgtctgacagaaggaaagaaatgactgcagtggccttctcagaccctgtaggaaaggcctctacctatccagtgaaagtgtctacccagactaagaggtattttagttatctgactggggacatgctgattaaagctaatttgccagtcctgggtgggggcaaatcctcgagcttgatgtgtgtagggaagggagggggcctgaataatccttgagaagtagtagaacagcagatggaacactgagaagttatttccttgaggatagatttccacgatggaaaggaaatgagaggttttaagaggcaggctagtggcctgtactatagcatagcctgcctttgctggtgtgtggcgattaggcctggtggaactgccatcaataaactaagtgtgatcagggtgaggaacaggaaagaaggaaatatggggaaatggggtgaacgtcaggtggatcagagagatgcagtcatgagggtcaggtgtggtatctggaataatgtgggaggctggattgaagtccgggccaggaacaatggtaattatgggagactcaacaaagagtgagtacagctgaaggagccagggagcagaaagtatatgtgtcaggtgggaggaagaaaagattttggaagttacgagaaatgtagagagtgagttgagcatagtttgtgatttttagggcctttaaaagtattaaagcagcagcagctgctgcacgcagacatgagggctaggctaaaacagtaaggtcaagttgtttggacagaaaggctatcgggtgcggtcctggctcttgtgtaaggattctgaccacactaaccatgcctaggaaggaaaggagttgttgttttgtaagggattgaggtttgggagattagtcggacatgatcagcagggagagcacgtgtgtttttatgagaattatgccgagatgggtaacagatgaggatgaaatttgggcttgactgaagtaaaggggactgtctgtgaagccttgcggcagtacagcccaggtaatttgctgagcctaatgggtgtcagggtcagtccaagtgaaagcgaagagaggctgggatgaagatccagaacagaataatgcgttgtagagggaggtattgaggataggagagtatatgagtttagcaccatggggtggataggcaaaacaatttggttgataaggcacagatcctgaactaacctgtaagtcttgtctggttttaggacaggtaaaatgggggaattgtaatgagagtttataggctttaaaaagccatgatgtaacaggcgagtgataacaggctctaatccttttaaagcgtgctgtgggatgggatattggcatggaggggggtaagagtgattaggttttaatgggatggtaaggggtgcatgattggtcgataaggaaggagtagaggtgtcttatacttgtgggttaaggtggggagatacaaggggaggatatgaaggaggctttgaactgagggaaaaggcagcaatgaggtgtggctgtagcccaggaatagtcagggaagcccataacttagttaaagtgtctcggcctaataagggaactgggcaggtggagataactaaaaaggagtgcttaaaagagtattatctaagttggccccagaattggggagttttaagaggtttagaagcctggccgtcaatacctacaacagttatggaggcaagggaacagcccttgaaaagaaggtaatgtggagtgggtagcctccttattgattaagaaggggacggacttactttccactgtgagagttacccgaagctcagcatccgtgatggcctagggggcttccgaggtgatcgggcagcgtcagtcttcagccgctaagccgagaagatctgggaaggagtcagaaagccttgggccagagttccaggggctctgggagtggatgccaggtgagttgaacagtccgatttttcagtggggtcccacacagatgggacatggcttaggaggaatcctgggctgcgggcattccttggcctggtggccagatttctggcacttgtagcaagctcctgggggaggcagttctggaggaatgcctggccactgtggtttaggcatttggaagttcttgtgtgctggagatgtggctggggtttgtctcacagtggaggcaaggaattgcaactcagaaatatgttgccacttggctgcctctactctattattgtacaccttgaagatgaggttaagtaagtcctgttgtggggttggagggctggaatttaatttttggagttttatttaatgttgggagcagattggataataaaatgtatattgagcataagacggccttttgaccttttagggtctagggctgtaaagcgtctcagggttgctgccaaacgagccatgaactgggctggatttttatatttgatgaaaaagagcctaaacgctatctgatttgggataaggaaaaaggagcattaaccttgactatgcctttagctccagccacctttttaagagtaaattgctgggcaggtgggggagggctagtcacagaacaaaactgtaagccggaccgggtgtgaggaggggaggtgataaaaggattatagggtggaggagtggaggctgaggaagaattgggacctagctcggcctggcaaagaggagagagatcagatgggtctgtagaaaaggaatattagaaagactcacgacgcttggggttgggactgaggggacaggtgggagggaaagaaggaagatttgggacaagttgcattgggaacagagactatggagggactgatgtgtaaaagaatgcctggacatcaggcacctcagaccgtttgcctattttgtgacaagaattacttagatcttgtaggatggaaaaatggaaagtgccattttctggctatttggaactactgtcgagtttatattggggtcaagtggcattatagaagaaaataaggcatttaggttttaggtcaggtgtgagttgaagaggttttaggtttttaagaacacaggctaagggagaagaaggaggaatggagggtggaaggttgctcatagtgaaggaggcaagcccagagaaaagagagagtagagacacagaggaaaggggtttgggggttcttaccctccagaaaaggaggaaaggggtcagggtggggaaataaggggttggggtgcagagataagaggtcggggcatggaaataagggatcagggtgcagagataagaggtcggggcgtggaaataagggatggggcacagagataagaggtcagggcgtggaaaaggatcagggtgcagagataaggggtcagggcatggaaataagggactggggggttcttgcaccctagaaaagtggtacttgccactaagggtgaaggagaaggggttggggggttcttactgcccagaaaagcggagaaggggtattgacatggagagaaggggttgtggttcttgcccctcccccagaaaagcgggacttgccgctaagggtgaaggaccaaggcaggcatccctgcatggtcagacacctctgaaacatgggtaaataatcagagaggtgtccctgcagtgattaaacaccaagggaaggctgccttcccgagtccgtgagcagtgctggagttttgggtccatggataaaacgtgtctcctttgtctctaccagaaaatgaaaggaattgaaattaagagaagggagagattgaagggtggtgccaaaattgaaaggagaagatggttgacggttagtgagagaggttggagaagagagtaagaagaggccgcttacccgatttaaaattggtgagatgttccttgggctggtgggtctgaggacctgaggtcgtaggtagatctttttcacggagcaaagagcaggaggacaggggattgatctcccaagggaggtcccccgatcccagtcactgcaccaaatttcatgggcgtctgtgtgaagagaccaccaaacaggctttgtgtgagcaacaaggctgtttatttcgcctgggtgcaggcgggctgagtctgaaaagagagtcagcaaagggaggggtgaggccgttttataagatttggttaggtaaaggaaaattacagtcaaaggggggctgttctctggcgggctggagtgggggtcacaaggtgctcagtaggggagcttttgagccaggatgagccaggagaaggaatttcacaagataatgtcatcagttaaggcaggaacaggccattttcatttcttttgtggtggaatgtcatcatttaaggcaggaaccagccatctggatgtgtacctgcaggtcacaggggatatgatggcttagcttgggctcagaggcctgacagtgggtctgtatctccttttcaatgtgaatatgtatcgagactatgaatagctaagtaaaggtgaaaagtcccatactcacaaggaccaggcaggtaagataaacgggggaaataggccaggttgtcaactatgcgtcatggtggggactgttctgatttgaagtctgtatggccaggcagtgtctctcagggctggcaggttggtgcttccagggaattcaggtgtagagttgctagatctcccagttcctcaagaaaattgagcaatctggatttatttttatataaaatccccagatttaaaatggttctgtaatggtcacttgtggaacagtttaagtaggcttttggcacaacatcctggcttcagatttttctgacaataatgtgctaaatgcccttaaggaccaggacaattacacatacgcaacccatgaagtgcagaaagttagcagctgtgggacttccttgaatgatgggttcagaagccagaagataagaagctgatgataaatgcttcttcccctcatcctgagatgcacagcctaaggctcctgggaaggtccagcaccatcatgattaggcacccacaacggcagtggctaactgtataactcttccttgtgttggctttccctttccttgtctctgccactgttccttactcttgctcttctgaatcgcttccccagtaaactacttgttcacagcctcagtctcagcctctcctttcaatacaaattgggttaagacgtttggcagctaattcatttttaaaagtcactgtgtagaacaaaacaagactatctatagggcagatgtgtagtgcaggacttcttgggaaatggtagatttaaaaagaaggcattgagcttgagttacagacgtgatttggtacttagggaatatttgtaacttattttgttttccataagaaactgtgtgattttttttctttgctttttggattgtttgtttgttttttttaaagaattttagtaaacctttcattttaggatagttttggatttacatgacagttgcaaaaatattatggagtatcctggttgaatttttttgttgctgttattgttttgagtacatgggagttttctaaacacatgcttagcaaacctgatactgtttttccctcttcagagctgtcagttcagatttcagaaagtgcagaataggaagttataaacataccctgtaaattccttgaaagacagtgcctcactcatctttctatctcccttagaaccagccacactgccatgtacgtgacatttaataaatagttgttgaacaggggatcctatcatacatgagcacggagagggatcatagccagtctgaaggcccttccctgcactatccctgaccaccatacctcttttcctcctctccaaaaggcaacctttccccctgtgcgatttctgtcctaccagggtagattgggaaggacactggatattggaaggcaaggtttttcgttcaggtttgcctgaatctcccactcactcatgtatgattaagtgatctttgttgccaaacaaagccagagctgcagctttgccgtctggacactgtgagagctttctaggacatacctgtgcactgcatgtcacagtgtatttttagccaatccctgagtgaaagctgacaagcattttgtttctcttctagatcctataagcacccaccttgcatatttactcagtggctaacgaaaacagtaataataacacatgctatagtttcagcctcagattttagaacatctttacaaggtcttttttatcaacccttctcaggaaactcagacagcttgcttaaaaaaccaggaaatatagaaacaatatctgtgagaacaagttacttttgttcaatctcagtttacatctcaagaggatgattattcgtagaactttaaatgatgtggtaacaaatactgtaagctatttgttttccgtccttcacagaattgaaagcattcagcattctatggcagggattcggcacattttattcatggactatgtcagggatgaaatgaacagaaggcatcttatttcatagaggttttgttttgttaatgataacaataatgccctgcattgagtacgtcattgggtgccagggatcctccagtgcacctcacaagtatccattcaataatatccccattttaaaaatggaataactgaggttgagagattatgatcagcagagctaaggggacaatgggatttcatggaggatgtttagttccagagcaatataatctaatttacattactgaagaagtcgctggcttctcagtgggaaacaaatgcaaaaatggtgagagtggaaacagggacaacaaaagctacccagggttgcttaaggggaaccagcatcccaatatctagaagaggtgttggtgggtctgacagaagtttggagactcggagttgttcaaacgctaaaggcagtagcctgctccttatattcgattcggtaagaattatagatatgagcaatggttattttgtggagcacaatgaaagcacgtttcaatcagatcgtggcccttttccgtaagtcttgctttctggagcagagcagtgggtccggcactgttgtactttatctcaaaccagatggtcttctctagcttctatcagcttgcttgagacacacagtaagtactggcttcttgctcctcagtcatccttaggggacgatgatttgtttcttggcttttgaaaggtgatttaattcaggcgtatcagagccccttttctgtaaggggaaagaatcttaaaaaaaaaaacaacaactagaaaatcgtctgttgtccacaaacccacacatccctggttgtacggaacatcacagcttcttgttcacaggcagctttaacagatagatgcggggatgccagctaagccaagtgataagaaaacaaaacaaaacagtggataagggctcatcattaaaatcaactattcgtatcatttatatagtccccacaccaattattctgggaactgtgtctttctggaactttctgtcaccatcattcgttttcccaattctgtaacaccataataccctctttctctaacacagatacagaagacttgtagcaataatgttaataactgaataatatttactgaatattaactgtatgcctcactattccctgtaaagttggtacatgaaaatcatcactctgctaaggacaaccaaggcctagagaggttagttacttgaccaagtgcaggtaacttgtatgaaagggctggaaagagaatcaaacccaagctattgcactccagtggctggtgatcttaggtgcaagaaagtctgttgactgactatgtgaaaaccatactccccgcaacactggccagagggaagaaatcaaatccgtgtgttgagatggtctggacaggcaggctgctggaaggcagagtatcattacagctattaagacaatgcagagggctattttggtgctcagatctgtgcagccagatggaaattgtagttcaagcttagtgttgtcagacagcagaggctgtgggcaaaggggaaggcacgggtgagcgatttttgactgtttatctctaatgtgtgtggccagtgtcactcccatctctgatgtctgtgatttattctattatactgtcaggattaaaacaccttagcaggagaaaaataaagggagggatacaaatggtgtgtcattgatgtgacagatgctatttctctggaaaccatagaggatgagggtatggaaactctcaaaaatgccacgaccaccgaatatcagaaccgaacaaacctttagggaccatctgtttcaagccactcatttgacagatgaggaaactaagactcagggagcttaggtggtgatcaaagtaacataagctcctaaatttagagcaagaaccctaactcccaccgcccagttcagtattcattcagcaacatcacctgctggtgaggtccattgttccttcccctaaattcagagttgagattcacattaagtaaaaaaagaaaaatctgtttttattttagcaagagtaaagaaaagtagaaagcacgagccggaaattctctcctttgctctccagtatccatacaatgttaacactgggactgtggtccttggctctctttgctgttgctatcttttgtggctagctcctttcccttctctgaacaaaaggagaccctagtcacctcctcacccttgttaagtgatggggtgggccattctctgcctggtgcagctttcagctccttactgcgtcctcacccatccttgcctagacctcttcatccgctgtctctctcctgctgtttcctgtgtgaatagagagaaaggatcagagtaagtcaaagtcctggcctgccaaggaacccagacacccgtctctccacctcttgcctccttcctcactcattcctctgcactaatctttcagcaactcagattttctgaaacacttaaaatcagtagaaaagcacagaatttgaagcaggatgacctaactttaagcctaatcctgatcacggtgagccatgcaacatgggacaagtctcagacaagtctctgtgggccagagtcatcttctgtacaattggtatcctagacaaagttcctacacccagtattattctaggggtgaagttcattgatgacaaaatacgttgtaaagagtgtttattagcaccaaatttttactgtgggtgaaatgcctaaattactttgtaactcctcagctctattagaaaatcgtcttgtgctcagacatgattatgcactgacagggacctcctgtgagatgtgctgtctcagcccaggagactgaatccagcagcctccaagagtgctgtgttcccctcaggccgcactgcccagcagagacagcctgtgttcacccagaaagagggccaacatctttccagctgtgaattctgcttatcacttggctggatgcagcattgcttgtggcccaaatctcaccatgttcctcatataaatatgctgtcgggctctgctcgtggtgttctctctctaagaaatgaagtctgccaaggattaagcttagaattgagaccacagtgtttccatttctctagtttctaacgtgaagacacacatacaaaactaccacgttggagacgaacaaagggaaaccattttgggggtgaaggttagggagggcattcctgctcagagctcagaatcatcaacgcccaaccttgacacttaataaaagtatcactagaattgcctggagttgtgaattacctaattttgtagggacttcaatctctatctatattgtgtgtgtttggtggggtgggtgggggggaggtttaaatgataaaaaatccaaaacaaaaaacaaatcacaaatcaccttcctatagaatgatccttgtcttctctaggaagtctcctattttgtatccctacactgaagcaggtaagtttgctttgaatatgataccagaaagaagaatggaaagaacaaagatggccgctctccctttctctgaccccactgggttgatactgcaacgtggtccctgatttacaattctctactttactatgatgcaaaagcgatatgcattcagcacacttctgacttaggatgggattaagtccagataaacttattgtacattgagaatatcgtaagtcgaaaatgcacttttgactgaacatattttcaacgtatgatgggtttattcgttaagccaaggaacatctatagaatagacgcaatctctcccaaagctcaaaccaagatgaacccctcagaaaaacgaatgtctgcaaacagctggaaaaacctctgctatgtgctttatcctcacccctttcaaaccttagggctatggaaaggctttagaacctcaaaaccaggctatgactataagccgcaggagatcactcttgtcaaaaaacacttaaggttcattttgtccctagttttgtttgggagctggggatacagatgctaagaaggtagtccatgctctcaggaaacccacaagctactccaggagaggctaaaagagtcttattatgccaataccatagagaaatgacctggtagacaaaagcacggtattatgggaggagaagccaaggcttcccggagacccttgtaggagagattttgtgctgcgagtcagagttgagtttgctgaaggtttcctgagatccagttaggtttgctctagtgtgaactagattactaaaatagacagagaaaatagcatcctgatatttaaatatatgattaccctttctttataagtacttagctggaagtgtcttcgggtgaatactaaagcgcgtatctgtgaatgtagaccatattggaaacagatttactgtcccaaagcgtagtgcttactcagccatctgatgagatgtgagcactgagcagtttgagagggatgcatagagctgttttattacaagatgctgttatgagttatagcagctttccttatgctctacggctgtcgccaaacaagttacatgaatataagcagttttatttgcaattttttgcttacattttcttagcatattcggattatagcttctcacagctccactcatgctcctgtggctgtcccagtatattgctttattcagagccaaaaggagcgtttacaaacatttgtagaaagtcctccttagagtacacagtgctagtgtttattgatgctatcacctggcacttgtttttttcaaaaaataaaaaaagaaaaaagcattttcacccttggatataatgtgtttctttcagagaaaacttaataaatacatgaatttgcctttcatttgatgcagttgcagtaactcctgtgtaggaggttttgtgtttcaggaaaaaacaaaataaaacaaaaacaaaaaacaaaaaaaacaacaaatagagtttcaaatttcatttgatcaggattgaacctgaaacaactaaaataagaaagaattaattttgtctgagagatatacaccaggcttggttgttacatacaagttataggctggaaaattagtgttgttaattcccctggaatgtgtgaaaatgaatcagaggaattgatgacgttaataaaaatgacaataacagtaaattagtttatactaaatgtaaataatggttatgctgggacctaaatgaacctgcaacagctagggacttagtatgaacccagtttattcttattttattaagcatcctctagatcaaaatattgtgttattaataattacaataaatatctagcatacagtgctcagtattcagagcctgtcctcatctcactgtttactttgggaaaatagcatgttcattagcacttggcttggtccagggcttaggggacactggacatttgaacatgactgcataaccgagcttcattgaggagcaggggacaggtgccagatgaggttttaggtaatttgaaggattagtctttaaagagtcttttaaattactttgcgctgtactcctttttgctggttataaaaataattcacatccattttaaagaatttggaaataataagtgtataaagaagaaaattaaaatagcctatcattttactgctgaatagcaattgtttttatcattttggcatatttatttcccagcctttgagttgtttgtgtgtatgtggaatgtattttcaaaattggaattatatgtgctatttatatactactctgttcattttacttttgtcatgaatgctttccttaaattgttcttctggaatatgatttctttaacaatgatgtggcattgtcatatggatatatcacactgtactttccatctaatctttttcccaatggaattttagttttcgtgcgtttttcatattataatagttcagtgaacatcttttacataaatctttgtgtatgtcactcatttcttcagaatacatctgtatttaaaattatgctaatggagaggtaataaaagaacgagtaggccaggttttgatataggtataaatgtttggggcatgcatctaaaatcaaaaatgctttttaagacaaaatttaaattttacttacaaatcatattctaaatttttcagccacatatgcaacaatccgtttatatcatattctgaaatgcatcattctgttgtaatgatattttgttaaaccaattttaaattgtatgaatgtagggatcttatgtcattttatctggagcctagttaagggggaattttttaaggtcatatgactatcccttaaacctcaatttctttgcaatagcatcatgaggactacatcctaggaaatctggagttgtaagcataatcacaggcttaattgttttcccttgaccatatgcatatattgttgtatacatacacatatgtgcataaatatacgtatgttagatatatattatataaatcacatgtaacatattacacatattaaacacaataaaacatgtacttatatatttgtgttcatgaacatacataacatcataattttaaactattatttaaagagtttgtgcataccatcacatgatttgacagatgtgatgtgttttaatcaggtgaccattagaacaataaatacaatgctttatagcaatctggtctggtctactgttagtctccacttgccccggctgtcaaatattgcttagagttcatgtcagaaggagctcttgcatcatagtccaaagcagacattcccagaacaaaaaaaatggagtcaagagacacagacaggacttccttttctgtctcattttcgatgtatctgtgggaagctttctgcctatacaacaaatcattcctagggagggctgtatcatgatatgagaaacgaacaaaaaaaagaaatgatttctgattcctatgggaaaaattggtcttatgtgaaaattaaactcagtgtgttataacatttgctacataaacctgaacaaaagaaaaaaaaaacttgtgagagatgctttttctctccacagttatctttcataactatctctttagttttgtgtgatgctgctcaaatttgttggtctaaactgcagtgttctcggagggttcagcacatgcccttccagaccggaccctggcaaagcagaatcaagcgacaggatagccctgccctcatgaaaccttgaccttgactcttttttttttttttaaatggagcctccttctgtcacccaggctggagtgcagtggtgtgatctcagctcactgcaacctctgcttcctgggttcaagcaattctcccacctcagcttcccaagtagctgggattacaggcacgcaccaccactcatggctaatttttgtacttttagtagagacggggtttcgacaagttggccaggctggcctcaaactcctgacctcaagtgatgcatcctccttggcctctcaaaatgctgggattacaagtgcgagccaccgtgcccagcctgaccttgactcttggctcaattttctctgttcttggcatctatgttcttcagaccatgatgcaagaattccaggggtgtacaatcttttggcttccttgggccatattggaagaaaacgaattgtcttgggccatacataaaatacactaatatgggccaggagcggtggctcacgccttataatcccagcactttgggaggccgaggcaggtggatcacgagctcaggagaagacaagcctgaccaaatttgtgaaaccctgtttctactaaaaatacaaaaatcagctgggtgtggtggtgtgtgcctgtaatcccggctactcaggcggctgaggcaggagaaccatttgaaccagggagatggaccaaatgtctatatggcctatagcatttattattaagtctgtgacaccaatgtacttcacttggcaagtcacttattcaccttaagcctccatttcctcccctaaaatgagatcaaaagaggcataaatgattgcccttctcccatcattcactctatctctgcctctatgtagactcagttcttgctcttcaactgacttggtagatccttgaatatatgtagtcattttaattccaaataattagtactaaagtaagaaaattctggtgagagaaaactgcaactatgtttaaatgtacaaataaaggtgaatcaatcccatttggagtaaagaacgtccagatgtcctcaaaataagtgtcctttctcctccacctattccctgtcccgagtctcattttcatgctcagcaagaccctctaccggattatgtcatcccccaccccgatacaaaagggttatgtttataaatgttgaatgactaacatatcctctcagcattgccatatagagtggcaaataatgttggaaggaaattgggcattttggaaaggactgatatgaatattaattatacaagtgtgggctccaaaatctcttttttaggtttttcccacctgcattcctacagaattgaatgtttgttcttctattatgcttatcagtaaattcttaattttgttaaggaaaaaaaacaaatccagggcaagtgcttacattatcactatcatctgcttgaagcctgaatttcattaagtaggttgttaataaaatgaggaatgatatatcacaactgcaatgctgtgtctcccaaagttaatgaagagttattattttatagatgacaaattaaaaggctgttaaaatagttggtaagactgtcaacggatttagcaacattctaattaaaaatagggcattaaagagaattaaaatcttgaatttggagaaatgagaaaatatgcttaatatgtgatttaacatagttaagagccctggaatctttacataagatgagatggatgtcgttttaaagatatcgtgacaaatttttgcaaaactaggacatcaccatctaatacaatttcacagagttgatgaacaatttgtttgccattaaaattatatttttaaatgtataagtaatattaaagcaataataacattttaatatgtattattataaagatatgctacatgtagccttaatatatattaatgatatacacatttacctgtcacccatttctaacaaattaatagttttcatttttttcattttcactgaagtacttatctatctggatacatttttatacaaaaatagatttttatacaaaagttacacttctgtctgcttttttcagttatacctcagtcttacatatcttaaatgttttcctttttaatcattaaacaccattaattgagttgatatgctacattttacttaaccattcctttcttggttagttaggtcccttccactttttactataataaataacattcaagaaacattttcatatacatttagagtaagtttctggaaatgagattactagatcaaaaagtattaatgcttttttggttgtttaaacattatcaaactgcttatcaaatgacttttatcattttacaccagtaatttaactacagttgtaattcaatgacaaggtggataggatttgatggcatcattattttataatttttgcaaaattagtaggtaaggtggtatcatatgtttgttaacttatgtttaaacaatctgctccaagaatttcacagataattagataacatgactgttttctctattaatttggttttctatattttattctttgacaagtggtcatatgcaaggtgccccacatatgatgccgtaattttcttttagcagattttggaggtattcacagaattgagattaagcatagctcaaacaaagatacccatggaatgaataaatgaaataatatttaatagagtaaaacagaaagtgtttagaaacatgttatagagtcaataacaggtatagtgaggatgatttttttcaaggtgtgctaaacttgaaaattgaccctttttatgagtatttcaggagctagagaatccctcctattcctaaaacaaaggtgaaggagaaacagggaaagacagagacctctaacaaacagaatgaatagctgaagtggacgggctgtctctgggagtgggcattctatagaatgcaagcagtgggggtaaacaaatgctgtttacatttcccatccttgttaaatgaaaaagaaaattaggaacaattatagctagagttatagaaatccaccttgtgaaatagagaccttgggtccaaagcgtctatttgcatttcactgtttctgcctggaacaagtctgttagcatggctcactccctactccctgcaggtctctgctcaaacattatctcttcctgcctactctctataaaatataaagttctgtgtaccccacttgccattccattcactccctgttcttttttatcatgcctcatgcttcttgatctaagatttgcttatttgcttatttatttactcatctatatactgcaagaatgtaagcttcataaaggcagagatatgtactgtatccctacaacttgatagaacaatgcctggcatgtaatggatgcatcataaatatttgttgagtgagagaatgaatgaatgaattgtgaaagatcaccaatggataaattacccaaactctggttgatatagccaacctactacaaatcaatgaccattccagtgcagagttgtacatgagcagatgcagtattggggccacaacactgtgtaaggttggatctggaattaaacctttcttgtaatcatatctgcctaagtgtttctttctttctttctgaagagggattaaagacagattctagaagctcactgtatattattttcagttaggtatgagtatccatacatgtttacttgtgcatgtgtgtatacgcatacatatacataggtacaaatatatacacacacatatccacacatccccacacatgtttgtatatgtgtattaagttcactttagtaaactctgtagaggatattcccttgagtacaatccgtagagtcagataatgtcgaccaatatttttctgtctttttaaagcttgtgaagaatttcttgagacattgcaatggagaaaagcctggaacaagtgaatttaaattgataattacagttagaatctggtactcatattgcataagacagttataactgtgtaaagagttctgctttattgtggctaattatgctcttctaagactgttgccaaaaaaagagcacacagtcaacaatgtcccagccttcctctgcacaccccctaataccaatgtcttcttatgtctcagtcctctcctcatcatcccttggtcacttttcagcctttattttcttatcacattgataacttgtagtatcattaacccttgacactcatcccatctacaattcccctaaaccagtagacgtccctaatttaaaatggccatggtcatcaaaggcagaaaatctgcttcctctcagcagtcaataatgcaactagaaaggatcccttcagtaggttcatgattcttcctattcaagaaatggccattggtgttttgtctttgacatcaattgattttatatttaattcttattcattttttaaaaccttcctttctcaattctaagtcaaatcagcactaaactgtctctgtggcggttacatatcttagttgctctttcatcctaccatagaatggagactcataatgctagaggagaccatgaaaagaccaactcatcaaccctacagttaatcactaagagaattgagctctcttgccatctacctttctatcaggaaatggatccctgagcatctgtctattattccttttgtgtgttgtgctcaacggaaattttccacatctccatctctgtaactccactgtcaagagcaatctcttaggcactgcctgccattgtgattattgccaatatcactgaattaaggtaatcaggccacattcatcgcatgcacttggagcagaagctgaaaccacaggtaaaattgaaatgtcctgtaatggccatttctgtgtcggtttcctgttcctttccctaaagtgcatttgcttttgcttttcctccttgcctgctgagatcattgtgtgggtgtgagtgtctgagggttcaggttgataagttgcaaagggaagaggggataaaaagccacacagcttgaataaataaatgcatgaaaatatgtggtactctagcatgccctaccgccatgtctccatcactacacaaggatgtcctcatagattaacttcagcatcagaattctgaaggcagagaagcaaaagtagcagctgtgggagctccctaaagtggaatcgggcatgacactctgaattttgaaattgcaaacccacagttcagtaggttgcagcaacacagaatgcagatggtgtgttcctttggattgtcagtgtagttctacagtgtatataaatggcttcagttcactcctgttggctctgtcactgccttttaacaccaatgtgtcagtaaagccatgttgcagtgacaatcgtgttggtaatggggctcagaggagaataccttgagaaaatttgaaattaaccatttcagaatagggaagtcttttaaatatgattcatgttagaaaaatgaggagcacagtgcactagacatacaaggttactacaataacttggattcacttaatgcatgttatggaatttaagaatagatgaagttgttcattttttttttttttacacaattacatgttttcccccacggtgtgaataaaacgagataagtgcacattataactatctcagtgattaaagcatcttcttttcatctataaatatcatataatagagttagagtaaatacaaggctgtaattaactttaaggccttcactgatacactatcaaaatagggccttactgccttccaatggcagctgagtcaaaaagaatggtttccatttagaaataatgtttggaggttttattcaggatcctatgccttatttcccaacacacagcttcagtggccagttagaaatataggttccctgccatttgcaatatctcatgcccctcctggtgttcccaacagctttgagactcagagcccacaagtggaatctgtgcatgtgagacttatttaaaaaggaaagttttttaaattttgtgaattacatttttgagactgtcagcttagagttgtcttccattaagttgatagaacgtgaagcaataggagagcagttggaataatatttccttagcagaatgttatgccttgcaaaggcaacttgtcattcgaggctttcttttatgggatatttagagattttaaaaaaaaatctgtttatcaattgatatacagttggccaatttaaaatgatgacttcatttcactaatgaccaatcagtgaaaggagtttaaaatcaattaactttgtgtggggccaggctgaatattatttgtttcactgttgtagaatgtctgtagaatatactgcatgtaaagtatattgtagttaagggtcagatgccctaattctgctttttagttatatgaccttgagcaagtgaatacatttctcagtttcagggttttcgtttttgtttttttcttttaaatggaggtaatactactttcttttggttagttgggtgtattaaattagaaaatccatgtaaaggcacttaacaagttgtctcgcatttagaagtcctcagacagtgttaacaatgatcattattatgttaattacatttacccatacaacctaggatagctataggggaaaaaccaaaagccaacaaatgatttagaatcacagatggttaatactaggaggaaaataactagattttcgtttaccctccttattgtacagttgaaaaacaatactcagggaagtctaggaagtgactattccaataacatgcatctatttgaaggaagaagctgcatcagggtgctaggttttctccaatcagcagtgatttctgctatgccatgtggctttcaaatgtatctgcttaaaaattagcaggatgacttgtctttgaaaatagaattacttcagtgtcacctcactttatattcaaacctacctagaacctattaaatggctggaatcaagggaccagttagtatgtatgatataaccagttgtaataagcaaggtcactactgtgttaaacactatatgcaaccaatctttgaccattcattctgcaaatacttattaaaacctctggtgtatgtcaggcactctactagcagtaatgatagttaatatgtgttgaacacttatgacacttcaggccacaggctaagaactttgcttatgtaatctagtttgactctaacagaaatcttaccaaataagtacttctattagtcccactttatgatatgatgaaaaacaaaaatcaaataagaaacaagtcctcattctatcttaacagatgatctgctatgcttatagcctcaggaataaaaacagtgtttgtcttctggcacatagatgattcccaataaaatatttgtttaatggattggcatacagcctaatggagattaaatacagataaaaattaatacaataaaactagtccaggcagtacaaaaaccagcacactgaaatatagttaggacccaaaagaagaaatgggcttattcaggaaaggcctgaattgacagattctacaggtaaatcctgacttaaatgacattttagatccttgccttcttttcttttgatagacacagaacgagatcattcagggcttagccatataggagtgctatggtttgaatgtttgttccctctgaaactcatgtcgaagtttaattgccattgtaacagtataagagctgggacttttaaggcatgattaagtcatgagagctctgccttgaggggtgagattaatgccattataaaagagcgagttgagccctttcatgctctcttgctcacttgacaccttgccttccaacatgttgatgacacagcaagaaggccctcaccagatggtggcactttaaaattggactttccagcctccagaactgtgagccaataaatttctgctcattataaattacccagtctcagctattctgttatagtagcacaaaacagactaagacaagggacaacttattttttatggttgttcaaatctttgttttcaagtatcctttttacttttagaggaatttcttcctgtaaagacaaacaaacaaaaaaaaacactaaaatctagaacatacctgcaatgctgatttcctgttttgttcttccaagtcacttccttaggataaaaagccactactctgtgcatttagagcccctgaaataaattctccattttcaaatgaccttacaagaagggactagaaaattgctagataagtcagaaaagatttttattttaaaaaattgatgctcttctctggaaattatattacagttctagctgtgatatgtattcacaaaattaaaaaaaaaaagataatccaagagtaagatgcaaactcatttttttggcctgtgtatgaaaatagacaaagaaaaatatagggcattttggggctgttcaggccaggataaaaaaggaaatgggtgtcattcctgaagcttctctctctggcctgctttttccttttctatctggaggctgacagacaggaatcacatagaagttattttgaaggtaattttatatggagtggagacatttttccccttctgcagtcataagccttgagaatttatcaccagcttcaaggtaagaaacttttttgccatgaatttgtctgctctaacgttccttaactttggtctctcagccaacaacttgccccttgtttccagcccagcggttaggtggtttgctaaggtagaaggggagcaaagcagcttaggctggggcagccaaaatatccatccatccctgctttgtgttatgctttctctgtatatgagctctaggttagttttacctcctcaaacttttctttgtttatttccccttaatgtctgcctgggcattgaatctgttgtcttgctgccttggcttattttttttttttttttgggggggggggcgggggggggggtggatggagtcactcactctgccacccagactggagttacagtggtgtaactcagatctcggttgcagatctcggctcactgcaacctctgcctcccaggttcaagcaattctctggcctcagcctccctagtagctgggactacaggcatgcaccaccacgtctgactagttttttttgtatttttagtagacacagggtttcaccttgttggccaggctggtcttgaactcctgacctcaagtgatctgcccacctcagcctcccaaagtgctggcatgataggcttgagccaccgcacccggctgctgcattggcttttatgtcttcttgacactctgatttgtgtgtttatgatgctcgtgtatttaagtgctcaaaaatatttgtttttttttttttgttgctgttgttttttgttttttgtttttgttttgttttgaaagaaaaaacatctatcaagggcccacagtgagtcatatctcaggcttcagtgcacttggctttgtattctggccctgttagccacccataccgtggagagagaatctctgcatttccctctctaggaaacaccacccaaacacttgggttctagattctaatatatcacattcaaatcccactgcgttgctccctgactgtgtgacctcagctatgcaagttgtgtgtaccttttcctttctttcttctatagggttgtgaagaccaaatgagatggctcatatgaaatgtttagcccagtgctcaagaactcttaattaccttttccctccccctttttttttaaatctccccattcttccttaaaggtgaaaataaacatcactgtccaaaagaaaaataggatggaatcaagattaaatgattaaagctggaattttccttttacgtacttaaccagtgggtcattcaaggtacttcacaatttgttgagagaaccattaaacaccattagtaggtcatctgccactgacttcaaaactatagtctttaaaacccagccaaatagggaaatcatcttaatagctccgatcactttgatttgggccagaaggccatggtgacagatgcactaagcatctcataaatagcggggtatttcctttagcaattataattcacagaatagaaatagtcatgtgctattattatgtaatatgatatcacttaaaaatgtaaaactgtcgcaggggcattctggccaactggccctgcacctttaaccacacttcagtttgttctggtctcatctgaatgaccctcacatcataaaatgtctttttctccttcaaattctgaaaggaggatttatactagtacagcatatagagctcgaccgaacttttgagactacctagtcttttaaaagtcctttatgagatgtattattctagtttggttttctgaatgtacagataaagaaactgatttagagcagtgaattggtttggcatggctaaatggatagtaggcggctggttcagaatttgaactgacatcgtcctaactaaccaaggttaagctgaaaaataaaacctttgttttatagatacagatatgtgtgtatatgtgtatggtgcatacatacatatataatatgtgtgttatatgtgtatatatgtatgtggatatatatattcccctccctaaaatagtgctgagatgtgtcctctgaatatctaacacctctgagttttttgttatatttttttcctaaatgcaatcagcttttactcactgataataaaaattgcatgtgctaattttgaagaagtcaaaaaattgagaagagtagaaaaagagccaaaatcgcctgaaatttcagaagtatctgtgaaaattttgataaatgttacacaggtatatttaaaatttcataaaaatataagtagaactcctggagaaaaatcaatgattggttcttattcccaggtcctaccttctaactcagagcatatagtacaggaaaatgataggattcaaaatgtggttcaggaaatgcaaatatcaacgtcacctgtgaacttcagagaaatgtacgaagtcagaacctccccaaggcttactgaatcaagagctctgagggtggggcataacgatctgggtcttaaaaagtccaccagactattctgatgtaagatcaagctagagaacctatggcatgatgtattagtctgaaagatctgagtttgaattcgtcttagccgtgaccttcattggatcatgaccttaattaagttagtcacccaactgttcctcatggtgaagtgaagataatatttaccttaaagagttttgaagattagatataagttacatgaagcattaaatccagagactagtccattgtagaagctcaatcaatgacaaccattatagaaggccaccattgctttcatcagcagctcagttacacaagtcatttttgagagatgcagtagcatgcactctaggagagaaacacactgttgttaatatttaaaatatttcaaatagcattacagccagagaaataggatccatctaattcacaatttgtattcctcagaagcaacatgtagttcttcattgccaagtaggtctcctttcaaagatggataggtaattttttttcaaaatattttaatccatataatttgagcaaatactcggggacatgagattctatgatgaaagctctgttttgatcacaaaactctgaactgcaaatgtgagagtgtgtgtaattccatctttctctttttatttatggaaaaaaaactaaatcgaaccaggtagttgaatccttctttcaagaaggattaacagtcattgggaccacgatgtatttggatagaacaagaggaaaaaaaaacatggaaataaatatgaaatagaaataaacatgattgtgtttttagtggtatttgcaatgccttacaatattactaatatgataataatcatattagtattccactttcaggtacattgatttaatgaagattactgaaatgatttataggaaaaaagaaacaaggtgaatttaataaggtgccagacaactgccctctgagtctataaaagtgttcagagggaccgaattcggcttaacctgacccagagtggcacattacaagaaactgcctcagtcttactcaagtgtgaacgtggctctagcaggccctactgggtattagttatggtgatgctgtatcaagtctgtggagtgttcattccccttccacctctgatccatgtcttttaatctcttaaactgagaatgaatggctattaaaaactttcagtgatttcagaaagattctttaaatataaaccaataaaatgaaataatgcaatgacaatatttaagcaggaatattatggcagataaattctgggaggtttactgctaatggccacttgacatttttaaatagagcgtttcagtaaatcactgaaaattagccgacaagaatttatactcatctatttaaatgatacttgtaaataagtaaatacggtttaaatatagtttgagtgatggtggaatttatagcaggaaatgtcctagtgtaggtttttgttctaattgaagatcaagtcaacaagcaactattgtagttgctttgttcccaggaacagggaagtatgctagttcctgcagacccacagaggagagaagcccaattctgcaaatccagtaactcattgctcaggttaaagtctatcaccctttaccccagaaaacctcctttccttaccacacaagtggacttacaagacttccaggttagaatttagaaatgctcctaattatatcttgtggattttagcttgcatatagttcaagagctatacactggtcaggggtttataataaatatcagtggtatattttaattatgtacatattaatgcattcatttcacaaatacttactatgcatgttctcttatattccagacgttgttctggcatagaagatggtaacagtgaacacagcaacatctgttctgccctgaacttatagtctatagttgagagatcaaccatgaacttgtaaattttttaaaaagataatttcagttaatggtgagttgttaaggaaaaaataaatggagcaatggcatagagagagtaactttggagagagataaggaaagaaccctttacatggacctgtctgaaaagatctctctggaaaggggacatttgaattggagcatgaagtgggggaagaagcttgaacggtggccaggagggtgaggggcattctgagtgaagagtggtcagggtacaggcttgaagagagagtgttctcagtatagcgcagggttagagagaaaggtcagtggggctggacttcatgacaagacagggaaactgtcctataagatcagtttggtaaggaaagcaggatatatttgatagtcttctagagaacataatttactatgttttgatattatagtgggaagtcactggatctgaggcatggaagtacatctactttgttattaaatttctggaaatggccaaaaatcgtagtaattttatacgtactcttaaaataggataaagtcagccaggcatggtggctcacgcctgtaagcccagcactttgggaggctgaggtgggcagatcacgaggtcatgagagcgagaccatcctggccaacatgttgaaaccccgtctctactaaaaattcaaaaattagccagacgtggtggtgcacgcgtgtagtcccagctactcgggaggctgaggcaggagaatcgcttgaacccaggagacggaggttgcagtgagccgagttcatgccactgcactccagtctggtgaaaagaatgagactccgtcagaataataataataattataataataaataaatatatatatatatatatataaaataaagtcaagcctcctaagtcatgttcagtttacatattggggaaaaccccaaagttacactcagtcatcacttcaatgcaagaagcatgtataattacaaaagttctcaggcagtcttttgaaagatacaatactgatgaagaaatagtttctgtctcaagtaagctgcatgctattagagaaagaagctatatataattacctatgatatacaattttaatgaaataaattctgtattggaagcctaaaggaaaacccggcaaattctgaataacattaaacatttattcttttttaaaaaattttattattatactttaagttttagggtgcatgtgcacaacatgcaggtttgttacatatgtatacatgtgccatgttggtgtgctgcacccattaactcgtcatttagcattagatatatctcctaatgctatccctccccgctccccgcatcccacaacaggccccggtgtgtgatgttccccttcctgtgtccatgtgttctcattgttcagttcccacctatgagtgagaacatgcggtgtttggttttttgtccttgcgatagtttgctgacattaaacttttattctacaaatatgttttgattgcctggcacatatcagaaaggatacaatggtgaacaaaacatgcctggctcttgctcttaatgagtttgtagttcaattggggaggcaggaattaaatatgaaatatagtcacaaattggaataaatgcaaaaagcaggaaagaatagcacttaagacagtatctggcgcatagacacccagtaaataccagttgaataaattgttgtttatagaagaaaaacagggattaacatgccttagagacagcatgttcagaaaaaacctccccgaggatttaccgataaaggtgaggtcagaagaagtgaaggaataatcatttcaaaagatttggagatgggatggcttctaagcagagggtccagtatatagagatccaaggatggaaaagagttctagaatgtgtcataaagacagagacatgatgttagagaggaagagaatggtgaaatagggtagagtattgcaggtcatgagaagttataagtcagtatgtaagccattgtggggctttgtatgtttagaagatcatcctaatttctgcaaaacgaattgactctgcggggataagagatgatgtttgtgatgatattgtatgaaattagattaaaagatgatggtgatttaggctaagatagtgagagtgcagatggatgaaagtggctgaatcaaaagggtttgcagaggcagccactggatatagtggaatggtgcaccttctgtcttccaggtatttaagctaaaagcttggagttatccttaatttatcgcagcattaagtgtgaacttgttaaaaaaaaaaaatcagttttcttatttctctgctcataacccattccaacagttcgatagtttctcatatcgtttttttttttttttttttttttgatggatttttgctctgtcgccaggctggagtgcagtggtgcaatcttggctcactgcaacctctgtctcctgggtttaagtgatcctcctgactcagcctcctgagtagcttggactacaggcacgcaccaccatgcccagctaatttttttgtatttttagtagagatgggtttcaccaagagatggggtttcttaacctggtgatctacccgcgttggcctcccaaagtggattacaggcgtgagccaccacacccagccagtttcccatatcttttgaagaattgaaactcttaagcccctaaaagctcttcccgcttattaaatttataaatcattcccctacaagtgtcccctttagttaatctaagctgcctcactggccttctcccagcattcaaataaaataatcacactacctcatggtattttccctagctgttccctctagctggaatgctcattccctagatagacacttgaagattttacttcctttagctcttggctgaaatagcacctaaacagtgaggtcttccctagtcacttatttccttatgtcctgaccctccttctcggtatactctatcctgtttctctgctttattttctttttagtgtttatcagtatttaacaaagtatatattttgtttagttttagcttttttggcttgtcttcccactaaaataagagaactgggtcttgttatttgtttattaccatatccgtgatgtctaaaatcgtgaccaatatatgttggttgaatgaataaatacatgacaatagttggagaaaggagttagtaccttccagaataaatgttgttataataactaaagttgattggccatttgaaaacaggtcagttgttgagttattggcttcatgcaacaacaacccctgtgggagatgagtctgggtagatagaattgggactggttggaagaatcttgaataccttgtcaagaagtttggacatggtcttatggagagttagaatccattagaaaatttttaaagagaagggtggtgggctgggtgcagtggctcacgcctgtaatctcagcactttgggaggccgaggcgggcggatcatgaggtcaggagattgagacgatcctggctaacatggtgaaaccccatctctactaaaaatacaaaaaaaaaaaaaatagcctggcgtggtggcaggcacctgttgttccagctacccgggaggctgaggcaggagaatggtatgaacccaggaggtggaacttgcagtgagccgcgatcatgccactgcaatccagcctgtgtgacagggccagactcagtctcaaaaaaaaaaaaaaaaaaaaaaaaaaaaagaggtggcatactccccttacgtttttgttaataattttggaaatggtgtgcagcaaggagcttgagtgggtagacattggaattaggaaaaatctgttgaggaaattattgaattgatccagctatgagatgtatgagaaatgttgaagctgaaaattgttttaaaaatagaaatagaaagaagaggaagagatatgggggatagaaattatgagttcttgcttatagtagtgattacttttggatttaaagacattctttctcattaagacaatttctttagtttttcatatccctaattcctcataaagcatttgtgtcagtggatggtcttgaacattgaaatctaccctgagtactctagtaccatttattataaaacaaattatgttactgtcctggctaaagcatctaaaactttcctgaaatgtttttcaggagcaagttcactggatttttagaaaatctccgttctttttgtttctgtcacttaccagacatatgaccttgagtatgtcatttaacttctctaaatgttgtttccttatagtataaaagaacatcttgggaagaggataccagtgacttatattcaaatagccaaagtgttgtcataattataatagccagccttaactgagtgcttgataaatgaccagccttgtgtccatcaaatcctcatagtaacactatcagtttggcatcattggttaaatattcctgttttacagttgaggaaactgagatgtagagaaggtattctgtttacatagggacgcttagttattggtgaagtctggatttgaatccagtctgtctgactccagatcttacacttttaaaagctatatgcttgctggggtagaagtagaagacttgtagcagttccaactgaatataaggaagagctttcaaaaggcagagtgagaacgagctgttttcacagagagtagtctctccctgtcataacacagcttcaagcagagactgggcactcatgagtatccagtgcttccattccaccaagtgtttggcaaggagatccaatacctaaaatggtagctgaactagatggctttgaattccttcatgctttagattagatgctccaaatctgaggatccaggagacaacagcaatgctcatgataatttctgtttcctcttatttgctatagcatttgaggtccatagcaattttctagcatttctcacttaacgttcttatgtttgtagcttattcctctatcaaaattttgaggacagggagtacgtttcattcttccatgttttctctgatgcgtagacataagttttggtcactacaggcttttaagtagtattgtgtatgtattacctattgaaaagcattatgggccaggcgtggtggctcatgcctataatcccagcactttgggaggccgaggagggcagaacatgaggtcaggagttcaagaccagcctgaccaacatggtaaaaccccgtctctactaaaaatacaaaaattagctgggcatggtggcacgtgcctgtagtcccagctactcgggaggctgaggcaggagaatcacttgaacacgggaggcagagactgcagtgagccgagatcatgctactgcactccagccagggcaacagagtgagactctgtctcaaaaaaaaaaaaaaaaaagacaagaaaaaagaaagaaaggaaaaaagagaagtattatgaagaaataatttgtttaattctacttaaatatcagttgaaagaagaaattatttcaaaaattaatggctaaatctgaaaggtcctatcaactggcaactctttcaggatagaaagatggacagatagtgcctatgagattatgatcatggccctttaactgccctcaacgcatgaatgtacctacagaagtgaggacatggaaagtctaaatctcttcatcccacttgagaaagatgaatttacaatgtaggatattctgtcatcttaagataatcaaaaactagacttttctttgttgggcgcgaagaaggaagatggagaacctcttctgtttgcaagatatattttgaaagagtgtgaatacaatgatggcaaatgcaactcttcaagagatgcaccattgaaataaaagtggtaaaagtgagacccattaaatgtgagcaccgttgagtcaagctgcatataattatcacagaagataatacggaagcagagaatgttgttaatgatttctcagagcccaagtggtgtggaaaacaactctgagtgcatttactcctccttttgtgtagcctatcacaatgtaaaattgagggggcacctggcattaaatactgtatttacgaaaatgcagtaaaaaaatcaagatagcatttagtgtattgttcttccacaaaagagagagaaggaaaaaaaattgcctttatcgaccaacgtattccaattatgatgttttatttaaataatcaccaacgggcaatttgttcaaagttatttctatattcccagcatgaaataatcccctatccactcaagtttttttatgactctaagatgggataagtagaaccataattacaggaaaaaaatttgggcgttacgattctagtccaaagtgttggggcattcactttcgtggcctcggcagtaccgtttgtctttgttgaggctctattttccccctcactttagctatgatttccttatggtattttaaattaattatcaataccttttatgcctttttatgtttttgttctatatttgtatggatagctcttgctattctttgtcaaaattgcttcctgtgcctcacgtgcctctgaactacagttggatcatgatgagggtttctttgctggtaactgcacccgcctcaacagaaacaggctttgttccctggagaacagctttgtgactactgaaccagaagcttcagtgttgcaggggaagggtcggaagatgcaaattcatgtttgtttggcagtggacgcttggctctgccccagtttcatccccatgagtagcatgcgtttattccttgggattcttaatgtgacctatcacttcaggaatatcctgtgcagaattttatttgcttgtactgggttgagttcataaacactaatcacacaaaaaaacctaattagcgcaacaatgaaaatggaaagactgaacatctgagtacttatgaatagtctttcagtgtcgttgattccgttagttatcttgtatattttatgtcctacttattacagtaaaataataatattctatagagacacacttatcaaggaagccaggaagagaagatactggctatagaggttatggctgagtcccaaactgaagagacaaattgatcctcagagttacatgaaaatacaagtgataaacgtggtaagaagtttgtttaaaaggtaaaggggaattaaagaaaaaatggatgtgaatttaaaccccagaaacagtagtgcgtggactggaaatttcaaaatgaattcataagccatcaacaaagattaaagcaatataacagtgttatgggcattaagtaaaatggataaagagaggaaaagtaatcagagaaagtctttccataacaggaaaactaggctgaattactaatggattagtaaggcaaatcagagaaaatgggagggggaacactcttattgcttcaggattctagcctcacgcctttctttctgtgagacccctacaactgcttacttcacctcttagcctcgattttctcagctgcaaagtaagcacaatgttagcacctctcgtaagattatttaatgagatgatgttcagataaagttcttaaagcaaggcctagtatatattgtggtagttgttgttattattattatcattattagaaaaataaatattttagattacctgatcagtgagccatgttcttccaaagtctttcaactgaaaagtcattaaaagaaattatatgtccttgggccagctaaaataggacatgatcgttgaaggacaggcaaatggcaacactgcaactgagtagaggacttccagtgaggtggaagagagaggagagttgccagtggccttctagaggatatgtttgttgttcttgtccctttgctccagggggaaggatggggatcaatcaacatgacagggaaggtatgtctttaagagtaggtctcaaaacaacaaggctgcaataaacctgcctcttagaaaatcaaagagatttagagaatctacatcagctttctaggctcatgagtccagtgggtaccttggcttcactctgtatggcagcaatattagaaaaaaatagttcaaatggagttataatgaagacattaagtcagggatatagattaccttgcctacatcagattatgagttgatatacatatgtattttgtaactaaatatatagcatgtaaatatttaaataagaatacactaataaatataccttatatttattgaatctttcctgtgtgccagatattataagtgcttttatgaattgttttatttattgttccaccataccctgataatgcagaatactttcattattccaattttgacaatgggaaaattaaaatgaagacaggttaagtagcttactaaagttcacttagttaggaaagggtggagttgggttctagcccagagtgtctgcaactggccccataatcttaaccaaacttaaaaactgacctttagcagatccatgatcaccatatagatttgactgaatgacagtaaaattttcttaaaatatgccttcaatgttcctgttgaaagaatttgccttttgaaaataaaacaatttctttccagatacacttaatggcataaaattattaagtaacatcgacactagctctacctctttctctgaaaattagagctaagtgacattttcagacttttctaggtagacaatgtacttgctattccaggaattctcattcaatagtgcattttctctttctttgtctctctttccttttcttcctctcttgttttttccttccttttttcttttgttctcataaattcatggaagtctgtcaaagttgtgatagcatgctacgacacattatatttttgctagtcatgaactccgttacaacatattatctggtttgcaggtcatattatttgaaggaacatgctttgctgaaatcttaaaaggataccaaattgaagctctgatttgcaagcattttgcaatcgtcactcaagccatatttgtcttttgaaatcagaatttatggaggacttgtagccttaaaatctaacaggagaagaagttgacagaatcgttgatgatatttaactcaaatttcatagcaagtattttgtgtattgccagatcagaacctctcaggttatcataaatagggcttgactattttattaatagcttggttggtgtagtagtccattctcacattgctatgaagaaatacctgagataaagtaaggaaaagaaaagaaaagatgtttaagtggctcatggttctgtaggctgtacaggcagcatggcagcatctgcttctgaggaggcctcagggagctttgactcatggcagaaggcaaagcaggagcaggcacttcacatggggaaagcaggagcaaagagaggggaagagaggtgccacacattttaaaatgaccagatctcatgagaactcactcactgttgtgaggaaagtaccaagaggatggcactaaaccattcatgagaactccgcccccatgatttatttaatcacctcccaccaggcctgacctccaacactgggggttacatttcaacatgagatttgagcagggacacagatccaaatatcagttggctggctagcaacctatggcttcgtggctttttaggatacctgttttataaacacacacccctgctttcacctctaccactactaccatttcgttttgcatacaaaagaataaagcctagtttatcacagcgatttcacaattagcaccacagatgagactcatctttttttttttaactcctttgtttgaaagatgagccaactaaagctaaaaaagtgacttgtgaaaggtgatacaaatccttagaggttcagccaagttccaaattctaatctttcaaaatccatcccagctatttccaccatcttatccaaacaaatccaactaatcaagttgctggtataatgctagtgtttattaatcatgagggctctccttctgtgtattgttctcagggaccttatgaataaaaatgctggttctcaaggggagtgagatatgttgagctaggtgtgctgggctgtgttcagcaccctgtcagcagtcctaatagagatactatcatgaccccctccctgctttataaattaagaaaccaagacttaataggctaactaactatctcagaccacacaatagtaagtcatggagtttccttgtaatcccatcttattgatgccagactctatacagtgctgcctcccttgtctcatgctagaacacatataaatggtgcctgcacatttacaaaaattcatccattggctcatccaatgttcttttcatttctccttttttttttttttttttttttttccggtcagggtaagggtctaggataaagggtggatgcagtgatttgtagtttctctgttttttgctggctggccacattctatagcaagctgatctcaacgagccctacttgggagagctgcttggagtgtgtaccaagctggggcagccatagcctttgattaagaggataaaaaggcatctctggttcctgtggttttttttttttctttgcttttgttcttgtccacaggagtggtggggatggatactgaagaggctcagtaggctgaatgtgaagaaagttgaagaaagcccctctgttatctaaggaataaaaatcacatgtcagaagtttacaaatggaaatttgagcagaacggtagagaattccaaggctccttatactctttctaatcagcagttacaaagcatagtccagcaaacttaaatgccagcatatcaaaactccctgtcttatcataccctttgagaattcctaatctgaaaatctgaaattcaaaatgctccaaaatcccaaactttttgagtgctgacataatgatgaaaggaaatgctaattagagcatttggattttcagattagggatgctcaatgagtaaatataatgcaaatatttaaaaaaaaaaaaatcggccgggtgcggtggctcacgcctgtaatcccagcactttgggaggccgaggcgggtggatcatgaggtcaggagatcgagaccatcctggctaacaaggtgaaaccccgtctctactaaaaatacaaaaaattagccgggcgcggtggcgggcgcctgtagtcccagctactggggaggctgaggcaggagaatggcgtgaacccgggaagcggagcttgcagtgagccgagattgcgccactgcagtccgcagtccggcctgggcgacagagggagactccgtctcaaaaaaaaaaaaaaaaaaaaaaaaaaaaaatcaaaaatctgaaactcttctggtcctgagcttttcagataagggatactcaatttgtagtgtacgtaagacatacagcagggacaagaaaaatgaaagcaagcaagtttacaatttgtttccccttaacaattaagaaaaaaattaaactctatcaacataattattcacctttattaagcagtcaacattttcaggcagaactagtttgtaatttgacatattcacccgttcattcaagaagtatatagtaactatataacacaataagtaagagatgttttcagccaacttaaaattcaaatacaaggaagagacatgttaaaagctgatttataatgaagaggcataagtgctggaatagagatatccataaaatgatttgggaatgtaaagggggaaataattatttgtaaaaatgttggccaaggttttgcagaggaattgacagttgagttgggttttgtggaatgagcagtcatcttccagaagatgaatgggataactctaaagcagatgaaacccattgtgtgaaagcttgacgttgcaaaaagacgtgatccatggaaggaaaggtagatagttcaaagtagtggggtgatgtcaaggagtggtatgacaaaggaggctaagtgctggccttggaaatgtagttgagattataaaaggttcataccaaaatgtgaccaatttcaaattccaatctcaatatgtgttttattataaatcagtgagattaattttctgtggttcatcattaaaaaaatactttgcaatagtgttaaacaaggttaggtaaaatcaaaagttgttccaaaattatcttggatctgggtagacatttgtaatacaatcttgaaagcataaaatgaaattttgtgatttctcactggattacaaaatcagttggacaatctcataattaaaatgtctatattgttacaaaaggtcaacatgctgtacttattactgtatctggattatatgcccactgtggttattcagcgggctatagcagaacgttacaaagtttcttattattgttgtttgcttctgcttttcctaccctctacccacaggactaaagggtttttgtttgtttgcttcctatatttatttatttccccaccccatggaactaagatggctttatcaaccctaacaatgaaaagtctcagtgatttaaacaacacattcattctcacttacattcgtgtccattacgggttaactaggaacttcactccccactgtccttgctccgacatacagcctgatggaaacttcaccatctgggccactacaagttgcagaagcaattaaaatagaacgtggggagaatcatgatctttcttattaaaggctagctgtaagggtaataaatgttacccttgctggtatttcattggctaaaatatatcacgtggttttcccttcttttaaaagagactaaggcagtacagtcctacagtgtgtcttgagggaaggtaaccccaattatatggggaccacactaccttgcttgctatgtattagttagcatggtcttttgtcaaagaagcaggaactgggtggcttaaataacagaaatttatttgttcacagttctggaggctagaagtctcagataagggtgcagacatgctcaggttctggtgaggactcttcctggcttgcagatggccccgcttttgttgcattcacacgtgacagaaagagagagttctggtatcttgtcctcttgttttaagtcatcagtttcattggctccaacctcatcacaccatttaaccttaatcattccctatttccaatagtcatttgggaagatgaggcttcagtatgccaagtttagggggacacaattccatccatagcattccacccttggtctccctagatttgtgttcttcttgcataaaaaatacattcattgtatctcaacagttccaaaagtcttaactcattccaacaacagccctaaagtctaaagtccaaactctcatctaaatagtatctaaatcagatatgaatgagactcaatgcatcttagaaaaattctctcctgctgtaacactgtgaaaccagacaagttatatgctttcaaaatacagtgatagacagtcgtagactaaaacttcccattccaaaaggaagaaatgataaagaaggaagggctgacagatctctgtcctctttagctgaaactggcagtgttgttaatgtcatctctattcctggtttcctgatgagatggctgattaagtccatgagtcactcccatgctgtctttatcaaataaatggttgtttaaccatactcatagtgttgtcttcagaacaagctttctcattcatttattcttttttttttcaatatgcatgatatgaggattttccagatcttcaaattctggcttctttttatttaaaacttcctttttcaattcatttttttttttattttttgcattttactataagtagtcaggagaaacaaaaccattctgctatggtatgtgtctcccaaaattaatgtgttgaaaacctaatctccagtgcaaaagtgtggggacttttgagaggtgcttaccctcatgaatgaattaacgccgttataaaagggcttgatggagatagttttgtttcttttttatccctctcacttcccatgatgtgagggcacaagcaacacttccctctggaataaccatcttgggagcagaagcagctctcgttacacgctgaatgccagcaccttggtcttggactcgacaacatatagaactatgagaaatacatttctgtgctttataaattacccaggctcaggtattttgttatagcagcacaaaacacactaagacacatttcttcagccctttgcctaaaaattttctcagccaaatactcaattgcatcacttgtaagttctaccttccacaaaacactggaacacagatcagccaaatccttcgtcactttataacaaggacacctttcctccaatttctaatatttccatctgagacctcatcagaattgcccctaacatctgtatttctataatgcacctcaaagtgcttctagcctctatccactaccagttccaaagtcacttctgtgtgtttagttatttgctacagccacactctacttcttggtaataaaatctgtgtcacttccagggtgcaataacaaaatatcacagattcgatggcttaaacaagagaaatttattttttaacagttctggaagtccaagatcagggtcccagcatggttgagttctggtaagatctctctccatgacttgcaaatgtctactttcttgctatgccctcagatgacagagagaggtttggtatcccttcctcttcttgtaagggcacccttctattggatcagtgcttccctctcatgatctcatttaaccttagtcacctccttaaaggcccgctctccaatatactagcactggactttagggcttcagcttatacattttggtgggacaccattcagtccatgatatattttttatgaagattgactgaatgtaaacttggaaatgacactattgaaattatttggtgcacgtaaaagatggattggtgctataatagcataaatcatattaatcatacagacaaaatattaaactgtgctctagaaattgttagttaacaaagtcaagacttattccccagaatattcctgtttggggtttattatttttttttgtaacttatttcaccaggattctaaaaacgacaagtcagaatggagaagaagtgggagcttgctcggctgtcatgctttctctctcctcccgtccctcttggtttgcagaccctcttggtttgcagaatggaggcagttctgctgacaccctacagattcgcattcgatgagaggccaaccctgaagatggtttcagtgttcttcccaggtctctgctgttcctgtttgggtctaactttagactaagtgacaggcgtgccaccgtttctcaaaaacaggtcatggcaggcccctgtgagttgttctagtttaattgtgtgattaaaattagagaaggggattttattttattttatttttagctcagaacctaactgagtcattggtttgtcctaaagataaattctctttcttttctttctgctgctgatggatttttcagtattttttttccaaactaccgggatatctgtgtgaaagacaggcaaagtttatccatagatttgtttacttattttatgtttaaactgaattatctagtactttggcaaaggacaaattttacagcttctttttttcttttcatgtattgttttctgtttatgctttcatttttctctgagtatttcagttagctggtgctactatgttgttaaataattcatacagaggtagggcatgaccatttatgaagtacttcacatttgtgatgattgaaaaaaaatctgtcttaaatgtctgtatattattgttgaagatgaggctgtagatctctttttcttttggttcattcattttatatatattttatatagaatatatatttaacaaatcgtaatcatacataattatggagagatctctcattctgaactaaagaatggctcccatgcctgaggcaaagtaacagttgggacattatttggccaatttagctgggattaaggagagaaaaaataagcaaaatttacatttcaccaaacaatttccccaattcatctccccaaatactcataatttttctcttttacattttgatcaaatttttacaataaactttttattttagagcacatttaaatttcagaaagttttagatgtacagaattattgcagagagagtacagagagttcctgtgtgcctgacacacccaattgtccaggttgctaacatcttgcaatagtatggtgtcacgattaataaatcaatagtaatacattattattaactaaagctcatactttatacagatttcctcaatttttctctaatatccttttctgttccaggaccccatcctggataccacattacttagccttcctctggttgtgatggtttctcagtctttatttttgaccaccatggcagttttgaggagtcttgattaggaactttatagaatgtcccacagttgagatctgtctgatatttttctcttgatcaaagtagagtaatgtgttttgggaggaaagctacaaaggtaaagtgccattctcattatgtcatatcaagggtacattctgtctacatgacttactgcttatgatattaaccctggtcatctgactgcggtcgggttttcaggtttctcaactgtaaagttattctttttttttttttttttttttttttttttttgagacggagtctcgctctgtcgcccaggccggactgcggactgcagtggcgcaatctcggctcactgcaagctccgcttcccgggttcacgccattctcctgcctcagcctccccagtagctgggactacaggcgcccgccactgcgcctggctaattttttgtatttttagtagagacggggtttcaccttgttagccaggatggtctcgatctcctgacctcatgatccaccctcctcggcctcccaaagtgctgggattacaggcgtgagccaccgcgcccggccaaagttattctttatcgtcctttccatgatgcatttttttttttttttgaagaaagtcattatatgcaactcacactttaagagtagggagttatgttccatctgattggaggcagagtatttacataaatgatttggaattcttctatatgggagcgttcttctcctccatttatttacctatttaattatttatttatgtcagtatggactcctggatatctatgttatattttgggttccaagttaatactattttatttactttgttgctcaagttgttccagctttggttcctgggagctcttgcacctggctcctgtgtccctttgctatacacccatcattgtggggttttttgctttttgttttaagcactttcttgctttctggaattacagggtatatcacctgtatttcttgtccctatccctagaatcagccatttctttaaagggcactggtttctttaccttgaaaaattatactggacaccaacatctgggtgctggatgtgctcctcttaggccaatttttgatgtgatatgtcccattttctgtttgattaggtgttagctttaatattggctggccattgagaacttgatatctctcccatacagtatggagaagaaatattttgttttattcccatttatgctccatatgaactttaggttttgcctccagatattttgctttatttactaacacctctaaaatcagactcatataactttatttaaaaagccatactttgttttagttcaagagaacagagctatcttctgcagtctgcccaggtgttaggaaaagatcagaaatcaaactgtaattgataactaaatacttgtactgcattttttaaaaaaatgaattaacacaagaagtttgttctttaatttaagatcattatacattaaattgctctaagataattatattttggttttattttcttaaaccctaagttatgatggtctatcttttggtagatccagttgagaaatgtcataccatagtgaaaggcagtgggcttgggatgggcaaattcactggggaaatattatttattatattacaaaaattaccaccatcataagatatattcattttagagtggaaaggaaacttaaaaactctctcctctaactaatttgtcttaattttgaataaaatgacttgcctaagttcattcatttatctagctgccaaacaggatcagaattcacttgtcatgagatgagcaattccatccagattagaagtttaactgttcaagaacttatatatcagttatatatattatattatttatatattgctatatgtattttatatatatataaagtagagaatacacacacacatattgcagagatatgaaactgactgcataaagcattttggagataatatatataacagagaatacacaaacacatgcacgtgcacgcacacacacacacacacacacacacacatatatatatatatatatatagatatattgcagagatatgaaactgactccataaatcattttggtgactgaaggcatggccatctgaattgcatttgctatttttaccttaaattcagtgactagaaccaagaaatgttgaaaagaaattcatctctgcttggaaccaaatgtactaaggagaaattaacttatttaaggaaaaaaaaatacacagctaactaggctgcttttgatgattcaccaagaatacatcctttaaatgataccaaaaaatgaaaataaatgttttctaaagaaagccattaatatgcttgcattgcctttaccctttctagcaatcagccaggaactttggatctaataactcaatttctcattcctatggcttctttctgattcttgggattggtgacagggaaagacaccatggaagctagggcacaccagagacttgaggagattcagatgtcataactgctctttaatttcttggaacagccttccttgcttcctggagtccccacagaaagcagtggggcagccacctggtgacccctttatctgaaggtgaaggtgggtaaagaatgcccattttgagcttccaaaatcagcctttgtcttcctggtgtttcagactctaagatgaggatgcagaaagagaaggaaaggaagtacagcctccttagaaggcagagagagaatctctgcttttctaagcatcttcctattgcgttgctgattagaattttatagggaacataaagtctgaaacccttactctccacatttgcctagtcagggctgtttctcttggctttgcactcaattattcaaaagcagacatcactaagaaactcaggaggtgagcccatggaagccagggaggctgacagtcagcttgtagtgtgcagtgtagcaagcaaggcttcacgtcacgattgcatgagaaagccatgcttacaggtcctctctccattcggctttagtggttgcacgtgtccatcagcttgtggctgagcgcaaggaagcatatagctttcaatggggacacaaatgttctcaaaagtgtgtttaactcaccttcaatcatacatcatttacgcacccagggcgttgaatctggggaacatgaacagacagagatgacagaaagaaaattggtatcaaaaagaaaagattttatttaagttatgttttgattgttgttttctttgttgaagatttgaaactgctttatgagtgggagaatgaacagaatacttgaagagagatatgaatacagaagtcgcttttggtaaaaataaggttttttactggcatttacaaatttttattagcagaattttaagtcattcacataggccccactactgcaaagaagctaatatttctgattcctttaaaaactatatttggacaaaccaaaagaacatgaatcagaatctcaatgtaggagggaatgttatttggcaacctgctgaccctagagaacttctttttgagaggacacttttttttcttatctctgaatataatctgattagctctcatcatttaattcaacagagtaacatacagccaaaaaaaaaaaaaaaaacaagtaatcagtgaaaggaaaacataacatgagttttaccaaatatctggtccctaaataaattcttccaaaataatgcagcagtaaatacgacctaaggaaacgtgtaacgacattttgccaggggtgggacagaacaacatggcctaatcatgaaaggtcacctacccaagtccgccaaatagcaagttacctaaagaagtcatttgagaacaaagtatttttatctatttgtttaaagaggatattggactacaggaaaggatctcaacctctttttttcctttcttgaaccaaatgctttgaaaaatgaccgtcaaacaagatgcatttattacattatggttagttaattttctcaacttatcaattacaggtaaatgtaactgtcaaccagaattttttatcagcatgagatagctcctattcatacacggagctgcttttattccagaagagaatgagggaagtaatgagctactttatttggtctgcccagttatttttattaataaacatatgatttatccatgaaatctgttttaaatgtacaaatgttttctcttagactttttaagatattaaaatttgctctcatgccacatattggtaaataggcaaaatagagttctccgaggtcatttcatcctctgataatcagtgataaattgctcttgtagcctctgccaagaactgtgacggttctgagatttcaccctacttgtaagctaacaagtctgccagtttcatggatgctggcagaagccataagcctcctgggtcagagacagagggcagttttgtacgcacagcaaggaatgtagccagaatattggcatttgtgccagttctccaagccccaactatttttttttttcttgagacagagtctcacactctgtcactcaggctggagtgcagtggcatgatcacggctttctgcagccttgacctcctgggctcaagcaatccttccacttcaagccccaagagtagctggaactacaggtgtacgcctccacacccagctatttttttatattttgtagagacagggtcttgccatgttgcccaggctggtcttaaactcccgagctgaagtaatccggacaccttggcctcccaaagtgctgtgattatttgcatgagccatcaccaagctccagcttttacagagaaacacgagaaaagccagatcatacctgtgtgcatagtgaggtgaattacaagagaaaaaaaaaaaaacctgtgtataaaaagaccgaatcttttttaatggatagtacgcatgcctgctcctttgctccagaacagataatatcttgatcatccaagtctgtaataaaacctgtgctttgctatggtagaaggcactatctttgtcttctatggctgtttgctatgcaatttgctctgaaaagatagtccagaccaaaagcagtcagtgcctctgcttgcaaaatgtgcagcaacaaaggagaagcctagagaattgtctcccaacagcttccttatcgataagtgtagtctacattggcaaatattttcattggcatagaaaacacatcagatttattaccaaggaaatgaagttaaaataatgtatttgtcatctgccatgtcccagctactttactaggtactagggttgcagtggtgagagcattctggaaaatctaatggggtacaaagaaatggtaaaataatttctcacatccacttctaaacctccttcttccttccatccttccttccttcctactttatttttttatcctttctttctcccttcctcccttcttcccttctttccttttttcttcctcctcctgtcctatcaatctatttatatttatttatgaaaaaccttctatttatatacccagtactgttgtaggtgctgacaacatagaaataaattagacaaggtaccttctcccttcatggagattgaatcatggtaattagctttcatgcaggtgatgtcacaagactacggcagatggaaacacagagcattacccaaaagaatctacaggggcaaccaccaaacagtccctcatgtccaccgtgccctttgagaagagagaagagaagtgatcgcatccaaaattctgccagcaggcaagggaatgttcccatatgccttttaaactggactagacggcgtgttgttcgggaacatctctattatagtagtcctgctcggagtttgggaaagaattgttcaaatcatacgggaggcagttctttgaaagccccagctaatgttaagagaaaacagatttacaatccgaggccaaacttaataatacataacgaattgcagctctgtttgggaatccccctaggtaccgttcctaaggatttcgagtgtttaattgaaatttcttctgggacagtagtaatcattcacttaagcattatatttatatttgtgcatgaagaaaggaagtcaaagggctaatagaccgactgagtagaatggctgctttcagctgtgggccattgacgagccggcaattctccaaggggcgcttatcctggcgacagcttgcttaggttgtcctccagggactgtgggaggaggacagcactgtgactgacagctgtttcttcctagactgagatagaatacatgatcccagtgtagcccgtttaatcaaactgtttcagtctacaggattaaaaaacctcaagatggaaaagtattccggtagagatttattcttagaaaggctattctttttaccctgatggttaacatagagtgttttaaccccaggggacttgtgccttcatgatttccaaagcaacattaatgagtaactattattctaggagtatttcagccactaaaattggcaatggagtcaaaatgaaagtcatgccgttacaataatactgccttcttggcatcgtcagatttcctatcttctttcagttcgtgatctcagagaattgcattaacttcaactagtttattgcatattctgtaagtcttaagagttgaccccgttgttgtttgctggtttttacaggtacaattttcacctacatacacagaaatacttaaattcaactggtttagtttcttcacagctatattgaggtatagtttacaaattataaaattcccccacttcaagtgtacaattgaattaactttagtaaatttctaagctgttatattctgagttgcgttgccacaatccaattttggaccactgccatcactccaaaaggattgctcatgctcacttgctcccaccttcagctccgggcatcaactggttcaacttcaacctcaccttgtcatggttggtgcacgtcatctaatagatctaggtgtagtttcctcagatgtgagctatagtctgtatgtctgaatacagtagctattattatccttattttataaatgcaaaaactgggatttatagagaccaggaaatatacccaaggtcccagagctaagaagctacagaatttgaacttagtttattctgactccaaagcctctttgcagtgtgccacaccatccctcctagtctgagagtgagctaattgtggatcctactagaaactagagattactcaaaaattattcttgttattattgtgtgcatgtatatatagatacatagtaattctcttttcttatttctcaattatcttattgtaattactatatatacacacacatatactgtatatatacatgatctgtatatgtatatgtacacacacagaatatgcagtatatgtgtgtgtatatgtaaatatatgtatatagcctgttacttttttaattttggtgattgtgttagtgtttgatgcctaacagtgttctgatactagcttaggtaagagttattttctttcacattaaaaaagttatgctatcatctcttttcttatatacatgaagacatctcatcaaaaattgctgtattgaaagacaatattgcctatattgaaaaattataattttacatattggtcagcaagttatttatgtccagctgaatatttaggaatacttgaatttttcagagtttttaaatttatagtacaaataatcagaaatctaacatgtggcatatcagaatggtgtcaaattatatcaatatggactcatacagattttaatagtcagttgtcaacacgtgatgctccagcaaaaggtggaatagggcagtgagaacttttttggagcttccaaaatctgagtttgagtccctgttcttatactggccactttcatgtccttcccttgggtcacttaatttccctggtcctccttgtttgatacaaaaatgagtctgactaaatggcagttattggcatcagccaactcacaataggaagtcaataatttattttttggatcacttagttgtatacctttcctataaaacacaacttcaaacaattcaatactttctgcatcatttgggataaattgaagtgatggaattatgaaaacccatatacatatatatgtgtgtgtgtgtgtgtgtgtgtgtgtgtgtgtatgtatgtcccatatatatggggtatatgtatatatcctatctatatatatacaagatatatatatcctatccatatatatatggaatatatagacaacctatccatatatatgggatatatatagatatatatatgggatatatatatatggatatatatatatgggatacatatgtggatatatatatatgggatacgtatatggatatatatatgggatacatatatggatatatatatatgggatacatatatggatatatatatatgggatatatacatatggatatatatatatgggatatatacatatggatatatatatatgggatatatacatatggatatatatatgggatatatacatatggatatatatatgggatatatacatatggatatatatatgggatgtatacatatggatatatatatatgggatgtatacatatggatatatatatgggatatatacatatggatatatatatgggatatatacatatggatatatatatggggtatatacatatggatatatatatggattatatacatatggatatatatatatgggatatatacatatggatatatatatatgggatatatacatatggatatatatatgggatatatacatatggatatatatatatgggatatatacatatggatatatatatgggatatatacatatggattatatatatatgggatatatacatatgggatatatatggatatatatatatgggatatatatacataagatcaaccacaattaatttcttattcccatgaaatttgaaatcaataatgctgatgactaggtgcatctcctccaggtagtgactgacaacaaagcgtctttcttctggtgacaccaccatcttgaagccacacttgcatcatcagggaaagagaacatggagaaatttcataaggtttttaagttctcttgtttttaaatgacacacattacttctgcttcacaagaactagacacatggcctgacctagatgctatgggttcactgagcaatagctcctgacagggcatagccactttgcagtgacagttctatggaaagggaagcactaattccggtggacagttagttctctctgttgctcaggctaagtctcaaagcagaacatatagaggtgatgaaaaccggaagctgaatggagccttggacatcggagctatttgatattgggggacaaggaatggtgaataacttggtttatttgcctaataatgaagggatggtcctaattagctgttttcaaaagtttgctggccccaagtcattatttaaggggcagctgtaatcaggtcctcacctgctggaggctatcgcagagtccccagggatctgggaacaaaaacaaaaaaacaaaaaaaaaaataaaaccacaatttcaaaccactggatgaaattgctttaggagtccctctctcaacattctctgatttgaggtctttaatatctctctctcctgttttattttttaataaaagtgtatttaagtgatgagtgaagaaaatctagagcaaagactgaagactggcaacttaaaagcctatttaatttggactgtcctttttcaaattttattttttgctatcatttatcaataggtaaatatcacataaaatctagattttaggcttttctagaaacactgcaagatctagcaacataagctccaccttcttaaatgacagaagtctactggagctgaatagcagctgcttttcccaaagggacctgcactctttcctatttttccacaggcccccactgttccttattgccttctacaatggctgagttagcttctttatgttaactgccttgattttgtaagtcatttgaatttgcaaaatgtgatctaatgaaaaattgcgtgaccttgttgaaatttttatctttttcaggtaagcagataattattaaaaacttatgaggaagaataaattgagtctttgattattcttcaatctattttgcatagaaagttttgccacgtgatcctcccctttttggaagacatttatttgtaaaataaatttacaataattgttctcccccattatctgtgttattccctttagcctttgggcttacaggattttaggcttctgctccgaattaatttacgtagtgattttctgttatcagacaaaggatctacatagcaacaatacatatgagaaaagagatgatagcacaatttttataaaaaatttggcaatcttcttcttagagttgtagctaataacgtctttgtgaggttgtgtagtgaaactctgacatatgtcatggttgtcaaagtcggcattaacgcaaaataataagttatttaatataggattcaactttattattttttcaagtaagctgtctatcaccaagttctgaagtggatttctttaaagtctccctgtctccagagaaaaaggggaaaaggcaatgtgtccctggacaggatctatgactcattacgtcaatcaaaccccacttcagaagggaataaagagatttgtatctcaaagcggcgcataacgactcctcggcttttcatttcatatttatgagcggtttactttgaagtgtttatcagccaatgcgcagaaacatgagggaggcttgcccgaaaccatactcatgcctctaatctgtgaaatgctttctgagcagactggctcatcagcgcatgccatgcaaaaataaatacataaataaactttttgttatttgaggtcttggagccatgtctttatataaactataaaaaagggataaatggtgctgaacgttttgaaattggtgtaacacaggaaacttgactctgtaatgtgcaggggggtggtgggggtgcagaaagtttattgcttgaaataaaacctggtagaaagcagacaagtaaaaatacacaaatttttacatacatttctcatctgatctaaggctttgggtccgtccaagtgaccacatgatggcagtgaatagtatatggtgttttttgttgttgttgttgtttttttttttttttttttttttttgagacggagtctcgctctgtcgcccaggctggagtgcagtggcgggatctcggctcactgcaagctccgcctcccgggttcacgccattctcctgcctcagcctcccatgtagctgggacaacaggcgcccgccactacgcccggctaattttttgtatttttagtagagacggggtttcaccgttttagccgggatggtctcgatctcctgacctcgtgatccgcccgcctcggcctcccaaagtgctgggattacaggcgtgagccaccgcgcccggccgtatatggtgttttatttaaaagaaaatttttttggagatgttattttcggagtggttggagagagagcactgccaagatgttgaaaccaaatgaatgaaatctgttttataatttttatctgtactagtatcccatgcatattgtaaaataaataaatgtgtagaagaaaaatggaagatgaagaagaaagaaacatagaataaagtatacattcttgatgaatggaactacgaccttttctctgctttcagtctaactgggttatacattaagcaaactacctgtgtgtttattgagcaactactacactagatcctgggtttacatgggtaaagaccagccggaactgccaaggcagatctggcgtgatgggagaggatgccaagtcaacaagtcagtgtccttatggtgtcacagttcctgagaccaagggccactcaattctctacttctttaaattagatctcttgcttttgtgctcatggctcactgattttatccaaaaagaatgtttaaaggcataagcctaattcactttaataatccacaaattaggtcagtgatttgaacagttgttgggagaaaataaaatttaggagtccataaaccattgtcttataaaaaacagtttcatttctgtttgccctttttctatatattctctacaagctttcccttcaccccctcccctaaaccctcccccatcttccagtattctaatgggaaaggggctttatgtctagtccctggctagagatagttaatcatagaagtttaaagctgaaagtctttatattctagaaagcatggcttgtgagagagtatatagcctttgaagtcaaaaaagagacatgtttgaattgaagtttccccacctactcgttatgtggccttaggaatattatttctttcttttgagctgtatgccttcttcatagttttgttctgatatttttcatgtaaagtgtttataagtctgacacataacacacgatcaataaatattaagccagaaatgtttgttgaatgaagaaatgaatgaatgatgccatccttttcatcccatccttttactttcaaaagaatcggaagcctcaggggattaaggacacatatttgccattgagtacaggctctctaaatgacaaagaaatagttacctctcccctacgctacccctgccaatgtaggtggggtgaaaataaaccatcaggaataagatacgatattgtaattgcatatttctgtttatcttacttattagcttatgagatccccaaaagcaaggacacagattttctgtctgtttccgtagttggttcttagcacacctttctgtctatttgtggagccaaattgaacgaagcagtctgaaacacgtacagtggtgcccgtgggtctgtgtgtgcagtataatggcaactattcttggggagacttaagtacaaagaagcatacgacctgccagatatgcaggaaagtcaaccaaagcctttgtggggtgtgtttctgataatgctgatggatagactttctgaaaggaccattctgattttcttatccgaatggagattgaacacaccgcgcacaagagaaagtgatttggagccaattctgagagagaggaagttgaagcaagaaataagtgtttgaaataataatctgctgctgatccctaaataatctgaaatgagagcacaggaattaatgaggctcctaaccccttgtgacacaggaatagcagacttgtgccagtgacacagcaatttccctggtggtctgctcatgagccgcgagggagcaaacaaaaccattgtctcctttgaaagcaaagctattttaataagggaaatgtggcttctcagatgaaagctcacaaagtgccagatagtgcaaatgtttttcataaagcacctggaaaacctcaccaaagagaaacatctcaatagagaacaattgtcagattggatttaattgcccgtcattctagagatggagcagttttgctgagaaaagttggcattttaaaaaagaagcaatctaaaagaaatgacccttaattttttttttttttttttaaagctaggaagatggctgggtgccgtggctcacacctgtaatcctagcactttgggaggccgaggcgggcagatcacctgaggtcaggagttcaagaccaccctggccaacacggtgaaaccccgtccctactaaaatacaaaaattagctgggcatgatggcgggtgcctgtaatcccagctactcgggaggctgagacaggagaatcgtttgaacccgggagacggtgtttgcagtgagctgagatggagatggggccactgcactccagcctgggtggctgagcgagactccatctcaaaaaaaaaaaaaaaaaaaaaaaaaaaaaaaaaattaaaattaaaaaaaaggcaggaagatgcaagagggttgcatctctattctcagctctgtcagagatatgctttgtgacttctggaaagcccagaaacctccctgttttttgattctcagagaaggtaattcttgtcacttcccatggaggatgttgcatcctaaggcagtgggctttgaaaaactctttgataaacctcctctcggaatgctaaatagtagaagatagcagagtcactggattctgggagatattttgaaaaaaatgaggaaaggcaaggaaagttgcttgcaatgactaaacagttattgagccctgggtatgccttgccagaacccctgagaggaggccaggcactgttgcttcacctctgataatggccaaatggccagagtatttgatgtttatgcaggggagtacactgtttgtgcattccaggatgatatcaataatagaacacagtacccatttctcataagaatcctttgaggaggttggtgttttgattcagagtgattttggccttccatacacatgagaattttatggaggaagcatggctgcattatacctttcatgggccttaggcatgtttgtcttcatcaacccctttctccataaaaagacatttaaaattatatttctccactgccttaatatgaaagcaaatgtattgcttttgtatattaaaacattctctctgacctaaaagtttatttcttttgattttcatagaacttaaagcttttccgtgggtgcctgaaagtattgtgggccttataatactgagcctattgtgtccaatggataagttggctctgggaggaaagctttgttcaagtcgacattttttttaaatctaaatgtatgaattccaatattttgaggaaaaaggccttgtcttaaagatgaatatccttatctgaaaatagtagaaatttgtaacgtaatactaattgattactgtggattcagaatttgtagttataacttatacttcaggaataacatggtccacatggagcacagagccctcgttgctttgactttttcccccttatgcaagagccatcctttctttttttttttttttcttgttgcccaggctggagttcagtggcgcaatctcagctcactgcaacctccgcctcccaggttcaagcgattctcctgcctcagcctcccgagtagctgggattacaggcatgtgccaccacacctggctaatttttgtatttttagtagagacgggatctggaactcctgacctcaggtgatcctcccgcctcagcctcccaaagtgctgggattacagatgtgagccactttgcccggccgagccatccttcttaaggacagtgtttccacattgcatttcagattgtcttattttttaaaaactcaatatagtcaccacaatttaattattttatgtgaatcaaggcaaggctagtgaatgatgacttgagtgctatgtgtgtacgataataaatttgttctcatatgtttttgaagtttattaaatttcaagtagtcctttgattctgttcttcagttgtactaaaacgcctggtctatgcattctctcactcttccagatgttgcttctaagcctccagcacctcctcctcatcttcaatcagaaacgaatttcgaaaccacatctaccatccacacactcccagcttctgtgcccacatactccaccttattgcctatcactctaagtgaaaaacttctactgttatcccaggtaaagcgttcacctgtgtgcaacatcacggtcccactggtctattagaggttgctccaggaattctacctgcctgtctcctaaatgaaccattctttgattccttctcgcacaaaaacctgctgttcttttccctgacttacattcacccacttcttctaccagttactgccacattcctttactacaatttgcagccaatctcagaagagctgtctatcacattgcttctgattactctcccccattttctcataaacacaatccaatcagactttcacatatacccctccacataattgctcttgccaaggtcaccaatgattactatgttgctacatcataattgtccattctcagttctcttaatgacccatcagcaacatttgcaacagttaatcactccctcctctttgacatactttcttcatttagattccattctaccatacactcgtggctttcctcccactgcacaggtcactcctttcttctttttttttttctgtttatagttatttgacccttgtggtcttatggtccctctttccatactcctttactgctttctcttcttcactccaagctcttaataggaaagtgacccggggctcaattcttgatattcttttctatctacatttattccaaactggggattttctccagttccacaatgttaaatagtatgtacatggcaatgactcccaaatctgtatctcgtatatcagacctgtctcatatattcagctaactgatcagcattttcacttatatgtcaaacacccaaagtaaactcaacatctcgaagactgaaattctgatctgcacacacacacacacacacacacacacacacacacacacacacacacaccctgctgtttttacagcctaccccatctcaatagatagtaactctctcttagttttcaatccaaaaatgatgtcacttctaacccctctgtttctaccacaccctgcgtgtaatccatcagcaaatttcaagactgcccaccccgacactctttccatccggacgggctgtaatcgtctttcccatgcaatcttaaagtgtattttaagtggtctccttgattcggttctgccacattcctttactactctttgcagcaaatctcagaagagcaatccttttaaaatgtaaattagatgatgtcatctttccctcccaaaacaatgcaatggctatttcactgaaaccaaggtccttaaaatcacctccaaagccacacaggacccaactgtctccttaactctctgatgtcttctcttaaggttgtaactttgctgccttcattccagccacaaagtcccccttgctcttcctagaatgtgccaggcatgctccttcctgagatctttgcaccattggcttcctcatgcagcaggtattggaaagattaaatttcccaatttacttaagtagtttttttaaagtcactttctcactgagctttcctggatcagattattcaaagtattcatgaatggccttgcactcttctactttctattttttttttcttttcatagtacctaccaccttttaagatattacatacttaagtttaattagattccatttgttaatttttgcttttgttgcgattgctaggggcatcgctgtcacgaaacctttgccagttcttacgtccagaatgatattgcctaggttgccttccagggattttatagttttgggttttacattcaagtctttagtccatattgagttgatttttgtatgtggtgtaaggaagaggtctagtttcaatcttctgatatgactagccagttatcccagcaccatttacaccatggaatactatgcagccataaaaaggaatgagatcatatgagccctttgcaggatcatggatagagctagagaccatcatccttagcaaactaagacaggaacaaaaagccaaataccgcattttctcacatataaatgggagccaaacagtgagaacacatgaacacaaaaaagggaacgacagacactggggtctacctcagggtggagagtgggaggagcgaggagcagacaaaagaactactgggcactaggcttagtatctgggtgatgaagaaatctgtacaacaaaccccggtgatacaagtttactcaaacaagaaacctgcacatgtactgctcaacctaaaataaaagtttttaaaaaattaaacccattatatccaagtacttactgtagataaggcactgtatcgccctaaaaaaggtgtcagatacttagacattatgttaactgtttaatgtctgtttatctcagccaaaatagaagctctgtaagggcttgatctactttgtttgctgatacatttcaagcccttagaaccaggcttagcatttagtaagcaccaataatattggtcaaatgagttaatggatgtactagtgaataaggctctttgcctttgttcttccggcccagggtcgcattcttttaggttctatgtctcttctcatgtattcccagctcccatatggtaggctgtctttctgctcatggtatcctccatttatggtgtgagataatgacataacaatgtatgttaagaatgaatattcattacaggaaaaagaacctgaaaatttctcctactggttctgctgctgtttctactacaattattactctgcacaattttctaaaatattttattcaggaccccctattctggttacactgctaagtgttttctagtcacagataacttttatctctataggcttatgaggataggtattattaagcatgtttcatgaatgagaagactggagattgggagtggaagtttaattagagtgcgtactatcaaaccataagtagtggaataggaattcaaactctgggctactcgcttctacaatattcttaaccacagatgtacacagtctctcacctagggaacaaagtgcgtgggtttcctgacagtatatcagtcatattgtgatttggttatgtgtacttttgctccataactttagcccaaattgaatggaacttgaaaagacatacgaatgggggtatttctatgtagtgtaattgaacatatgagcagggacatgctgagtgatgtgacataatagaaaacattatgatatcacaaataatttaaagtatggaactaggatagacttatccaaggtttttattttcaaaatttttaaattgatttttttaaggaaagtcatagaaaagtacagagaagaaagcgagcaatgagtatcacttgtaattaacgagtgttaatattttgtcaaatttacctcaaatcctctttttttcctaattgcattcttctccctccatctccagaaataattgcgattaagaatttgatttatatttttctagtccaaacttatctctttgctatgtatgtgtctataaacaacatatagcactcattgtatctttcttattgtgtttttgtaactggacatttgtaatttgacatctatccctcttaagaccaaggctattatttctaataattctctactcctaaaattgccactgtgtggcaaatgatggccagagttaaaggccttaagttctttttgtcactttttcaggagacttttttcatctaaacatcttttgtaataagcagtatatgaacagtattatttagcacatttaactctgtcaacagttttcagtggatagtgtgaagaccttttttaaaaagtcataactcgatgcctctggatatgctgaaatcctcatgaagctgttgtctctattatatgtgaatacatccattaagtgttgatagtaatggttgtaaggtcctttggtttatagctctaaccacatagggaatgatatattttagtggagaattagtctctggcattgctgaaactgattacttatagcaccactcaccccatgtatataacaagtgctgatggtgtagtatttcagctgtgatgacataagaattttttttaaccttattgagccagcttctgccttctattcttgaactcctttttgactttggctgtatgtgactcaacaactctctgtaagtcaacagctgccagatgctaagtgtaattaaggctttacatgtatttgtaacctacgacatgtgtttggaacacaggaagcaaggtaggaaaggaagaaaaggaaaactcttgactcagtttcaattatcctctccctgcttaatggatgctaacacgcactaggaagctatggtcttgccattttttataagctcaatggctggaggcttagtatggttttagacaagtatctacatcctaactgtaattggtgatgaggcagttgatttaaaagaattcttttacaaacaagagtatatcattaacatttcccctcaaatatttgtggtctaatatacggtgtgattacttactgaggcaaagtatctgctatacatatattcacctgctgatagactgtgatccatccatctcactagatgtcagaatgtagatgagttaattaactcttgagatctagaataattcttctgtgataggaaagtcaaagtgttttcaaaacatcaagcacatgatggaaataggcaccttggtgagtgctgtaaatgcaagtgtcatgtgccttttggttaatttcagtaatgttagcagcgtctctactgatatatcatactttttgtatttttatggaaaagtaagatattgcattacttaatggaataaacattaaatatatctaaatatatgcagcttaactaaaaactgcattttatttacattgtggcagaataagctgaaaatagaaccccatttcattgcttatcattttgtagttttatatttactattaagagtacaataataataatagtaacatgaataataatagctaatatcgatcgacttattggtgtgtgtgtgtttgttacacacacctacacacgtatttattgcatgtgaccacaagatgcaagtactattattcttccattttacaggtgagaaaatggaaacagaagtattaaatagcttgatcagaacaacaacaacaaaacagtcctcacagcaagtaagagaactctccatccaggcagatttaaaacaaaatagaagaagaaataaaaataagcaaaagtcagaaatctgagcattgaattgttagcccacagtaggttttcattgtgagcaaagactgctaccagaactgcaattgggaaatgacctgaggcttagagcaacaaggacatgaaactgagatttctgtagtaagccaggaaacctaaaaagaggtatgtgttcaacactaccacatgcacattgcctgtgtagaatcaaatacaaattttttagccggcaagaatcccagtttaggcctgtgtgatttttgaaaattaaaataaaccaacatatctaaaattaaatataattaagtatgtaaggatgggcacggtggctcacgcctgtaattccagcactttgggaggtcgaggcaggcggatcacaaggtcaggaggtcaagaccatcctggttaacacggtgaaaccctgtctctactaaaaatacaaaaaattaactgggcatggtggtggacgcctgtagtcccagctactcgggaggctgaggcaggagaatggtgtgaacccaggaggtggagcttgcagtgagacgagattgggccattgtactccagcctgggcaaccaagcgagactccatctcaaaaaaaaaaaaaaaagaaaagaaaaagaaaaaagagaaaaaggaaacaaaccttcatagttaagtgtgagcaagtccataaataattgattttgacctttaaagttttaaaacattagaatttatcatttacatactattaactatgtataatagaaaaactaaacaacaattgaaaagcaatatcagttttataaatgaaatgcaaattgttgaaattaaaaaaagtttagtacataacagtgaatatgagttcaagcacaattaaagaaataataagagtaatcataagaaatcagcaacagactgcacagagagaaaagacataaaaatacaacagaagcatttagagagaaaaagggtagcgtaagatcagctgagtttaattggtgaaaagaatagagtatggaagtgaataaatatataaaagaggcaatgactgagactttttttatattaagaaatcatgaatttacagaaatagaggcacaaaatatatcaagtaagattagaatgctaaatagactggtacaacatacgtattgtagtccttagagcaccactaaaaaatctgtgaaaagatagacaaaaagcctagacaaaatttaaatgaaaattttaaataatttattaactgacaacaattaggcaaagaaatacagagggaggaaaatgcagggagcacaaacaggaaaacataaataataaacctaaatccagtcatatcaataattacattaaatataaattgactatcataccaattaaaagacagagattgtcagattacttaaataacaagacctaattatatgctggctacaaaaggcatatgtcaaatgtaaagacaacagaaaagttgaaagtaaataaatggaaatagatgagtcacacgtttattgcttacaataaaaataagaaagctggcttgactgctttatgtaaggcaaaatagactttaagatcacgagaattacaagagaaaaagatgagcatttcaaattgataaaagggtcaatttattctagggatataaaagtctatgtgcctaataacatagttttacagcgagaaagagaaggaataaaagacaaagcaaaattaacaaaaataaaggaggaaagagaaaaaaaaactacagatttaactcttttctcagtaactgaaaaaatatctagacagaaatataggatatagagaatttgaaaaacgttgttgaccaccttgacctaatagacatttataggacactacacacgagaattctcgtatcacattatttttcaaggaaaaactctgcaatatattctatatgttgtgctataaaataagtctcaataagtttcaagatggaaatcctggagagtttgttttctgtccaccaagcatgtaatttagaaatcggtatcaatcagacaagtcccagatatttggaagtaaaattacacacttctaagtaacctgtgggtcaaagaagtagatgagaaatttaaaaattttggaactgaatgatttgcatgcacaatacattcaaattttgggggtacagataaagaggaaaatattataggtttgcaaatttacttaagaaataaagaaaatatttcaaatcagtggtctacatttctaccgcaagaacctagagaaggatgagaaaaaaaaaactcaaattaagtagaaataaataagataagtgcagaaattagggaaatggaaaataaacaatacaataaattaaagccaacagctgtttgaaaaatcgataaaataaaactccagtaagaatgatcaatttaaaaaaagaaaggatccctcatatcaaaaatgaaagaaagaatactgttagagatttacacatattaaaaaaagtcataaatgtttgtgaaattgacaaattccctgtaaaacacaattaatattagaaagcatatattacctcagaagtctttattagggtcaccatatattgatgataaaatgttcaatccatcagaaagctataatgctaagcttacaacaggtacctataaaataaccttaaatagacacagagcaaacattgacaaaacagtattgagaaacacccatcacagtaagaaatttcaatatgtatcttacaattatagatgggacacaccaacagcaaattagtagtaatgcataaaatgtatagcatgaaatgcttataataataaagaagaatggctgaacattaaagacataaaggatcaaattttgaaggtatagaaaacaacaattgaatgaacttaaagaaagaaataatttgtatacataagggtagaaattgataaactaaaaacatacacagacagtaggtagagtcagaaaaacagaattttttttcttttgaaagaaaaaaaattttattggtgaaaccaattcagttaagaaaaagaaggcacaaataaatattatgaggaatgaaaataaagacagtattctacaaacctagcagaaatttttaaaaagcctaaacaatacatggataacctattgtatttatgtcaacctatttgaaagcataaatgaaatgggcacattcctagaaaatttattgttcctaaattttctaaatcaactcatgacaaaatagaaaatagtaataattctatgtaaagaaataaagcaagtttcttcctctgtagactgatgatcatcataatagctacatttgttttttggttattctgatgcaggcaacaatctaagcattttccgctgctttgtgtcattcagtaccctcctccaccctgtgaaagtaggtgctatttttatgtcccttttataaatgaagtcagcagaagtaattaattctaagactatctggtcgacaagtatttttaaaacagacattctaactcctgattttcttaaccttaggctatatggtgactgttttgtagggctgcttttttaattaaaaggggaaactatataaaagcatttaggacagtgcttgacacattttgaagccttcagtaactgtaaactaacctagtagccttgcagctaactcactactctctctttccctctctttctctgatgaaaaaaattgtttatggaggaagagtctcatatagtcaggtgaatgtacatgtttgtaatgctctcacataggataactgattggtatagtttttaatactgaaattgatttttaatttcgttggaattttcatcagcagaaaaccatctccaactagccaggctcctggacatttcatttttatttatgaactgccagtttttcagcagaacccttttgttgtggctgattttgggttttccaaattgggctttgttcagattggaatgggaaaatgccaccacatcagaggagaatgccaccttcacctttttctttgaaagttataagcttacaggaaaacctaggatactggaaactcttctgtcttcactagccatcttggtgtttccttgatttagtatgtgtttattaacattggaatggttctagttacaaattgtaaatgtttggacacatcagaagatatttatatagattaaaataatgagtctaaaagtttacaaatatcaaaatatcaatctcttaggtgtcatatattaaaaaatgtaattcttaaagcacacttctgaaatataaatatttggcttaaacttttatgaataataatgcatgtacacttactctgttgttttaagccagaggattttgggtgaacagttttatcaacatttgggaaaatatctaaatatgtaaaaacagatgaactttaaaaggtcattaaaagagagtttatgtgaagacttttaggatatacaagcataaaacattagtattcataaatacttcctctggtgccttccaaaatggtgatcattaaatatgtaaatatgtaggcttttatatttgtataaaaataatattttagataatgttgataacggttttaaaccgattattttgtatggctcacacatatctacaattggccaacatttaaatataacatatttaaatgcgagataacaatttggcatttcattttgatttgtcaaacagaaataaaattatattttatcacttacaactgctacatttttcttgataactttctatgggcaaaaacttaaggcatcatgtcaaatcacttcaatttctttgataaaaagtactataacgttataatatctatctttttcttaaatatctgctagaaaaaattgtactccatattcattcttgactttaaaatgtacgctctaacatttgcacaagaaaaatgacccatgtttgtttacaagggattctctttgttttaggatgaatgattttagaaaaaggccgcttaaaaaaggaatcaatattcaaaagaacaaatgtttcaaattaaatagtaaaaataatttattgcaactgtatcttgaaaaaaataaacctaattatcaaaactatatttcagtttgtttaatttcatttactattagaactaggcatattttgcatagttcagtttaaatttaatattattcactatttgaatgatgcatattttttttcaaagtgataaagaataacagtttgggggtggggcatatatagtcatgttacagcaaaattgtttgattgtaccacattatatccttccctttaggcttgcattttgcagcaggatcatagagggtcattttttttccaaaaaatacttgatgagttcattaattttcctaagggcttctcattaaccttttatttaaataattatcaagttgagattttcttggtacgcgatatgaccaatgatttttttactatatcctggccaattgaaatattacattatgaaaccctggatcgtatttaaatcttctgttatagtaagcctcttctgacactgagccgatgggaatagtgggatactgtgtcttgacagccaggtggatgtaaaggtgtactttgtgtatactgtgtgtgtattttgacaaggtgaggaagggggtgcagtgaaagagcgctgcttcgtcgcggcagggcagagttgagattttagaaccctcccctacccccaccccaggcctctgctgatgacaacctcgctgagagggagagagttacctcctaccattcccctcaggtcctcttctgatcatggtggtgaaattatatttaacatttagccttctctgcccccagcaaggagagagggagggctggggataaaagtccgggatccccgcgctggtctccacggacaacacttggtcttttaaaattttactctggtgtgtttgtaaaagtgtagggatggggctccttgctacagcaggctgtacttggggcttgttttgtctgctgccgtttccaatttgcaggtttctctagcaccaggtttggaacatatgaggcaaaaataaaccccagggaactcaccaccatgtagttcctgaggctccaggaccctgttaagtctaccttgtcctgtcccatttttcagaaactgcttatgtgatttttgtatgtaatgtccaggggttttagctgtacttagtgggaaaagtagaaaaggggaacactaaatcttggtccagaaccagatgtctgtcaaatcagattttgaagttcccatcgtcgtgaccacactatttctatcttctcttgttaactgacttaattctgttagattttcgttattctgtgacctttttgatgaactattttttttttgcataatttttcttgacttcatgaaaatctgcaacttcccaagctttacaatctaattatagattggcaccatattactttctgctatcagcaagtaattaattacttagacgttgatacggtagttgatgtgagaagagatactaggagaaagtgggcagggatgggtagggattaattttataagtggtcattcgtgacttttcatgttattacaacttttatttctctgtataaaatgacttctcttaaattcagggtgcttgcataacaaacatttagacaatgaaagttttctgtattgcatacagttagcttttatcttcttgcccttgtagtataaaatctgttccaatgctggcattttcagtgctatttgtgtatcctggtattaccatgacatgataattctgacttaactacatatgtgcttttcctagttaaaggttatttcaaagttggtaaaaacttagaaaataaagccatgatcacaatgcaaagacatatctctccttaaaattgcatcccaaatagaattagtgggtcaaagaatgacccttgaattctgttgcaaaatttctctctaaaaaaggcatggaggctgggcgcggtggctcacgcctgtaatcccagcactttgggaagctgaggtgggcagatcacgaggtcaggagatcgagaccatcctggctaacacggtgaaaccccgtctctactaaaaatacaaaaaattagctgggtgtagtggcgggtgcctgtagtcccagctactcgggaggctgaggcaggagaatggcgtgaacccgggaggtggagcttgcagtgagccgagataacgccactgcactccagcctgggcgacagagtgagactccgtctcaaaaaaaaaaaaaaaaaaaaaaaaaaaaaagacgtggagaggatctggattatacactgtggttacgatcaagaaaagacaatttaacgtccaagatatttatcaagagagttattttaagacttgtgttcccctcttttgatcactgaacagtttttagacattaacattctctcccaaccttaaattacactaaaattgctttatgtaaatattatagattgcatgtaatcgtttatctataaaaatattgattctggccttgataatgtaccatggggccacactgggtgagttatcggcaacagccatagagcacatacctgaaataaaatgtattggcacatcatctatatgcacttttatcagtgatatcaggagactggaggcagatagaagataaataatacatatgtattccatgaatactgatatattgtgcctccttgttatctttctgaaagatagtaaagaagaatgaagggttcacggctttccactagaaatcttagcttggagaatcacacaatgagtagtttctctctttcattcaaagctgccacagagcttactgaaaacataattatgcgagatgaattagggcaaaatcagtctcccatcgatgagcaaagtaagtgcaaaacagtaagttgagctagtattaaaaatgcttccatactaatttacattctgagaagtctgtatagaatgcagggcttcttgctgtaagataaaatacatggaaaacaatggttggaaatcaatccatatagaagaatatttgggaaaactgggtatggtatgagcaaactgaagtaggtatgtgtgatagcttctcaatagagtaaatccccagtcctttggagtgttcaccccaaactagatgaacagctggtgaacaggctgtgaaggcatgaggcttccttgcacctccttgacctgtgcaaggcatgaggtcaccttgcaccacgatgtgacctccatggctccctgttttttttttttttctttcttttcttttttttttttttgaaacggagtttcgctcttgttgcccaggctcaggctggagtacaatggcgtgatctcagctcaccacaacctccgccttccgggttcaagcgactctcctgccttggcctcccgagtagctgggatgacagccatgcgccaccacacccggctaattttgtatttttagtagagatggggtttatccatgtttgtcaggctggtctcgaactcttgacctcaggtgatcagcctgcctcggcctcccaaagtgctaggattacaggagtgagccactgcgcccggcctgttcttttcctatgtaatatttatcactgtatggattgcactttgtttatgtgattctttgattaatgcctttttccccgattagactgtaaatgtcatggactatatttttataatgcacactgttatatccctgatgcctcacacagtactaggaacaataaatatttgttgagtgatttaataactggatagacccatttttatttctttctcctgagtatatggctcaccagcttcatatgttaagccagcatacctggaaaaagcttggtccagaacctgttccaggtattaatacttacaatgaggttcctattctttaagttagtggagagtagaaagataccaaactaggaattgtggggaaatggtggcattggcaaggagtgaacctgttggaaagtgaagatgaaaaggtaattttaaaaaaaaatcaatattgattttagaggaaaatcttcctttctatataccaatgtaaacatactcatttagcttttcctggcaaattcagcacagaccttccaattttctttacaatgctgttcctttgtggctcgggggctataagcttgaaggtgaaactcttaaagtgcactttttcttttctaacatttgtggttactttttaaatgtatgcaaatcttacttgattcctgaagacctcaagtttgttttctcataaaaataagatttcaatttcttatctcaagtaattttaactaaagaaggggcactgtgtgtactccatgtcctcccatggccctcagcccactgttacctctggaacccaggccaaaaaccacatgcagtgctcttcacaaagcctcctgtcctcatacaacttttccttctttcctgaggaggtctttgaaactagttctagataatgagatgtgggaaaaccatgttaaaagttgtcttaatacacacccactccattttaaatgggattacatagctacaaatcctcacatgtggaataaaaatatgtgttttagtttgggttttcatttattgtgggaaaatgaagcaacatatcttatgactctgtccagaaggaacttgctctctaaggacaagatggaagaatattaatatcaaatgactttttttcaatgacttaaggatgagaaaagcaacaatagaaagatcttgtaatattgtgtatacacacatacacacatactcagtaacttcattttcatagactactgagactgaaatataaattttaatgtataattatgagacagtaccaaggatgcaaactggaacagaatactctgggcagagaatttcagagagcatgataaactgtacccagggaataaacagcagcacttagcagtgtgctgatggcagagaggacttccctcttcactgcacaggtagtgggtaatcaccccatgctgacaggaacctgcacttgggttagctctccaatgaataagtttcattctgaagagacaattatgtatagaattgggcttgattccatttacacaaccaaattaggctgggaaagctcagtgttcagtgaagacaagaaaaaagctcagaataaaaagacatatgtctattacaaattaaagtcccactaggttaatgtgagctacacagtggtttggtggtttgtaaaataaaaggtaaaaaatgatatcgagtatgtaggctaccatagagtgtcaagttacatcaagagtttagagacagaatgataaggaatgatcttaatgtaatagatatacgtagagtgggtaaactcttggctttggtgttatttatgaggttttctccactcatagcagagaagtacatttcttcactgcatttttttcattgtcataaattggttaaagacaaaagaaatcagcattatacatcagtaagtagagtggaccacatgattctatctgttttgcatggaaatcttaaaacatcttttaaggagccaagtagtaagcacaaataaataaactgcaccaaaatgttgccaggtttgcttttgctggagactgctgacactatagaagcagcacaagttgggagtctgcaggtacagaggtgaacctggatctgctgtgtgcccaggtgtgaccttggacatggtgtttaacctctctttgtaaagtggtgatgtcaacacctaaaatgctgggctatgatggtatttaaatggcataaagcctaaaggtatctggcccattttctgacacctaataacacacgtttatagaacatgacaacgtgttcaataaaaacctattctctttgctccctgtcagatcatgagttccccctataggtccccatgtgcacacattcactttccgtaagtgaggccaacttgtggctttaaattgtgttagcaaagagagattctttgataccatttagaaaccaaaggactagctcttcatccctaggatgctgatttcagtgacacattacatatacatacctaacataacctcatttctgccaatgatggaccacatatacaacatggtcttgtaggattataatactgtatttttagtgtatcttttctatgtttaaatacaaagatacttgccactatgttactttgcctacagtattcagtacataacatgctgtgcatgtttgtagtgtaagagcagtaggctaaacctaagcctaggtgtgtaataggctagaccatctaggtttgtgtaagtcactctgatgttctcagagcaaacatcacctaaggatgcattgctcagaacgtatccctctctttaagcaatgcatgatagcatttattaaaaacgactagtttggcacatgttatatgaggcacacaatcaccctgagaaaattttaagagataaatgcccagatattatagatgagaaaattggggttcgtggagttaagggaattaccataaatgagacttgtcagtggaaactaggacgggcacccaggtcttctagctgccactcgtattcattagagggttaacgctgtatgacctgaaccttaatctgatccctgcggagggatcagatccaggtattgcgaccatcaagatgcatggccttggataagtgccttaaatcctctggtccccggtttcctcatctacaaaaggattacagtaatattatcatcttcataaagttgcaaaacattaaaaaatataaaagttgcaaagtaaaatgtgcacaagtaagcacttggtgtatattagctattttgatacgttccgggttttttcagctacatggagctacctagacaacagggtcaacatgcctaaaaatctctgaaataaaatctgagcattttgtcctatcatcgatatttactttctttcttttgtttgtttttcaaaggtatcccactgtcctgaatactcttgtccaagatctgtttctgtacaccatggtgaatttgatgtatctgtcagatgggaaaagtggctgcttttttgtaaggataaattttaactttgtaaagcatctcacaaattttaatcagcttctctgtcactgtcaccctaggaaccaacttcacccttgccgaactgggcatctgtgagccctccccacaccgaagcggctactgctccgacatggggatccttcaccagggctactcccttagcacagggtctgacgccgactccgacaccgagggagggatgtctccagaacacgccatcagactgtggggcagagggataaaatccaggcgcagttccggcctgtccagtcgtgaaaactcggcccttaccctgactgactctgacaacgaaaacaaatcagatgatgagaacggtaggcctgcttcttaaataccttttaacgttctgtgcactgcaccacgtggggctttgaatgtttttgttttttaatgaagcggcgtcataaaaccattcattttctttgaaatcgaccttgtctacccagtgtgagctggggggaagtaaaccagcaaccctccagcacacaagaaatgagaagagaatttaaaaatcacattctgatgataacacagcattcaggtgtagtcagttggtcttattagcaagtaaattacattgcaaaagaggcggcttgataaactatgacctatacctagaaaatgtcctctctccacaagtttctaggtctttgtattgatttccccttcccagtaaatggaaacctgggttattttttttcgtgacgatctcttaagaatcccaccttatcttagactttcatttccaggcggcaatgcctcatatccgtattgaagatcaaacttggaacaggtgctctggagcttaataatgacaaataggaagagacttgtcttcagaaaaagaattctttatatgtttacttttccccttggcaactatgtaggttaatggtttcccccatcttctgtcacaaatcactattgcctatccatcagctttctaggtggattttaatgaaactttgaaaattaaatccttccgatcattaagcagtaaatatagagaagcctaagcaaagtcattaaagagataaggtgcttttttgtgggtttctgagcaattccgaagtgtgtttagtcaaaaacatttttttaaaaagataaattgcattaggttacagctgatttaagacgaaaacatcaaatgctatgtggtttgttatgaatagatggcatgtttgctaaaagaattaccattaccattaaaatgtttacaaatagatcagttaagaatgtttatataaaatattagaaacttctgccagagcagctttaagtatttcctttcatttaaaaaagaaaaaggaaatttgcaggtggacagcttgttgtgaatgcaaaagcatagctaaatatcatttaatctcaaaactgtgttgaaaatacatcatttcctgggtaagtcgcacatactcaaaaagatgtcacttttttgaatttaaatttatgtttaattttgaaataatttattctacagtggggacaaggggatgtgtcttacttatgcctccgttcatgtagctaatcaaggtgtactctcaaggaaaaatctgtacttgactccttttgaattttaacaaaattctgacacttggcacatttgacactctgaggtgcttatttaataggaaattacttttagaagtttccataaaagcatacgttgaatccatttactggtgtcctttttcagcttcattgtgtgtgtcatatactatttaaatgaaggcaatttgattgcctaataaataaaatcacttgtaatccaagaatttatggcacattttaaacaaggaattttagcaagtccctcatagttggtattcttatacctatagagggaaccgtctatacagagttatttatacatatttatagacctgcaccttctcccatttaagttatatgcatctaaaaaactcatctaataagggagggtttctggtgaagccaagggcacaaaaaatgcttgccatgaatttacctaggagagttatggatgaaaaaaatctgaaattcatcatatatttggtagaccaatagtagtttcatttttttcatattatttgaaacatcgtatttgaataatttttactttctgcgagtctatgtaaatccctgcatactgataagaaataaacccttgatatagtgtcctgattctttcctacagtactagttgcaatgcagtcagaattacatgaagagaaatgtacttagaagcactaagcaactctgtatgtgagtgtggctggcaaggcacaaaggaggtattgaagccagagttcaaactaggtgagagatgcttattttaaaatatacaggtagaatgtctttgtttttctttttaaaacattttttcaatattttacatattcaaaagaggtacataatgtatcttctgttctcattcttggccagaaataaaaataagaaattttacacatcacatcataaactctttaagcaaatacaaattgaagtgtgagcaactctgcaggcagaggtgttaacttcagtaaacttcttgctctttctctctgacaaattctgtttagctcacaaagaaatcaatgctttttcacatcactgattttatgaagtttgggaatgtattatcatatagattgacagttgccccactggttccacaccacggcatggacacttacaaagccatcattaatttctcacacttgtacccagtgatggcttcctccataataaacactgtgtccttcagaaccaaatcaataaccttttaggtatgcctttcttgaagaggaagtaacaggaatctatactttgagaaagaagctctccaatttgattttaggttttaaagatacatggtcagaaaatgaatcttttctgtggggttccatatgttttaatttcatttcttggtgggattttgggataaatggatttttcaccgtgtttacttaaaaatctcccttaaaaaattccagttgtgattttgctaagcatagttaatgagtgaagacagatctcagaaaccaacttcctttttggtaatatgaagtgtatattcagtctgcaaagtcatatagtaaaatctttaattttgccaacagttctccctagatcaatgttgattgtgcttcctacatgctgctgtgacaaaaatgacccattggataacttgacagtcccatcaaacagatgaacctgtctttcttttctttcttcttcttttttttttttttttggtagtgtagacaccatagtgcttcatcctacactcattgatttagcctctgcattaacattgtgctggcttggattgggttgcttcaaatatataaaactctcagattcatgttatcttttcaggttctttaatcctatcttgaagtcaataatgatttggctagaaatggcaatgagagttgagaacagcccggccaagtttttgctgctgtgaaatttgaaagggctttcctagtaactttaaattagagtccatacttttgttcaataataaatgtcccacttaaaatatgtcctctctaaggccatttgtattatatgagttatggagaaaaaggggtagtcagtaatacagaagaataactaattgcctccttaaagatgcaaagcagcacaaactaaaaaatcttgtctatgttctcttgactcccttaggcgatttcttcaccttgggacttaaaaatttccttttttttttttttttccttccagcagaattctagtttcagttattttattggaaatccagaaagggaaaaaacaaaaaaacaaaaaacaaagaaaataaagttggtatgaaataggaagctagaaatggcagtaagtgaaatctggtgttggttaaacatttaagaaaattattcttcccctcccctctccatgtccacccaaagtaaataagtacaatgttcattttcatctgttgtaattgggaaatttacaatcctcataatgtactttgaggttgagatataaatgttgggttaattccattgcatttcacaaaatgcatttataaaacaagctggctctgggcacgtaatggatttatgtaaagcgtatttgtgaaacacagattctattagattgagtccttttggcaaaaggtctgtagcgtatctgtctcctcggcagagttccaacacacccaggtactcactgcttgttaactgagacatgaggaatgaagcctgagggaaggaaggattttccttagcaccggggacaatgtccttagattgttactgccaaccaagttgcattcatttgtcatttaaggtgagttacttaaatttttctcctttctctccagaaagcggcctctcaataaatctagcattggagcgtttcttaagtaaacacaaactaaacatgcgagtggaattctatttctactcccactctattactcttacatgctcaaattaactttgtattttataacccactctactcctttcttctccctaatccctcacgtaaaatcacagagaatgcctggaacagacataaaaacttactaagagctccagacctagccaaaggcccataattttgctgttaaggaagtgaaaagtcagtggtaagaatagtgaaagaggtagctacaaaaagcatacattcatatttgactgtgcttgatgttgatatgggatgatttcttttccagccacattttatgaagccaatttccatggaacctaaagaaaattgtctcaatttcttaaaaacaaaacaaaatttaaaaacataccaaaaaaaaaaaaaacccagaacaaagttttaagccatttggatgacattgatttcaatttgtgtttttaggctttattttatatacctgtacatttaaaagaataccattataaagaagagtatgaaatgagttatcatggatttaaaaaaacgaaggacacagacacaaaatatcataggttctgtgttttccattcctaaatgaaagaatgatctcctttacatttttctaattcaattccctcaaagtccaggtattggaagctatagagaaaacttatttttaaaaagtttattcatgggagtcttaatatatgattactatgatgctaaaacacagctgataataacatacaaccagaggcaaaatgtaagaatatcacattgtcacatggcatgatatgaaagctagaagtgaaaggattgatgttctgcaaatggactcgtatgagactttagaggtttacgtttttggcaaattaagcaattcttacgttactgtaaaggagaacagagtacttcaaggagcgtaggagcctgtgccttatttcagtactgcactttccagattataaactttagtggcatggtctttagttatttatatatttctttctttcctttggtagtttctttcatgtttgttaatgctcccaggggctatcaaggaatggctccattcaataaatacaataaataaaatgaagaactaagccttccttttggcaagggcagcctgattattacatgtgtaatctccaggccttcagggacacattgggcttggtggataatcatttggttttaagctgctgagttcctgatatcagtactttaacttcagttgagttgctctttttactgcgaaggcagtaaaatggtaagaagcaaaatgtttttgtctgttcacgattggaagcctcttcagtcagaaaactctttttttgcttattgttcagtcatttttttaagtttagttgttgtttgtcaatgatcaaattaagtttatctaataggtgggagagatgtgccatgcattgagaattaaggtcataaataagatgagttaaagctaaggaagttgatagtataagttttctacagacaattgaatcagaagaagcctgctcagaaaataatatcaaagtaaacgggttagagaagaatgtatgaggagtaatgaggcacttcaattagccattcggaaactgagacatagcaggtagaagaaaatttcaggtattaataatagatttgtaaataggatggaaattccacatatgtggccattatgtatataggcttatacatgaaactaaaaatgttacttgtgatttaattttgagtattatttaagtgctagctgtgagaaccttctagaaaattattctttcttgctttccatcaactcagtttgagtaatgttaaaggagtttaaggtgtggctaagtggcttatgggatatttaacaacagaagttaccaactgcatgttagtctacaggctgaatccagtttgaattgtttaatttgcttagtgcagtatcaaacatttttagattaacaaccaacattttaaaagtaagagattttatattagaaatttttatttttggccgttctcaaaacataagaagattcagtcacactggttcaggttttggttgggacagatcagattagaagcagtagcagttctggatagattccatgtctttgaggtcacctgatcttcctccaggctacactgttgtttaaggtctgacttagcctttgtagtcccttgagttatcaaccctgacctacatacagtctttatggaaatcagatataaaaattgtagaaagctagaactcagcaattttatgggttcatgtattcagagctagaatgttacttcttttggtaagtttgctccatctgcaaagtgggtttaattttgctctactaaatttctaaaatggttttaaggcatttagatttaaatgcttcagataaaattaaatcaaattacaatcaatttaatttggaaagtaataaaatgattgtatatgtggggggtgagtttaagtgggtaatatgtcaactccattttccgaagtagtagatgccctgaagtactgaaaaattaaggtcagagtatttgatttaacacataattttaaagctattttaatgtaaaagtatttaggtggactatttggaaatagatggagggaaaacctactttaaaaactttagctacttcagctgattgaagaaaaccccagggcttttcaggaggaagccatttaaagaggaggaaaatgactttgtgctaattatgttcagttttgatccagcaaatggtttatggggtctgtaacaatgaagttggagacaataaagcgaaggctagaagagagacatgcagtgatacacgaagacctccagtatgccaagagagaaagacatggagcaatgttagctaatgctgaaatgggaaccagcgagtcagaaacaaacagaacagcgagtgttccacaaaccaggaatgttcttcaaccagtggataagcaggatagccaaggaacattcaggagtgactctcactccccatcctcatttcttatttgtgaagaagaaaagataactgaaatatgagcatgtttcctaaggaaaggggactgaaatatttgagtaggcattctttgaaaaagagtaggttaacagataacctatgcagagttataccattctgaggggaataaaaaagataaacaccatggcagtctttccatctgtgttaatcatgagaaaaggggcctgaactcacttacagtgagaaagttaggcactggaggagttttgggaagtattttttgtagtattttatgcaagaaatagactatgacacattcaataatcaaaaaggatctttgaaaggaatttttaaagaagaaaattggtgtttgaaaggtaccacactatgcttagatatgaacattttaatatgcacacaaatatataaaactatgtgttgttttattcaatattggtgaaaaatagaaaagtactctcagatgaagagttgtgttaatttggggtggggggacttatttctgaaaagatttcaagtaattgctaattgctctgcattggacgaagccattgtgtgtatgtctctttgtatttgtgtgtctgtgttgtgtgtgcatggtggggaaggtgctttgttgggaagagggatgttattgagagggatagaaatcaataaatataaattgaccaaattccagggaaatgaaggccatatacgaaaatgccaaaatgagcaatgtagacattttgtagcatatagttttggggggagagagagaagagaaacctgtgttgaccttcgtgggtcttgaactctatgggtcatcttacatcaaggagcatgccctttaaagccttggatcccttaaaccaatgatgctgtctcacccatgtaagtcagaatccacagaaaaacacccatgttttctcaagtcccacagaagaactcttgcctctggggagctctgaaccagttcgaatctgtcagataaatatttgacttggtggggaatccgctttccttgaaatatgtccctcttcctttcccaactttcgtctttcccccaacatcttccctccccacctgcatccagcagggcctaatcacctactccatgagctaatttttttattattacattctgtcctctcgttaaaactagtgagatcatgtctctaagatatgatttgagcatcatgataaactggtgcaggataaaaaaaaaaaaaaaaaaaaaacttccgtataaatgtaccttcattttcccttgttctttaaaattttaacttttgaatatgttttatgatgcaagtaatttattggtatatgtatatacacacatacacttgcacacacatagcatatatgaacaggttacataaatacagaaatgtatacattggagatgtgtccaaaaggcttatgctgattgttttagaccttttatttcccaggtctaattaagcctaagcaaccactcactcctcaaaatatttggataattcattattttgtggcaacctgtttggttgtctttgtattggtaatgaccgtatgtgctaatgatacctaactatgttatagtaaaatttgtatttttttcttctaattctctctgctgactttcacttcctagatgaatagacaaaaatattgactttgttgtttcttgaagaaaccaagcactcctatgcatttacagagacattcctgtctaacctcaatagggagagaagaaaataaacattatatatgttagcatactggtacagtaagggaagctttgagaaggtatggttttaattaggttgtaaataggggtcgggacttttatgtatggaaatgagatgatggatattctaaatgaagaaaagccagagtgtatggtggttggagaatgggaggtgaggtgaagatgatgatgatttttcaggggacactttctagtctagaaaaaattccaactccagtcaggataatgggaatatagtgatttgattgagtagcagtagaaatagatgaatagatgtgtagcaatcagatgaccaagagctgtgagcttcatcttaaggagttaaagtctgatcaagcagataatacagaactattgaaagtttatgtgagcaaagactgcaatatcttaggaagcatctgattaaaacacacagatacagcgcgtgcacacgcgtgcgcgcacacacgcacacacacacacacgtttggatggaaagtaacaaagttagaagtgatatcagaaagagaagcagtagtccaggtagaaggactccagaaacccttataccacaaagagtctacctgcttcttagcatttcagtagcagaaattaacctctgactaccatatgaatgctgaatattagtaactaagatgataaaattcaaaaagcatataattttatgctgaatagcaggaaaatgggaggaggtacataaccccacactcccgcagtacagggagtgttccttacagtgcaatctattctgcttacatgtagaatacagtattacaacaattagactccagtgtttataatatttaaccaaatgattaaataataaagtagcatcaaatattgctttgcacaaggaaagaagtcataatattatttttaagggcacagtaagtgtgttgtaggtgaacgttggctagaactattccaggttgattaatagtttcttgaatattatttctgcttctatatccttgccgcttcttcatgagtcatattctcatgcaatttgtttaattgctcctgtaactatagttatgtctcccttcttatctctaatcttttatatttttatctctcatttttttaatcagacttgaaagagatctattttttttcaagctttctgcttgtctttatttactttaatttttctttctcattacattcatctttattgtattttttaatttcctcattttaacttttggagtatattgtggggtttttttaggtttaatttttttttttttttacttccataggttattggagaacaggtggtgtttggttacatgagtgagttctttagtggtgattgtgagattttggagcacccatcacctgagcagtacacactgcatcctatttgtagcattttatccctcagccccttcccaccctttccccctgagtccccaaagtccattgtgtctttcttatgcttttgcatcctcataccttagctcccacttataagtgagaacatatgatgtttggttttccatccctgagttacttcacttagaataatgctgtgaaagctattaattcattcctttttgtggctgagtagtattccattatatatatatgtgtgtgtgtgtgtgtgtgtgtgtgtgtgtgtgtgtgtgtgtgttacagtttctttatccactcattgattgatgggcatttgggttggttccacgtttttgcaattgtgaattgtgctgctataaacacgcgtgtgcaagtatctttttcatataatgacttattttcctctgagtagatacacagtagtgaaattgctggatcaaattgtagttctacttttagttctttaaggaatctccacactgttttccttgctggccgtactagtttacattcccatcagcagtgtagaagtgttccctgttcaccgcatctattatttttggattttttgattatagccattcttgcggcagtaaagtggtatcacattgtggttttgatttgcatttccctgatcattagtgatgttgagcattttttcatatgtttgttggccatttgtatatcttcttttgaaaataatctattcttgtccttagcttactttttgatgggattattatttttttcttgctgatttgtttgagtttattgtagattctggttgttagtcctttgtcagatgtatagattgtgaagattttctcccactctgtgggttgtctgtttactctgctgacttttccttttgccatccagaagctctttagtttaattaagtctcagttacctatctttgtttttattgcatttgcttttgggttcctggtcataaaatccttgcttcagccaatgactaggatttttccaatgtcatcttctagaatttttatagtttcagatcttagatttaagtccttaatccatcttgagatgattttgtataagatgagagatgaggatccagtttcattctcctacctgtggctagccaaatatcgcagcaccatttgttgaaaagggtgtcctttccccactttatgtttttgtttgcattgttgaagatcagttcctgcaagtatttgggcttatttctggcttccctattctgtcccatttttatatacctatttttataccagtactgtgttgttttagtgactatggccttatagtatagtttgaaatcaggtaatgtgatgcctccagatttgttctttttgtttggtcttgctttggctatgctgacttttttttggttccatatgaattttagaatttgtttctaattcagtgaagaatcatggtgatattttgatgggaattgcattgaatttgtagattgctttcagcagtatggtcgttttgtaatattgattatacccatccatgagcatgggatgtgtttccatttgtttgtgtcgcctatgatttctttaggcagtgttttgtagttttccttgtagaggtctttcacctccttggttaggtataatcctaagtgttttgttgttgttgttgttgtttttgtggttattgtaaaaggggttgaattcttgatttgattctcagcttggtcactgtcggtgtatagaagagctactgatttgtgtacactaactttgtatccggaaagtttgttgaattcttggatcagttctaggagctttctggaggagtctttagggttttctaggtaaacaatcatatcatcagcaaacagtgatggtttgacttcctttttactgatttggataccctttatttctttctcttgtctgattgctctggctaggacttcagtactatgttgaagaggagtggtgagagtggcaatacttgttttgtttcagttctcagagggaatgctttcaacttttccccattcagtattatgttggctgggggtttgtcataggtggcttttattattttgaggtatgtcccttgtatgctgattttgctgagagttttaatcataaagcgatgctgggttttttcgaatgttttttctgcatctgttgagatgatcatgtgatttttgcttataattctgtttatgctgtgaatcacatttattgacttgcatctgttaaaccatctctgaatccctggtatgaaacccactggatcatggtggattatcttttttatatggtgttggattcagttagctagtattttgttaaggactttaatatttatgttcatcagggatgtcggactctagttttcttttttggttatgtcctttcctggttttgatattaaggtgatactggcttcatagaataatatagggaggtttccctctttctgtatcttgtggaatagtgtcaataggattggtgccaattctttgaatatctggtagaattctgctgtgaatctgtctggtcctggacttttctttttcggtaacttttaaataccattttaatctcacttcttgttattggtctgttcagggtatctaattcttcctgatttaagctaggaaggttgtaccattccaggaatttatccgtctcttctagtttttctagtttatgcatagcgttcatagtagcattgactgatcttttgtatttctgtggtgtcagttgtaatacctcccgtttcatttcttattgaacttatttggattttctctctttctttagttaatcttgctaatggtctatcaattttattcatctctgcaaagaaccagcttttgtttcatttatcttttgtatttttttgttgcaatttcatttaattcttctgtgatcttgggttttttctttcttctgctagatttgggtttggtttttttttgtttctctagttccttgaggtgtgatcttagattgtctgtttgtgttctttcacactttttgatgtaggcatttagggctatgaactgtcctcttagaaccacctttgctgtgtcccagaggttttgataggttgtgtcaggtcattcagttcgaataattttttactttccatcgcgatttcatttttgacccaatgatcattcaggaacaggttatgtaatttccatgtacttccatggttttgagattccttttggagttgatttctagttatattccactgtggtctgaaagagtgtttgatataattgtgttgtgctttttctaactttttaaagatgagtactaagttttattactctcattctcccttatgttatcagagtaagtatatttatcaggtcctatagaatttgataaaaaatattgttctctgtgttactttctaaagatcctcagcccatttggactctcaaaataaaacagaatcctaatgctaccagtttttcactttaatactaacaatttctgaaaaagtccaatttttattgttaaatctttatgctgcccaaagtaagatatctatatgttttatatgcattatttatagatatacgtttgtattaactatataacatagaattatgcaaagcatatgtgcgtatatatatagtgcatttaaaatatatatatatatatatatatccatgcatataggcatgaaaaagaataaaaatcacctataatttgacaccaacaataactatggttaatattttgatgcatatatccttcagtctgtgtgtctatctgagagaaagtgagagggaaattaataattttacagagttggcatgttttacatgccctatatagcattattttttttggaaataaactaaaatcatttccccatgacattaaatattttctccaatatttaagagggacatagtactcctttaatgtaatccatttcctcaatttcctttcattgtacatttaactaatttttattttagttgcagtaaagagcaatgtgatggataaaatccttatagctacattcctgtggacatccctgactgttttcttaagatgaattcctagaagacttagaacatacacagttatgtgaaattgcaatccttttcaaccagtgtcctcagaggaactcttgcaccagcactgtgggaaaatcaacaggcacacggaatccttgagctcaggagtcactgggaatgatcattaatattttaccaaattacggatcgaaatatttttattctggcttcccttcactttaatctgagcaactcttcatgtattcattgtctacgtgtattttttatttcatgatttgtatttcttctccatatggaaagatagtgggacgatgcatctcactttttagtttgtattagctttttacaatgtctacagtgatcccagatcaatgtctacagtgatcccaggtcctattgtaccttattgtttatacaaatgcttaaaaagtgttcacttattggtgtgaagatcacttggctgcattttcaaaagcatgcgacttattttctgtgggatagaacaccaaatgtatttacggagttgatttggtttatcagaaatcagtgctaactagaaagcaatttaaaattgttgcactgaccaaagaagaaatgctagctctgagtagagtggggaatttctttttccatattaagtatgtcagctattgtttggaatgcaggactttatatcagattgttaatttataacaaaccaaggatagaattgcattccacatgatgaaaggaaattcacatctactaagacagtctgcaaggcaccttgaggagacagaatcgagtaaattatgtattaaatattcttaaaacttcctccatctgcggtgcctttgattcaatgaggttagtaatcataaacacagtggtggccctgctattggtattttcacaaaataggtagttctgcaggcaagataaatatctcagtacataagaaaagactctgaaaataagcatgtggaagcaattactattataataagcatatggctctgctaatatacagtgttgcttaataattgatatagaaaaaaaacagtagaaacatttctatattctggggcattcccttgtacatttagaatggaaaagaccccagtgaaatgcagaacaattaagagagtacaggttgtcttccatttccactgatacacatttatggctatgaacaacaaggcacgtcgagaaagcaggaagtatacaaatcaacttaatctgtcccactgtggtatttcaggccctccacaatatagtccaattttatggttttagcccttgctcccacttctcttctaaatatattttcagctccagctcaactgagctacttattttttttccagagcatactctcttcctctgtgtcgttgttcaccctgttctttttggctgcagtggtatccccaaacccacctacccatcacatacctatccattatcaaagaattatctaaggtgccatgtcctctatgaaatcattctgttttccttaactacaggtgtactcccactcctttgaaattttttttaacattttatttatccatttcatcaagaatttaggggaaatggtgtagccttcaccaaagtagagaagtaaatgatttgagatgaattttggagctagagtatacagaacttgatgatagtttgaatgtagtagttgagaaaagaaaagcaagagctcttgggtgggcatagtggctcacgtgtgtaatcccagcattttgggaggctgaggcgagcagatcacttgaggtcaagagtttaagaccagcctggccaacatggtgaaacaccgtctctactaaaaatacaaaattagctgagtgtggtggcttgtgcctgtaatcacagctactcgagtggctgaggcaggagaactgcttgaacccaggaggcagagtttgcagtgagccaagattgtgccactgcactccagactgggaaacagagcaagacttcatcaaaaaaaaaaaaaaaaaaaaaaaaagcactctcaaggatttctaactttagccactggatggattcctaagtattaagatgagaaatacttgaagaagataggatttggggcttattcattttagacattgttaagtaagacaactaagtagaaaggcaatgtggataattgtgtaattattaagactggaacctaggaaaaagatctggactggagatgtcaatttgagaatcagcagcataggagtggcccatatatatccaggaaagtagatgagcttacccaaggggaaaggtagagagagaagaggagggagccaggagcaaactctgagtagtccttaagtgttgggtggagagactgaaatcagtggtttgcagaaggtagttctttgttcattcttgttggtgtgatttttctttagggttccctgatggcttccggtgttggtgtggcttttatcatctctcaacccacagtcttttttcctttccattattctgtttcaaaggaggcaagactggctgagcctcatcagtacaggagaaagagaaaaggaatttaaaaagggatagggtcacaggaacaaaaataaataagataagagttctcatataattgtaaactagtttgatggttgattttatgtgtcagtttgactggaccgtaggatgtccacgtagctggttaaatgttctctgggtgtgcctgagaggttgttgctagaagagattagcttttgaattagtggactgaggaaagtcaatggtctcccccagtgcaggtctgcatgatgccatccactgatggcctgaatagaacaaaagatagaggaaggttgagtttactctggctgattgtttaaagtgggacagcggttttctcctgccgtcagcatttctgtctctcaggctttcagaccaaatctataccataacctctccaactctcaggccttgaaactacactacgggttttccccagcttgcaggcagcagatgggatttctcagtctccaaaatcatgtgaggccatattttataatatctcttcattagatatatattctattatttttgtttctctggagaagcctgactaatatgttgtctgtaatttcaaaatgtatcgagtaattcatggcaataacatttaactacaaacttttattgtactcagaatatttatttagttagttattgggcatctattgtctattatgcttagagtatattcattaacaaactagaaacacattttcctctccatgcgggtggatcaggaggtcaggagttcaagaccaacctggccaacatggtgaaaccccatctctactaaaaatacaaaaattagccaggtgtggtggagggcacctgtaatcccagctactcgggaggctgaggcaggctaattgcttcaaccaaggaggcagaggttgcagtgagccaagatcatgctactgcactccagcatgggcgacagagcaagactccatctcgggggaaaaaaaaggaaaaaaaaagttaatttttattaggcaataaaaaatgaacttgaaataaagaaaaaagagagaaaatagaagagagggagagataaatagaagggagggatgaaggaaataaagaaaaaactatgctatgtagtgataaatggtatgggaaaaagaagacagtagaaatagataggagtttgtgattgtgagagttttgcagtagtaaacgggagtcggagggccaaggaaaactttattaaaatgctgacatttgaatgaaaacctcaaggaacagagaaactagctgtgaaagggaattgactatacagatttcaggggtgtggcatttcagtcaggtggaagagctagtataaagattttaatgcaggcacactcctgctgtatttaaggaagttaatgtgattgcagcagaatgcaaattgggcagaatagcaggaaaccagaacagagaaatgaaggtgaagtcaggtcatagagggtgtcacagattatttaaaatggtggcctttgctctgagggaaataagcatccagacagagttttgagcataagaatgtcatgatctgacttcccatgtaaaaggatagctctggctattgtgttgagaatatagtggaagaagacaagagtagggagaacaggaggctattgcagtaaccaagacaagagatgacagtgtctgtctgggacaatagcggtaggaagaagtgatctgattctcaatgtattttgaaggtaaaggtaggagtatttctggatgtattggctgagaagtgtctgcaaacaattccttgaagattactctcaatcctgtgcacattttaaaataaggctatatggttttctgatattgagttgtaggagctccttatatattttggatattaactccttaactcatatatggtatgcaaatattttctctcattccgtagattgcattttcattttgttgctagtattctttgctgtgcagaagcttttgagtttgaggtagtcccacctatttttgcttttattgcttgtgcccgtgatgtcatgttcaagaaatctttgccaagaccaaagtcatgaagttctttcccaattttttttaggagattcacagtttcaggtcttacattttaagtctgtaatcatttcacatttatttttgtgtatggtgtaaaagataaggatccaaattaatctttttcacatgtgactgattcttctgacatcattttttgaggagactatcctttcttctttttgtattcttggatccttgttgaagatcagttgactatataaatgtggctttatttctgggcattttattttattctattggtctatgtgtctgtttttatgccagtatcatactgttttgaacactattttgtgtgtcagtttgacacatagacttataaataaatataaataaatgtatgtatgtatttatttagttagttagttagttttgttctttggagacagagtctcactctgtcacccaggctggagcgcagtggtgtgatctcggcttaggaggcaacctctacctcctggggtcaagtgattctcctgcctcaatctcccgaatagctggaacttcagactcacgccatcatgcccagctaatttttttttctatttttacagacagggtttcaccatgttgcccaggctggtctcaaactcctgaacttaagtgagccaccagcttcagcctcccaaaatcctgggattacaagtgtgagccatcaggccaggctgtaatgtattttaaaatcaggacatgtgatgcctccagctttgttcttctttctcaagattgctttggctttgaaccaagattatggttctacgtggattttaggattatttgttctatttctttaaaaaatgtcattggaattttggtagggattggatgcattggaggtgtagattgcttttggtagtatggacattttaacaacattaagtcttccaatccatggacatgggatgccttctcatttatttgtgtctcttttaatttcttttataaaagttttatagttttcactgtacaagtcgttcactgccttgagtgagtttattcctaaatatatttttgctgctattatagtgggattttttcttagtttccttttcaaatagttcagtgttagtgtatagaaatattactaatttttgtatgttgattttgtatcctgcaactttactgaatggtttatcagttctaacaggttgtggggttgggatatttttcttttgtctttagggttttctgcatataagattgtgtcatctggaaacggcgatagcattacttcttcctttctaacttggatgccttttattcccttttcttgtctacttgctttgctaagactctcggcattatgttgaatagaaatggtaagagcatgtatccttgtcgtgtccttgatcttagaaggaaagtttttggtttttacaaagaagacattcaaatggccaaaaatatagcaagtcttcacttaatctcatcaataagttcttggaaattgtaactttaaggaaaacaaagtgcagtgactcttgaatgatgccattttgtttgacatccctagggtataaagttgatgagaaaaaaaatgatgtggttatacatcctttcacttaaactcagtttccaggaacctatagataattttaagtgaggacttgctatatatgaaaagacactcaacatcactaatagccagagaaatagaaatcaaaactacaatgagataccatctcatacccctgttaggatggccattatcaaagcagtaacaaaagagataagtgttgtcaaggatgtggagaaatcgtagcttttatatactgttggtgggaatatataaaatgatacaaccactatagaaaaaaatatggagtttcctcaaattaaaaatagaattaccctatgatctagcattttcacttcttggtatttattcaaaagaattaaaatcagaatctcaaagggatagatgcacccccaaagtcattgtagcattattcacagtaaccaagatgtggggagaacttaaatgtccatcagtgtatgagtggataaagaaaatgtggtgtatacatacaatagaatattattcagccataaaaataagaaaatcctgccatatgatacaacatggatgaaccttgggaacattatgtgaagggaaataagccaatctcagaagaacatatacagcatgcattcaattatatgaagtatctaagataatcaaactcataaaagcacagagtagaatgaaatttgccaggggttgaaagaaggagaaaatgggaagttgttgattaaataggggtgtcagtgaatgacagcaagaataagaggtaatgtggtgataaaatctgatggcaagagatgcaaagctgaggatgtctacagagcagtgaagcatcatgctgtatcaaggacaagaagcagtgtgtatctcttttatatattcagtgccagtggcatgagggcacagggaggaaaaactgccaccacctgtaactactccagggaaagtagtgtccttaggaagaacaagatttctactggagcgagaccatgaaatgagcatttggagaaatggttaagacttttttcagtgattgacatacagagggacagtagacatgacaagggcgaaggcagacagtgaaggtaaggctttgaatgtcaagggctagggagagatgcatcttgggcacctttcttaactcctgatgatggatggggttagaagaaccagcaaaagtgtggttcagtcctggtggagagtttcattgttgatcctggagaaatatccccaatctatttctcaatgaaggcagtgataaacttttgatgctggagaagtaatggaatcttcctttaataaaaagagtcaagatgtccttggtgagtgcagagagaaagaagaaacattttctaacacactgtaagaaatcttgaatatagggacaacatcttatttatgtgtgtttccaaaggctaccacgttgcttgtcagaatgagtcacaaaaccatggaagggagggagggagaataggagagaatgcaggaaaatgaagaaaggaaagagaaaggaaaatagaaaggcaaactcaaaaaaaatgaaagataagaaaatattatcttgttaaaaccatactcatcaggagacttaagtccttattcatttaattcaacaaagtttttctcaaaataatcacaaaaacattctgaaaattaactaatgaaagaaaatgatagtgaaatcatttataaaacaatgtatatggacccgtgattgataggttttgttgcaaaccgagcattgagtatgcgtgtgtccatgattcaatataaaactgacccttctcattttgaagagataacaattttcttattttgaagagattaataatgtggtgaattaacaaaccatcatggaagagattgagagaaccatgggaaggtgattatatcataccttgtaaagaaatatgtatcttattcatagggtacaagatactgtttctattcctgctgaaagagtaggttaagaaatggtatctgcaatttgaagataccagaatagcaacttgatctcatatatctttgtttgcttctctgaaattcgcatcaagaaaaagtctctaaaacatgtctcagaatcattttctctagaatccactaagtgggctttacagctttaaaaatatcaaagatttatattactatctctcctaggaaaactgtgcctatgaccatagtcttgtttcaacttccaatgtatttttatgaagaaaatatgagaactatatatactccatgcactgtgatgatgtaacatactaatgggagaggtccaagggcttagtagaaaaagtctagagatgtaatttcttgtcctagctctgcgactaactagctatatggccattactattccaagggcaacagacctaaatctctctgggtgtcaatatcataatttttgatatgaagacaatcgaggctatagtgcagaaattttggagtcagatagacaagtgtttaaaccttaattctgtcctttatcagctccatgacattggcaaattaccaataagatctcaaaacactagtttcttctgcaaaatgtggataataattgtccccttcccttattctttccttctttctttccttctttctttctttcctttctttcttcctttctttctttctttctttctttctttctttctttctctctctctctttcttactattttttttttttttgagacagggtcttgctctgttgtgcaggctggaatggagttggcaccatcttggctcactgcaacctctgcttctcagattcaagtgattctcctgcctcagcctcccgagcagctgagatgctgagattacaggcatgcaccaccatgcccagctaattttggtatttttagtagagatagggtttcaccctgttggccaggctggtctcgaactcctgacctcaagttatccacctgcctcggcctcccaaagtgctgggattacaggcgtgaggtgctaggattacaccagcacccagccccctttcccttattcctgttatgattattaaatgagatgggctagtatattaagctcttagcgaagtgcctggcacgtagtaaacaattcatgcatagtaccgattatttttggtgttactgtttttaaaataatttttgccatatttagtcaatgtagactgctttgaaagcttatagatttatcacatgcaaatgattaaatgtgatttctgtgtctccttcataacccttggctgtcaggtccttgggcagatatgtaaatccctgctcttgaatcgatccgacattaaaggcgatggggattagataattttcacttaaagtgactgtcctctttttctgggaacctgtcacaagcgggagttctgcctcgtatatcaaaaaggaattctagaaggtgatttcatttttgctttcattttgttcttcaaggaaagggagttaaatattaattaagaagtctaatccagtaaatatagagatgcaaccatcccagactcacagagttgatgataaaaggagctgtgaaagggatcaaagccaataataagccaggatgagcagagcgaggagcgagcgagagatgtgggatcaaaatatgcaagaagcccaactgcaggctgtagtgcagagcgcctttaactacagcagaacgctgcagcatcactcattctgaacacaagttatcaaacatttattgaatatctactacatgctgagaactagaaatacaaagataaatttcacaaaatccctgcccccaagtaattcacatcctcagaagaaagtcctaaatggtgacaggaggtggcatagcacaataattaagcacatttctttggaatgagactgtctgggtgtaaagctcagttttgtcacttcctagcttttgggatgtggaaacgacttcatctctctgagtagagttttctgcactggtatgatggaagaaccaagtcatgactttattgtgaagagtaaattagtaaaatatttgaaatgggctcaatgtagtatctactacctggtataggcaacattttacatagtatgccatgattaaaggttgcacaaagaagttaatatttgggcctggctttgagctagaagaacattgttcttgtaaagaaacagaatagatcacatcttaagctgagaatacaaagatactgtaaattcagagctcttacatggtatgatcgggaaataaagaaatagtggagtgagagagaaattgaaagtgagaaaggaaaatactagaaagttaatcctgagccagctcttggaaaatgtagaattgcatagcaaagtattttgactttaccatggaagcaaatgtgggtcaccgaaggttattaacaaaggagtggattgattaaatttgcatttagaaaaattattctaaatgtggaatctacactgagagaagcaggacttgaaccagaaggaggaattagaatgccaagagttgataatggtcccatttgggcaatgagagtgatgggaaggagtgaggtggaggagggaagtttcagaggcaacttgacagggattagcaactggtccaagtgggtagagacaggttcatagagagagggaggattctagagtgggttttaaggactacaagtaggatgactaggttagagtatagtcaataaatgagatggagggtaggaggagaacatctgactgggaaacaggaagtttggttttgaaaaatatgaagtatatattttcttgggcttctgatgaggatgtggaaataggcacttggaaatgtttttatggaaataatcagaacgtgaatctggaaattaagataagaaaaccatcacccatagattataaatggggctacatcaggggatgagatgactggcagagggaatataaaggtaccagggccaaggacacgaccctagaaatgctcccttttaggggacaatccaaggaaggtgagtcagtggaagagatggagaaaggatactcagagaatagaagggtgaatctatcctcttcttggcagaagggactattaagtagagcaaggtcaaccatgccataagccacaaaatatttaattaggatgaagaatgagaaaatgcctttggatttgacactggtaacatctgatggaatattctaaagtgaggtccttgtaggtgcttgattaaaatgcctaacaaaggctgggcgtggtggctcatgcctgcaatcctagcgttttgggaggctgaggcagaaggattgcttgagcccaggaggttgaggctgcagtaaactgtgattttgccactgcactccagctcggggtgacagagtgacactctgtctcttaaaaaataaagaaatttttacaaaacctaacaaagaggagggtataaaaaataaaagctgagcgaacactacgtcctgtacatatgtagagatcttgcattttctgtactaatgcctcatatacagtagacaatcgaacggtgtctgtcccatgctgtacatatgttgaagttttcaacttcactcctttgcctaaggagtgatgctaactgacaattttcatcatattctgtccaggaggaccttgatccagggcaaggatgcttatggacaggagctgatgcttggaattcctcaaattataattctaaaaattgtgtttgttgagaatcatgagcagccagtaagattctcataatttatatagcatttgaggattattattgaacaagaagtctttaaatttttaaaaggacaaagtgtaaaatgttctgaataaaaggctaacacacttagcttaaaaatgtagtgcctctgcaagcttaaaccgtgaattttaatcaaagccactgccctctttgagggagttactcagaagttgcatcagattgttgatgataaataggcttcagcgattcatttaaataatatttttaaatctaagaaaacccctattttccagctttaggtatggaaataaattatcctattagaacactgacattctaaattttgagaaatagcataaaactcacggacgaaatcagtttgtattattgttggatagttagggttgttttcagttgtaactttctcttgtctttgtcatttccctaagtgacagaggagaaaggaaggtggataaaaacagaacttatagaggatatattctccttcccaccccatgtcacctccccaaccaacaaatgcatatttaatggcccttccctcctttactttgattatttaatcatcatatagtgctacagcttttttaacagtccctttaaaataagagaatattgtcagtaccattttttaaaataagagaagcagttggttttgaattgagacagacctgaatttgaatcccatctcttctaagtaaaagctgggtggtcagctgattttttaatctttctgagattctccttggtcaccagttaaatgacaaaagagaatataaatatccattttaaaaggttgttgtgggattatataagctaatgtattatatgagcactgcatcttccttgggttctattctcaaccaggaggtaaaatcataatcataggtagaaacatttacccctgacaaatcccttaaactggctctaaatttgagaatgcatgggttcatgcatgcagtcctattcagtgagaagtatgtatgaaggtttaatgcttataataatacacagaacataatgatgtgaacatgtatcaagtatggatatatttagagttttgagaaacacatatggtaagcaagagttagaaggaaatgacatgtctgacttatgaagagattaatgtctcccatccttcattttggctgaagtgtagattctctctttctccttctcccatcccctaacatgagggaattttccagtgcacatagaatggacatcatgatacaccaaaggcatgccacagttcctagcacataataaatggtaaatagccattcgtatttttaatgtcttttattctcctatagaagggattttcaaacgaaaactgctctgtagcttaacaagggtttaaagagacttcagagccagcagcatcagaacaatgagacatgcagccttgttgcctaattcactcttgggtgaccagtcttaaatgatgcaatgtgaaatcatttcaattaattttggtctgtctctgtagtcttctgagggccttataaaagaagtatatgcttaaagctaatacacaggaaggcctgaaagctccaaactgtgcagcttttggtggatttgaggtaaaccctttatgaggaacaagagagaatggatttgcttatggttatagtttctctctctaaagatttaccagcttagaaaatatgtatatatgcacatatgtgagtgtgtgtgtgtaagtgtgtgtgatagttattattttttttaagcaaaacaaaatttccttaattcatccctgatattgagagaataatactaatacatttgggccatttgtgacttctttctcaaaaatgctttttgggatgccaaaccaagctgaaatgtctgccacccttgatttttggtagtaaaaaaaaaacagtttgaagtagcctgaagacgaaacataaatcaatgttattcatagcttacttatgctatgctaatatatttgccataggcaagaagtactcctaactaataaacttactttaaatcattagttgaaatgtctggatattccttctaatgatttccccagcttagttttgtcaatgcttcgcaggtcttcatgccttctacctgaacgtatgggtcatggtagatagacagaacaaaaaacttttataacattttaaaaactgggattagaagatcctaaaaccttgtctgagtgctctgctgttgatttctcagaggagtaaaatatacgtggcaacttcttcagaaagaacatattaaagttgaagtataaggatttttagatcaaaaggataatgattttttaaaatctttactatgtgataaattattctgaaggcattataaagatgtacaagcttgcaccagggaataacacagaaagttggtggtgactttgaaattagtatagacataacactaacctccttccttccttggccaagtttctttatagcatgatgccacaactgttttttttttttttaagtaattttttcttatcaccaaaagattttctttttcttctttaagtgatatacacaagaacggctgcatgttttaaaacatgtggaacatgataggctcacctattttccctctatttaaaataatggtttcatagagaattgtaaattatttctcctcttaactttcatgaagaaaatgacacttatattttaaaccaatttaactctcaagatgtgccatctgtgcctctcctcttgtctctaggccaagagagtgttattaagcttgaggatgggtagaagagaagagtggcagagagaggcactggaggtgtttgagagaggcatgaggggagatgaaaggcccgtgcaattggggaatttcctggtgcatttccctgagaaaaaaactaatgatggtgatttggggttatgaaaaatgactgaccgtccatcagcataggataagatcagaagattcttcataacgctagatacaggactcctgaaggcaaataatatgattgactatcacatgggtctcatgcaaggagagttcatacgagttaaaaggataaaagccctggtgtagcccactggggagagataaacctttgaaggaagcccttttaaccacattcatcagtaaggccataagggacttccttggaagtttatcacaattgcttttgcatgaaactgtatttttcaccatggtctccaatgaagataaacccagtgctgctcatatcattgaaatctacagtggagatctacaatgaccctctccatgcgtgttggtcatctctttctgcttcttcatgccctgctcatgtttcttcatgttcctcctgcgacttattttttgtaacagcatgattaagacataattcacataacgtgcaattcactcacttaaaatacaaaattcaatggtttctagtatatcacaggcttgtgcaaccttcagcacaatcaattttagagtatttttatcaccccaggaagaaattcagaactcttagcagtcattcccattcccctccacaactgccagtcctaagcagcatccatcaatctactttgtgaccatagatttgcctattttagacatttcatgtcaatagaatcatgcaatatgtagtattttctgactggagtctttcatttagcatgatgttcttgaaattaatccgtgccacagaatgtgtcagttctttattcctttttgttgacaaataatattccattgtatgaatatagcatgtttattttttttcattcatcagttgatggatatttgtgttgttttccttatgggctgtttctttgattttttttcttcttggcatcgtgtatgatttccgaatagcatggtgcaaaataggccttgaagtttcctgcatctgggtgcaaactccagttctgctgctgataagcaatggggctctggtcaagttatgtgacttttgtgatcctttatttctcattttgcataaatggacagcccacagggtactgctcatattgccccttggcccaatgtgaggatataataactattgaacatttttttcatttattgaatgagtaatcacataatatgagccttcccaaggagctcttatatattgtttataaaggtaatctgggtaatgccgggctcttacactctattttaaatcaagcaagtgaaggcttcagagacatctcttcgtattgacagtgtgctctgcaaaagattcagcaaagctccatgagaactgtttctgttcatctcttcctaactcagcctcaccctgtaattttaggacataagccccacagacttttaccttagatatagtgcaattcaaacacacacacacaaacacacacacacacacacacacacacacacgcacacagagatgccaaccattcctgagaaggaacttgcagaatcttccatttcatagcattatctgttgagacagaaataatgtgattgatttgccaggtcatccaggatttcaaaaacccccaaactaagccattttacattttagatccaaagtgttgtttatcataggctgttaagactttctcattttaatttcaaccagagaagaatacattgaatataaacagggcctcttagagcagtcagagagcatactgagagtttctctagtaatagagtcaaaaatagtgactaaccaagtctttaagtagaaatgctacccctaaataaatgcttctaaatgagatggcaaaaacgaatagactcttgtttaattaaaggtacttgtaaagtttgcttagagtttgcagtaatccaccttgtcagttctcatccgggatgtttaatgatgggtttgctttagtttccaaatggaaatcagctgctgcttctttacagcctgacattaggcaccctgtggaaattgtattattctccacatgcatattcatagaattaagtattatcaatggacttaaagagctcaattattttttgcaattgcatgcttagttgcttattctgaagtagagtagattgagtatttcggggcctggtcaaatccttgaaatataaatgtgaatgtatatcagcagaaaatcaccagctttactttatcagttggattgttaagacaattgccaacaatattatcccttgatttatagttcacaaaatgtcttctgttataatgagcatagtttttttcctcacagaactctgtgaacaaaaaagcattctacagatgaggaaactgattgtcatccaagaagaatctcttatctaagattgtataagtactgaagcaagattaaaatctagacattcctgacttctagttctttattgcattttctgcatcctattgcttccctggggaaggtcttatttctgtatgtttggaaatacctacttactttagatttttattttagcttgtgtatgtgtcatggtggtgtcattttaattaccaggccactgaaccacatggacatttggtaatagacagaatgctgcatttccagatgctagagttagtgtaattcttgattaataatttaatagaaaataaggtgtttgtttacaatgttaactaaacattcaaggaaaacacacagcagcaattgagatgagaaaacacagaatgcaaacaggaaaacaaaagaaatgaggatggattaattctacatgcagttgaaatataccacctgctttgcccttgcttttgggacattcaagttcatctctctttctccagtatcattgtcattgtgttagattattactgtggtttgtagagctatagggactttgtgagcagtgatctcaaactcaaatatctataagaaccagactaaaaatataaataactgggtatatgctggttatagatacctgtatctatgttctgcaagtgatggcatctttagcaaactagaacataggtactagttaaaggagctgagctgtgttcccagctggttgttgctctcttggaattagtacagaatttcccagatcttgtaattttccaagtaagtccagatatcaatatattttttaacactgtgaagtctcttactacctgaattaattaaatctaatgaaaaagaatcttttgtagaaaaaaaaatggccagatgtggtggctcatgcccgtaatcccagcactttgggaggctgaggcgggcagatcacctgaggtcaggagttcaagactagcctggccaacatggtgaaatcccatctctactaaaaatacaaaaattagctggtgtggtggcacacacctgtaatctcagctactctggaggctgaggcaggagaattgcttgaatgtgggaggtggaggttgcagtgagcagagatcatgccagtgtactccagcctgggcagcagactgagactctgtctcaacaataaccacaacaaaaaaccacaaactggcagaaattggcctacaggccatttatttccaacttcactcaaatggaccttcctcctagaaaggaaaaccatcctcatttaatattaagggactaaaaatgaaaagaggtgtcagtatatacattctgatcacatccgtacttggaagttcatacaatgaattcatcaaactctcattcttcttctggggaaatatctaaactccattgcatttccttattccactgtggcccattgtggattgtgtgttatatttgaatatatcaaatctagcaaattgacattgaaaaccaaacatatcagagacaaactatagaaacacaatagagaaaataaatccacctctgccaaagtatgatctttccaatcatttcaactcctaaaagtagaaggaagcttggaactggaggtgttaaggagtttgcttggaaaaagcaatgaaataaatattgctgtctttcaagaatatatatgtctaactcacctcagggtttggacctgggtgttgaatgaactgaggatctctttggcaagaagctctagtagatgacaaattcttactcttgttgtattgctcaaagaatgccccctacttcttgatagcatttctgaggtgccagagcttcaggtgataaatgacatttttattcttgacatgttactctttattatatcattgagaaataaagttcaataagtgacttctgataatactttactgcggtctttatgaaagatcgattccattaagtaggtacatttcagttgctattacttcaagtgatgccataatgtacttgaaattcagtctttagttaataatagcaagcttattgagtgtattagagatgtgctaaagtacttacttttgggcctggtatcagccaagacatagtattttagacttgcaggctttccatgtatttcccccaaaatcttatacatatatatatataatttaatatgtatctatagtgtatatatatgtctaatatatatatgacagagtatcttacatatggcatagcattttattatatatgtcatggtgttttagacctgtatgctttccatgtattttctcccaaatctaatatatatatatatatatacacacacacacatacaatttttgaaatgcaaatatgtgtgcaatcattttttagggtattatcatttaatatactaaggtaacctcattgattaaaacttgaaatatgactttactcgaagtcacttgggaaatatattgatggtcatgctattcataaaaatgaactcaagtctacctgtctagaaactgagcaatgtcacttgaaaagaatacagcagtaagaataagaaactaaaccaattatagtttttacaaataattattcttatgatcaggagtaatagttgtgtgcagtgaaaaagggtgtaatattaactaaagactagagtttgatttctctcagcttttagcactcaagaaaatgtgatgagaatgtctgggctaagcaggatggataaactttaacaaaaaagttgtaaaaacagtacaaggaactttcatatcctgaaggggcaattttaaaagtaattgtgaaattttaataacatagggaagtactcattcatctattgttaagttaataagcagcctaaaaattggcttacacattatagaaccaattaagctttaaaaaaacaaagagaaactcacacagaaaggagactggaagcatgtgctcaaaaatattaacagcggcatgcatacataataggattatagatgattttatttgtgtttttcatttttctgatttgttaaataataaaaaattcctgtatgcaaagaaagcatgtttaagtaaaagtatattgtattggtagtgttaaatgtgcttgtgccatttttattcaggtaggggtgtgtgtgtttgtgtgtgtgtgtttctgcacattgataatagcaaaataccagttgtatcagtgatccatgatgaaattgttaacactgatgatgctatttcactgtggaattttcttgtgatgttgagaatcttctttgttagtttttttagaagtaaaagcttatcataaggaaagtatcaaaaaattaggatttgaaatttgtaattaatattaatttaataactcaactaaacaaattacaaattttaggatttcattatgatgtagcttcattgctttagcatgaatttctctctaccatcagaaaataaacttcttacctgtccagtatggagcatgtagacaattttgtggccagcatgaaatttttacagtgatgataccagcaaacacctccaagatataatgtcagatctggttaatcagtatgttaaaatatgtttgaatttgtcttgattagaaaaatagcaatcaaagcattcaactcttttcacttgttgagacagatggcctatctttatgaaggcaaatatccaaaaacaacaacccactaccttatctttcaaaatatggtgctcagaatcatcttggaaaagagctatttaagcctaataagccatatgcttgatgaattgatttattccattttgtagtatagacataaaaatcttctttgcagcatctttatcatatctgcattctctgcaactcatttataaaaattagcaaaacttccaaataaggaataaattattatagagaattcagcttctgtgtcttacaaaagaaaaaaaaaaatgtgtctaagtgaacagtctctgatttgccagatattctccccataaagttctgtgtatttgaagagcaaataaactgacagcttccttggtatgcataaagcaggtctaaaattattccagaaagaatccctcagagaaatgcaacttccctgtcattcttatgtattatttaaggtagagattgaccatgggcatagaagaaatatacaatgtttctgggtcctaaaagaagagagttcatatactttttaattttatgtattttaagatatatgtcagtgcattgtatttagcatggaaaagaatgtcctatcaaaataagcagctactcctgcatgtagtttagtggcaaacccacctattaacctctagccacaaccaaataaccccacacttgaaacctgaggttgattagatgaacctttgttccccataaaattctttaaaattatacatttcattaaaagaggaacatatttggtcaacttagaaacacattgttgtgcaatagaagagcatggctttgttattagatggagatgcattctaaatcggaatccaccatttgcttaactgggaactgctgggtacattatataaactccctgaggctgagagaggataggaaactgtgatgaggtaaaaaatcaaaactaaattttaaaagtaaagtatacttgacttttgcatgggatattatacttacataaatgtggctatttctgatcatctgaggtactggatttccaattattagatcaattacaaattcctttgcccaataaacacataatatttgagaaagtctttctttccactttaattgtgaagcataaacaaaagtgtaacctttgtggagtacgctgagtctttaactgaaagagatggcgtatcattgttagaagagagaccaagaagttggtctaaattatcagtctccaaaggctatgatatttgttacccaagttgtgtctgtgtttgtgtgtgcatgtgtatatgtaggtgagagtgtgtgtgtgtgtgtgtgtgtgtgtgtgtgtgtgtatgtatgtgagagagagagagataatgaggaccaatttaagacttagcttaaaatatctctacaggattccaggagattggatgaagtttaagttatgaagtaatctaggaaacattaataactctctctgttggtctgcaaaatcatgttattaaaactcaaaccatttggcaagaatcatcatcaatgtatcgaatgcacctgaaacaatcacgagttaacttttccatctttcaattatcatattcatgtctaaatacatttgtgttgactgactgctgatcaaactacatgtgtgcggaaaaggacaaaagatagaaatgtgaatgttggaaaaatacttactacttaaatgcaagtattttgataaaaaacattatcagtgagctcaccaaggaaatgttatctgggtgctggattggtaaagaaatatctagctatcaaattgggtacagtgggatttaagggttcacctggaagctctatcaaaagtttgcttaactctagcagaccaccaggatccctctggttccagtgggcttttagaatctccaaagctcttagacttgaaccacatttcgtttttggaaacagactcagaaagaaagaggaacaggagcagctaggaagtgtttttagtaatggttcagaaagtggggtcccaggagcagcagcattatagcctgaggagaaaagagagggacttgttagatatggaaattcttcggccccactccagaccacctgaatcagaaactagggttagcaggccgggcaaggtggctcacacctgtaatcccaatactttgggaggctaaggtgggtagattacctgaggtcaggagtttgagaccagccatctttcagtaagaaacatgattactggaggatgtggtataccacctaggtttgtgtgcaactttttttgccgtgataagattatctattactcaatcttagaagtagcaaaagaaattatggaatgctttttaaggcatacttcttccttgaatcagtaatcaaggaaaaactatggcagggaaaatagaaaggttaggcaatttgtatttcccaatggtttgaaaaaacagtggctgttgcatttctgctaaaggctgctaaatccaaattgatgaaacttttggcccagccttgcagaattccctttgaaatgttttgtcatgtctgtcagtttagtcatagtttaagatgttacatgtttaacttagggagatgagtgcagagtctgaaaatatgtcatcgaaagcaaaaaaaaaaaaaagtgacttcaatttatgacaaaaatacagcagagggactgaattggaatcttcagagagcatgagtatttgagcccctgccaaatgttaatccctttcaatggaaagaaggattagaaatgtacattggccctatatcttcatttaattcaggactactagttatctagaaacatttttgttattgtgtctaatttcgcactatttttggcatcattttcaaaaacctttaccctggtttatttatttattttttggctctgatcatcagtattaattcaattctatttgttttctacataattaaattgttctatgtgagcatcaatctattacagtgttacaagttagttcattgtttcaaggaggtaatgttagtatatctctgaaataacatgtaggtctctgattgagtaatgaaatacgatgtattcaatttcttctctctatttaacctacctggaaccatgtttgtcagactaactcaccacagagtgagcatggataaacttgtatgaggtcaaagcccataccactgaggatactaatataaaagattaccaatttgtgacaccttgctattgcattattatccatgcttacgaggctggttgcagtgagatgtctaatttgaattttctgaaccatgcctttaaggctcacatacctgaggtatttatccaaacacattgtaggtttacctccctcaaatatccagccatccatccgtttccttctgagcagagcaataaaaatcaagccagaccctatgctttacgtatagaaccagtaagatttacagccaggctgagtataaaatcataaaactttcagtacgtggttaatatataaccatcaaaataacagagtgcaattctaaatttatgaggctgaacttaacactgaatatcaaataagaatcacattgatctctgtagcggatgacttaaaaacacattaggtggcataaactgcaagacagtacattgatttaagcataaaatgcatagcgctcaatactttaccacctaacgtttctcagtaatgaacaaagctgttgtatattgatgaaaggaaaattatttgttttgttatattacagtgctcacagagatgccttgtatttaggctaggcaaacatggtttgaatcacatttagcaaagggtcacattggatggacattttactgaatttatacttgtttctcaaaataactgtacagaagcattatcacgatgacagttttctcattttctcttttaacagaggaaagattcataccaggtagatacggactttttgtagaaatacactttactgtaagttttctgataaaggcaattacatggaattttaaggttgatctctctaagtgcatgaaatgatcttgtaaaattaccatattcagaaaatctaaaagcatattttaaaaagaaacaataattttatggtaaatacatattttataaaaatctttactgtagaaggatctttaaaaaattgattggaatgaggaatattaggaaatgttaatagctacaggtgtgtccatgtaatatagatagcaaaatggataaaattggttctgatatggggtgaaaaacaaaagctaacactcggcaagtgatttagggtgatttatggcgtgatttatggaggtagtaggggccctggttcgctagagagagagcacccacttctcagcttcctctatctgattgttgtgtctgggtgtatgaaaatatcagatcttgggatctgcaataaaagtgagacatacagatttatctgtgaagtctcctgattttaaaacactaacagatgatttaaatgggaaataagaggtactgatcaaatgtaacctatcttaggtcgatttccagcactcacactgctggttaaagatcactcatcttcaggcttctgggaacgttgcttcatccagaggagcaagagttatcctttctgttggtggaaaaaataatcagtggaagaatccgatattcaaattttcataatttgcttgggaaatatcaccttggtacatcagttaatattttactaaatgagctgtgttgtattataagtttccatcaggcgggtggtagcttcaagactttggtgagaaaagctcctttgcaagttggttctctttcctcacaagtatccacaggtaaagaattttgccaggactcagagaacagcattcactcactgaagtgttaatggcaaagcaaatctaggtgcaaagttggctgacaggtccgccacaggaagatttctgtctatcaccatttcaactgtaggataggtaagtcccttttcatgaaacagtgctgggaggaaattgtatcattctttccaataagtgactctttaaatgaaaaaaaactactacagctttaactttacattcaaataaatgatatatgcatatttgtagcatgtattttacctgttgtacactttctagcattatgttttcaggctagttttccttcataataaattaacttattactcttcatgacatgcaagatggactgtgatgttaaagaataatgttttctaattatcattgacatttgcagagaagattaaaatttaataaaattaattgtccattcttgaatggcttactttgcagttaatcatagaactctgatttctcttactcttatgaaaacttctgaatttcctgtgtcttattaatatccatagtaaacccagcacttagaaagtaagttagattttttccttctgttgacattgttgaagcaaaaaaaaaagtactgattttgaaaaaattctatggttgaagtttttcaactgaaacctttaccagtaatctcacccatcttattaggaaaacctaacttctggaggttatgttgaatggtgaggaatgtatcctcttcgccgtggtacatctctagtaatataatttgaagtgctagggccccttgcatccatttctgaatctattattagttgattaaattagctggctggatcagtacagtgagaagagacgcagtaatgatattatagaattagtatgctatgatgaattgtcaggagaagtaattgtgacagccctgtggccatatgcacttagccatgcaatttatagtcatttggagagccaaggacttttcagtttgggttaggaaatttgctcctgcttttgacatagtttgagggatatgtgtgtaagagtgaagggggtgcttagcagcgattcaggaagaaatcaaaagtctcacttcttagccattggcatttggatgattttcagggaataagccagtgtgtggatgcctttattgtaacagtgccaattcctttaaatagatttatatgatagtgccgttactttatggttgctgaagataacgttactttgggtaagataaaagtaaatgcaatctggtatcacaatttcccttgttatggaacactgtaaattctcatccatgtactgcatttacagcaatcctgaaaacattgctggggttgttttgatttaaatacatacggggctcctaattgcaagtagtttttaagcaacttaaaatataacgttactttttgtttgtttgttttgcaactatttgcaagataaacggactgtcaggtgcctctaaaaggcttatgatgacagcagttggcaatgcaaatattggcacgacaccacattagggcaaatttattgcagaattaccaaaacatgtataactgtgaagtcacctcagtacaactattatatgagaattactctcttgctgtttttgtttttgtttttgtttttgttttgttttttcattttatgactaccaggctacagtaatattcagtagtacaatgaacatgcttactgacattctaactccaaaccagattcatgcagaaaactactcctttttcttttagctgtctatagatattttctgtgtataatcgatcgcttttatttctcaaacaggattttcatttgattacagatgattgtttcgagatcattcaaatcaatcaaatgatgtttgattacatagattgtttcgtttttcttttcttctcttgtcattgttttatccattgttaactcaatgtcaatatttcaaagataatctataatcaaatattgtcttaggatcttattttatgtcttagccccttctccatgtccctaatcttaatcacccagaattacacatttagaaacacttcttcagtaattctgtagttgcacatttcactttgaaggtaatagaagggtgtctgtcacttcttcatttctgtgtccttccagctcactagcactcttatctgggagttatttttgactctcctccttcaccttccaagtctaatttaacaccaacacttgctgattccttcccagcacagtccatccctggcccctgccatcattctatactggagtgcagtgctcccctcttagtccatctctctgccatctcttcccagaccagtagaacctatatatactgaattgccagatggatctcttaaatttttattatagcccctcatatttcctccatgtgacatgaggccttttgcttattcttattccagcctacagaacttatgtgctttttctctcctctatcttaccctttccctagcacacatagatggctaactataattgtaatttataaatttttgtgccaggtactgtgctaagtgctttccatacattatctagtttaagcatcatggcattcctacgtggtaagtggtgtgattccctttttatagtcaaagaaacagaggtgtgaaacaacttgcccaccaaagtgaaggtgtaagaggaagagccagggcccaaaagtaggtctgtctgactttgtagtgaaaccatcaactaccgtgcagcactggcaccctggctacacgtggttgtgttgctgtttccctggtgtggatttgcattcaatattcatctttttgataatttgtgttcctcctcccctttgtgtacatttggagactgaccccacctttcattttgcattttcatatttgttttactgcattaatttgcattgaataatgtgtcactaagtatttgtgcttgtacacgtacatcctcacctagaccacaatcaaattaaactgctttggagagctgggcacggtggctcacgcctgtaatcccagcactttgggaggccaaggtgggtggatcacctgaggtcaggagttcgagaacagcctgaccaacatgatgaaaccccatctctaataaaaatacaaaattagcagggtgtggtggcacatgcctgtaatcccagctacttgggaggctgaggcgggagaattgcttgaaccccggaggtggaggttgaggtgagccgagattgtgccattgcaacaagagtgaaactgtctcaaaaaaaaaaaaaaaatattgctttggagaaacgtatagaatcaaaatattttccattcttcaatacaatactttggacttacagtccctaatgaaggtggacattcaacttactaattgttcctctttgtcagggtgactttgttgctatattatattttaatattttcatttggtaaattgcaggaaaattagattgtcttctatgaagcttgagaaaagctaagttttgcaaacaagctcctgaccatacagcagtagccagaacaatgaacaggacatgaacaataaagaatctgtgaccaacaggaagatatggagatttgcatacttttaaaaccttatgtgattaatattagattcaatctttacatttctttttacaacattttgttccataaaaaatgtcaagcgtgtgtttgctgggaagaggaagagttcattattcttatggttttcttcattatattttgaaaagccaaggatggggaaatcaacattggtaaaagcaattagtgatgtgggttgaggtgcgggaattacatcctatcccttggcatcaagaataaataccaattattatcatatatagaagtgtgcctgtgtcgcttaaaaaattatgattgcttcaagatagtttaaacattatcatctaataaaagcatattgagaaattagataatttgactaaagtatataactatactaagcaacctaaacttaaaattatgtatatatttacatatacgtttcatatcataaaatacaacatactatatgtatatacacacacacatgaaaacttagatgtgtatgtagatagatagatagatagatagatagataattatttaaatatgttggtaggccaggtaaggtggctcatgcctgtaattccagcactttgggaggctgagatgggcagatcgcttgaggtcagaagttcaagaccagcctggccaacgtggtgaaaccccacctctactaaaaatacaaaaattagatgggcatggtggctcatgcctgtaatccctgctacttgggaggctgaggcaggagaatggctgagcctgggaggtggaggttgcagtgagctgagatggtgccaccgcactccagcctgagtgaaagagtgagacgtcgtctcaaagtaaataaataaatatagatagatagataattgggcagatgggtatttagaacgacaaaatttcatcagcatcttttcccgtttcacttaagcttctgaaaagcccttcttggtcagaatgactgaaacaaagtgatggccttttcaaagttacataatatattttcagcacatcccctgactaacactatgaaaagtgcatccattctagagtcagacaggcctaagttacaattctggatttactcatcactttctgtatgtttttaaatgagttatgcaacttctcttcagtaaaccaagaataaatatacttatgatatgaagttaagattatccgaaaagggaaaactcagccctcatttgaactaaaatcagcttaaaaggcaaattgtaagtaacaagaggggacttccaatagtgagcaagttctaccaatatagtaagcattcctggattttgcagcagcagagagcatgattggaacatttcaatgagaatttatttggcataaagggagttagaattaagttgaacttcgaagtaagtgtaataattaaaataataaacgaaaagaaggcaaaaggaaaagatgtaggtatagagttttatactttgcaaaaggtcaccaaaattcctggtgaccagttgcttaataggaatagggaagccagatgcaggagtagtttgcaacttggaaagcacgtgtccgtgaaaagtggagagcttattgttaccctgtgtgaaggaaattgtaggctatgagaccttttaatttttctagactatcttaaaatccagttctcaaaaacaatctgatttttaaatgatgtcaaattattcaagctttctgggaccaaataaactatgtggactccgggatggtggcctctctactgtactgtgaatgaggacatgtatagctggtaataagtatgatggcaagtggagtggagtgggctttacacccttctcagcaggggagccctggaagttctatgacctcacctcctaccagtattcttctcactcactcactcacttccagccatgcggtctttgaataagccaatcccatttccaatttagggagttttgcactaagtattcttcctgcctgaaatgttctgcctcaggtatcttcatgtctaatgttgtctccttcaagttcagatgtcaccttctcaataaggcccaccctgaccattgtgtaaacttgcaactgccttcccatccctgttttatcatgatacctcgtctttttccgacagcaccatcattctctactatagaatttactcccctatcacaatttcttcttattatcaccctgtccctactggaatattagttccagagtggcaggaatctttgttttgcttactaatatacctagaactaagcctgatatgttgcacacactcaaaatatttgttgcataaagaaatgagtgaaggaaggaattaattcaattgttatttaaagaccatagtaaaaacgtggacacatacttttgaagcacaagactaaactaaattaattggagacaagaggactttaacatttaggattggaggcaccagcatagtaagaattgggaaaggcttataaaattgtaaaggtgttttgaggtcgtggttaaacagtaatacgtctatgctaaaactttaagagtatttgctaattaactaacctcatatggaacaaaacccccacattgttgatatctcaaaagaaatattagtctgacttaggccactgatccatgctactcagtgttgtttttctgacaatagcaataaaggtaattatatttgaatattaatggttgttttgcaaagcattgttctgatagagtagtcacttatattgaaattaacatttccagtgtacacacgttaaccttgtcctcagtcaacagctaacttaaattaagtgcctattagagctccatttaactagagatcagaccagcctcggcatgggtgttgtccctgaggtgtttaaagagagccaagcttctgctcaacaggtggccctcctctttgaacttctagtgagagctccagtgaatatgtggagatacgttcaatgggcattgtaatgtggcaggacagagtgtggacgttggcgactaataaactggatttaagatggctcttccacgtccattagctctgtggactcctagatagttcacaataaacctcagcatccttacctataaaatagacaataggaacatctactacataagattcttgtgaatataacatgagctagtatatacaaaattccttatcacactattttgttggtagtattctgttttttgtttgtttgttttgagatggagtctccctctgtcgcccaggctggagtacagtgccatgatcttggctcactgcaacctctgtctcccaggttcaagcaattctctgcctcagcctcccaagtagctggaattacaggtgtctgccaccacacccagctaatatttgtatttttagtagagacggagtttcaccatcttggccaggctggtcttgaactcctgaccttgtgatccacctgcctcaacctctcaaagtgctgggattacaggcgtgagccaccattcccggccggtagtattcttaagaatgttttgtctaccctctccattaataggatatatttatgacttttacaagtaaacgtcgtatttgtttggcacttgcaatagtggtgattagttcgacaaatagcacaattattctgcttcagtaggatgtaacctcatatcttaaccaaaatataatgtggctagcaattttacaatgttcaaaatacttcagaaatccacaatgtgcagttcaacataataatttctcattttctccaatcagcatcccaggagatctagttattcatgcagatcaacacgtccatgatttaagccgtgagcttttaggaacttcactggcccaaagctaataggtgaaaagatatatacctaacattttaagggattttcaactcttgatgtcttattttgcaaaagagctttgcagcaataatttatcaggcagcctctctgtccacattggagtattctctagaatgattcttatgtttattttacatttcccttccctgcaagaagacaactccaggtaaggagaattgtgagttaataagatgcatgccactgatagcaacagtctatttgatgtctatttccaaaagaaaaatgcaaagtggagtgtgtaatcccttaacgtaagatacctccatgaatcccaatgcctccacgtgaatcctgatgccagagctgcaaggagcatacactgtcagggtacagaaaatgaagacctctctgcttgaaagtttaaatgccctgctcagcaggaagtctagaaagatttgttcaactgaaatgagcttataatcaggctttcatccaaagataaggaaagacaacatccagtagttttatgatgcactcttaccaggaaaacacaaatagttttgtccatgttgtgcagcgttgactcctgtatagcatatttcaaactgcaatcatgaaaatgttccatttccgactaagaagaaaaagtcacccatgaaacttgacaccgtaccttcattttttttttagcaatgaacaaaaaatacacattgttagtgtcacccattctattttttcattttctttttatgatttagaggtgttcctaagacttgcaattatttaaataaaattattgtagcatttttaggggtcattggtacatttactcagcaaagttagctgcctgaaagacagattaactgctaatcagtgcttaatgagggctttgccacgccatgtttgagcacttgtcagtataagaatatcgattagtaaagccaccttttggacttattgttggtaaactgggttgatttctgaggtggataaaatgcatggctagatattctgtccactgtgctgttggcaggctgttgtttatcacaaggttttagtgttcttaatgaactgttaataagctgtcaattatagtgtttatgcaaattagggaaagagacattgaaggattgatgtgcctagcattaaaaatgccttcttgatacgttataaagtaaataattccccttttaataattgtccttaaacatttgctcttctttgccactgaagcattcccacgttgggcaccctggaaaacaatagtccaggacttctttaagcattatactgagaaaacaagacacatctatctctaggatgtactttgctttatgttagcaattctggaatcattttcattcaccctcggccgtaagtgaagttcaatatcaagtgttctgaaattcatgggtagctattctatgattctcatgtggggcatccatttttgcctttcttcccactggagaccatcgaccatggcgaagcaacctcctcaaccccttaaatgtcctgcgctaatggtagctgtcccaagtcccatgtgctttgtagtgcctcagattatctctttagtacaaatcctttgtgtggttataaattgtcaactgaaactatttcttttaaaaatctgcttctctgcctctgtcccggcagaaatacctgtctttggccagaaaatccattaattttctattctgggtttttgtttttttatttcatatgcccttgaatgtgttgacctaacatgccccacctgacgtccttcaaggacctatacaattgtcttgttctctcagtcattcttccggccccgtttacccaggcagaataaatcagttcctttctgcagcagccccagagtactttaaatgagttagatatattccagcaccccccacccctattctgcacacacacacattcagaaattgtgagctctttcagggcttggcctgctatttattcatcttcagaaatcatgtcattcaatgttagaaaatagctacctcaagacactctggaagaaattctgctcagatttccattttataataaaactaaggttattaaatggttcccaatatttaaaaggataataattttgccgcaatctcgtcacttttatttttaattgttgtgatcagaattctatccagatagttattatgggagaacaattcctgaagaatgcttaacctctcaatacaattaaagtagacatcttttaaaggctcttaatattccccccagaaatgtaaaattacatcttgttttgtattgtggaagtcatgttttgattatatgaaattggtattttacgtgaaaaaaaaaatcttctgttcagcttggagcatgaaggtttgtgcagttgttagcacattacttattccaaaatcattgaaaatattattcttgcaggtttggggttttttctaacctcattcgctcagctctgggagttataatgtttcataaaggaagtatcataatctacagcaaaaatcatgcatccatatcagttgaaatgatggattaagctgttttattataagtatatcacaaatgcaataaatatttgccaatgaaatgcagttatcataaggttttgcacagtgcaatttcatgttaatgtccaagtagaatatagatggctttatatgtttggttatagtacctgctttgcagtttgaaaaatttatttgtaagtgttgaaaatataaatatgagagttcaaagtatctatgagttatttctaaataccacttaactcctcccaaggcagatgaggatagtataaaactgcaattctcgtgactgataaatcaaatgaaataatccaataaactggaagaaaaattgtgaattggtcttctgagaggcaagagagcatgctggtaagagcttggactccgaggtcaacaagtatcttgaccttctggcaccttcgtttgtaagtgtggagataacacccagctcctaggatggccttggagattaaatgagtttgggataacaaatagcactcagtgagggcttactatgtgccaggtactatccaaatgcaaatttcaatttctaaattttaatctctctctttaatcaaacatacagcttttgatatttgatatgcattcttgtattttcctcttaggtgcttttcagttatcttcctgagaatttgtgcattttatgtagaaataagataaaatacacaagatataatatcctactggtccttaattccacagcttaataactgtatgaacatgggaaattacttaatctctctgcgtctcagtttcttcaactataaaataacaatgctgctgctgctgctgctgctgatgatgatgatgatggtgaagatgatgacacctatttcatggggctgttgtgaaaattgagatgatccctgttaagtatttagcagagtgcctgacagtgagtgctcaatcacttattattattgctggtaatactgtcgttagcattacttttgctgttattaatgtagtgtgatttatttttaaattagggtcaattgaaggaactgggaatattttgtgagtaagggtttttatgtatatcacattcgttcttctcataacctgccaccctcctcatttttgttactgggaatgaaatcgacttcaaaataaacctaagaacccggactcccttggatctgacactgaccccagacgccaagccacagaggagtatgctgcagtcattctctctttgaaattctaattaaaaatacattttaaaagttttttaaatgcatgtttttcttgaattctgatatgagccatgcaatataaaatggcactgtaacatctcttcaaatatgcgcacttctattcacaatagtattttaaaaagtaatcttacaaaagttttatttaaaaataccttgccaggtgtggtagtgcatgtctgtagtcccagctgttcaggaggctacccctcttgggtttgttttctctaaaataaacctgtccttaattgtcaagacaccgttcatgtttctttcctctttctttaattcttacaggggtgggaagattgcttgagcccaagtgtttgagaccaacctgggcaacatagtgacaccttgcctttacaaaaaaaaaaaaaaaaaaaattctagatttaagcattttggtaatgcttccatttcactgcttctttcttaactgttttggtgtgattgcgatccattttgtagttcactaatttggtatttaactgaactgatctgtcagatctatcaaaacatgggctgttgatacaatttgagctatttcttcatcgtacctgtgtttactttgagagtttatcagcgaatgtttatcaggaatttggaagcctagcagcaaggtgaattctagaagaaaaaaaaatcaacaacatatgctctacatttttttcaatactaaattgatcatctcaaacattattttcactacaaaaacctccatgagtcacataaatagcttgtcctttcaagatcatagaataaaaactacaaggacagatgtgctctagatgtcatttcccagctggggcactgtgagcaacatggcaggggtgaaagaacaacatgtggtcaggatgccttcgtgtgttcagtttttattttcaaagaaaaagtaaaaaaaaggatgaaagaagtggggaaggaagagagggagggagaaagaaagagaaagaaaaagagaaagacaaaacaaccaaaagaaacagaaaggccgggcgcggtggctcacggctgtaataccaacactttgggaggccaaggtcgtggatcacctgaggttgggggttcgagataagcctggccaacagggtgaaaccccatctctactaatgatacaaaaattagctgggcgtggtggtgggcacctgtaatcccagctacttgggaggctgaggcagcagaattgcttgaacccaggaggtggatagtccagtgagccgagatcacaccactgcactctggcctgggtgacaagagtgaaacatctcaggaaaaaaagaaaggaaggaagggaaggaagggaagcaaggggaggaagagaaggaagggaaggaagggagggagggaaggatgggaaggaagggaaggacgggaaggaagggaaggaaggaaggacgggaaggaagggaaggaagggacgggagggaaggaagggaaggaagaaaggacggaaaggaagggaaggaagggacgggagggaaggaagggaaggaaggaaggacgggaaggaagggaaggaagggacgggagggaaggaagggaaggaagaaaggacggaaaggaagggaaggaagggaaggaaggaaggacgggaaggaagggaaggaagggaaggaaggaaggacggaaaggaagggaaggaagggacgggagggaaggaagggaagaaggaaggacggaaaggaagggaaggaagggaaggaaggaaggacggaaaggaagggaaggaagggaaggaaggaaggacgggaaggaagggaaggaaggaaggaaggaaagaaagaaaaagagaaagaagccaacaataataattcctggtttcagtatctggtattctagtgtatttttccattcagattcactaattcagaattttctctattccctcctttttttgtctgttactattaatttatgcaagtcttttactatctcaatttaaaatgagtattttctttctataaaaggcaaaatgctatagatacagagatcatgctgtctcctcaatagatatatgagttttttaaaaaattaattactattatggctacattgaaatgattagtaggaaatgaatctaaattgcttctaaaacaataaagtttaagtgcctcagtaaccctatcctttgaataaatacaaccaaattttagttaggtaaattttgttttgcaaacttctacaggttattgaaattcttaaagactgctattgtgtttttttaaaaataacattttggtcttcaaatacgttactaatcagcagcattcatttatggtatacctaaaacatgctagtaaaactgtaagcttctttcttccttttttattttatatatgctcattcaaatttgactacttcaaagttttgaaattgagaaaaaagaatttgaaatttcacatgtgcctttgcaaaaagtaaaatgattaatttgcctgcaatgcttttacagtgtgtcatactgaaggcttgaaggatgtatttgatcttatcttaaaattgagtggccttgttttagtatataactctgaacaatgaaaaaaaagagcattttctgtatcccaggttgcttttataaatgatatccaccttcaataattgttcaatcgaggccgagctcagtgcatagagacaagaatgtatttcttctctttcttaacagtggtcagggccttacacaaggatgtgttcatgttttgttcctttgggcttcttgaggctcatggtagttcactgagaacatgttccatcactattaaaaataatgtccttcttcatcagtaacatcctaatgtcctttaagtgttaaacccatccctttctgcattcccagaaagtatttttatacacgtgtgtttttttctctctcctggcaaatctataaatggaatttttgaatggaatcctatgatataaatatcttttaaagctttctcatagttttacctgctttgcaatgagccattttctcttcaaaatcaatgcctctcattaagacaacttctggcagggatgaggatctagcatcagtttatagaaaagtggtcatgattttgcctctgggtttgttttaattgttcctctccatgcagcaagctctgtggtttgagtagcagagaattcatttgtaagcttgcctcctatgtttctcaaaagattgttgtgaggactaaattaatccatccaaaattacttactgcacatctcctctgtgccaggccctgctacaggtgctgcagacatccgtgtaaacaagccagtccctgtgttcatggaatgtaatttggaagtagggggagcctgaaaatgaacaagacaaaagcacaagtgaggactgaagaatagaaaataaaatataacttgtggggagagccgtggaggtcatcaggaaggtcagggaaattctctttctctctctctctctcttttttttttttttttttttttgacttagtctcactctgcccaggctggagtgcagtgaagcgaccgcggctcagtgcaacctccgcctcccaggttcaagcgattctcctgcctcagcctcctgagtagctgggattacaggtgtccaccaccatgtccggctaatttttatatttttagtacagacagggtttcaccatgttggccaggctggtctcaaactcctgacctcaggtgatccaccctccttggcctcccaaagtgctgggattacaggaggaaactctcttaaaatacatcatgtaagctgagaggagacttacaaaaaggagatagccacaaggaaacctgggagaagatagcatggccaaatgtcctgagaagaatgaatgtggagtgctggtagaaggaagggaatgagtggctgaggtggagggcagaaaagattagactggtggggagagtacaggggcaaaatcatctaaggctgtgatctctaaggagttttgattttattttaagtggcagagaaaccaacggagaggtttgtctggaagggaataatgtgatatactctacattaaaaaataataattatgtatgtaaaaatctaccaagattgaatcctgactctgccacttacttccctaagcctcagttttgttatctgtaaaatggccatcacgatcaatcaaactcgtacggtagagattaaataaaataatcaacgtaatgtgctttgtccaccataagtattcaacagaaggaggtgttcatttaggtttttcttagaagtccccttggttctccagcctgggccgttcattagtttattttgtgctctcctcctgtcccttaatatctgaaatttttgacaattttctctgagattcctggcatttgggcttccggagatggcggggggtctggtttgctgtctgttaattttagctattctccgctggaagtgccatcacaactagaataaccagagagaatgggaggtggtgcagcctattaagtggccccatggggctgccctagcagcaaaaatcaaaacaaacaaacagaatcccaaaacaggtttgggctttaggggttttgaaaaatggacatttttcccattaataacatatccgttaaactctactgtgacagctctcacaaagtttcttctaataacaacatttctaatccaaaatcattcattctgcctacaaatgtcagagccaaacaatacctagcagataatttggtccacagttttcaagaatacagggagtagaaaatagaaataggtaatctactgctatgtcatatttccaatgtttctatgcaagccaatcactttatggagcctgaaaaattcaagaattttaatgattcgaaatatctagttgaatggctggtaatcttctctcttatttggggaatcccaaagctaaagttgtacataaagaaagaatttaaacctttgaatatagaacaaatgatctacgaatctttattgttagcctagccataatattactatgaaattttcatagtgagggcataacatttagattttaggtcattaagacaattatcaatttctttttatctgaaccattacatatggaagaaaatgatgtaccttatttcattgcttggttaatatcagcctgtgaaagagaaagatattttcagaagagatacaaaatgacttaggttagttcccccatatttaggttgatagcaaagaaggcaggaaaaatatttttagaatgttaaagctgggacaaaagtgtatcgcaagtaatttgggtatcaaggggaaaaacattaaaaatctttgatagaaagtgaagaaaattattttaaaaatgagagtacttcttaacaaccaagattcaggaaaagtttgaatgaaaggaaatttaagacagttgttttgcattacattattatatctctcctttctctttgcctagctaatgttgtctaaaaaatagattgcattcaatcttgaaatatatatgtatacttccctatctacatctatctatatacacaacaacagacatttatcgatttatatatccatgtacatattaatcataacttaggaatgacaagataaacttgtttttcctaccacccagtgttttttaaaaaggcgttctctgttaatacagaataactgcaaataatattttcatgactatgtcatatgaataaaataggaattttaatcatttatgtatttacagtgagaatcattatgaatttatgattttacatttagctcatgattccaaggtgtgatatatatatatacatatatatatacatatatatgtatatatatatgtatatatatatatatatggaagttcaatgctttctgtaaactggaattttaagtgtatatctacacttgagaaaaataatggtcaagataagagaaaaatatatggaagttaaattctaatgcagtaaaaacccccctggaaacaaactgttacccctggtcaattactcacttgccaccatagatttttaggagagattcgcaatatgggaaagcacagtgagtggtttacctccataaaacagctcatcatcaacgtgaactcgtatttaaatctgaattaccagcatctgaatttttcagcatgaggcagcaaaagattgaaaagcagtgttttctgatattgctctaaattatgatttccatagatataacctttatcatttcttctccataccggaaaaataaaaaccggttaaggtaaccccactgcattcttttcttctgcttgttgtacacttcacagtcacagagtgaatcagctttgctaaacgcattcattagtgcccaatttgtttctcttcatctctttgaagaaatcttgcaagctgttggaacgcttattttattttgattccacagtggaaaattgtattcacataagtaagcatataccaaacagcaataaatcattatttctcagatgaccaatatcagcaggaatctcatatacttctctgctggagttgatttccaaattcattgaataattattggtgctgcttttcataagtgaaaaacattttttcctttctattccagttaacttttaaatgctacctttctccctcatttccaccgcacatctgagaattatttgtaaaggagggaaaaagtcaaactttgtattcagcaaatgtcaaggtggttagatggaatataacccttgacaactgccccaccagccctgaaatttagacgttcatagtatgtactttggtcaaagattgaatatcatgttagactgttgataaatgaaataaatacacgttattgctttaatgttttaaggaaaatctgagaatttattagagtgctttaaaatgcaacatttagactagtaaatttctgttttcttttgctctgccaaaagacaacaatttattgttgtttcacttcccaaagtattaattggattttggtaataaatattgaatttttttttttagtaacagacacatgcatttctgtattttttccttaacaaagtttattaacagcaggtaatctgtatactttgacctgaaaatgaatttataaaatatctgttggtgtcaagtccattttaatacagattaaatatcgtggccatgttctacaaagtgtgagttctctactcagtatatttttaatggcttctgtacacactgtattatgttaggtgttgttataaggaaacaaccaaaaaagattttaaaattaatttcagaacttagacttgagaagggtaacagtatcaggtggagattaagactaatatgtagattctttctgtttatgctgttactctttcaaagattattttcccctcttatgctttttattgctgttcttgatttttttgagctactaattgttagctaagttaaagcaatttaaaggatatatatttctaaattggtttttttctttgagttaaaacctgaacatagctaatacttgagcataaagtaatgtgacatttgtactattggtatcgtcctatcaagtatatagtctttctattaatctccacattgatcttttcctcctaaagtgaaaatatggtataaatatttacataattcaaaaaataatgataaactctaagaaacattttcgtgtaaaacatcattgttcacattatgatcttatctttttatgaggaaagcctcctaatctttaaattgatatatttacaaaaagcacaatatagttcagatctttgaaccatccagggtaagtcaatatgatatttttaataaaacggtatagatgtaactacaaaattatcaatgtaacatatctttgtattatcttgtgttgagatcctttagcttctacaaaaaaatttaatatgaaaatgagttttaattagcataataaacagcttacatttcagatatcctactacatcttaatataactcttattaaataagtatatattggaatcatattaattcattcagataattagggctgggcgcagtggctcacgcctgtaataccagcactttgggaggccgagatgggcaaatcatgaggtcaggagttcgagaccagcctggccaacatggagaaactccatctctactaaaaatacaaaaaattagctggatatggtggcaggtgcccgtactactcaggaggctgaggtaggagaatcgattgaacccgggaggcagaggttgcagtgagctgagatgtgctgctgcgctccagcctgggcaacagtgaaagactctatctcaaaaaaaaaaaaaaaaaaaaaaaaaagacaaataatttaataatataggaaaacatttttaaactagacaagacaaaatttttaatgtttattctcaaaatactcaaccaaattgttttcaaaataagtattttatatttcagatgtaatctcaaaaaatgaatttttattcaattatggagcttctgaacttcatacattcatttaaaaatcattaaaaatgattaagaagtccacaacacaatactctgtcttgtctgaattttatgtggatttagtataatgaaaactttagaagtatatgacaggacattaaattcatgactccatattaataaagtagctaaggcttaaaatattagaatatacagccataatatattattatttatggacagcatctattctcatgcaaagaaaatacacacgtagttcaaattctgtgagtttctttgaccttatggaaaagaagaaaattatagattcagatgtagattagttattgagttgaatatgtcaaattacccaactaccttcttgttcagaaattaacaaaatagcagatagaaccacttgactggagataacttatctagtagttgatgccaacgtagtggcaatatatatagcattccaatctagattttctatacctcatttatggatcacctgtttattttcttaagcaattctccaataagcagagtcattttctattgtacatcttatcagtagtttcatgggggggaaaggaataatgtaatcagagagatctggagaatactgtgtagtcaatgccttagatactgatatgatttagctgtgtccccacccaagtctcatcttgaactgtaactcccacaattcccacatgttgtaggaggaacctggtgggatgtgtttgaattatgggggcaagtctttcctacgctgttatcgtgatattgaatgagtctcacaagatctgatggtttaacaaggagaaacccgttttgcttgactctcattctctctattgcctgctgcgatgtaagatgtgcctttcaccttctgccatgattgtgagggctccccagcagtgtggaactgtgaatctaattaaacctctttcttttgtaaattacccactctgggggtatgtttttatcagcagcatgaaaatgaactaatacagaaaattggtaccagtagagtggggagctgctgaaaagatacctgaaaatatggaagcaactttggaactgggtaacaggcagaggctggaacagtttggagggttcagaagaagataaaaaaatgtgggaaagtttgggactccctagagacttgttgaatggctttgaccaaaatgctgataatgatatggacaataaaatccaggctgaggtggtctcagatggggatgaggaacttgttgggaagtggagcaaaggtgactcttgttatatttcagcaaagagattagcagcattttgcccctgccctagagatctgtggaactttgaacttgagagagatgagtcaggatacctggtagaagaaatttctttttctttttttttcttttttttttttttttttttgagacagagttttgctgtgtctcccaggctggagtgcagtggcaccatcttggctcactgtaacctctgcctgcctgggttcaagcgattctcctgcctcagcctcccgagtagctggggttacagttgcccaccaccacacccggctaatttttgtatttttagtagagacagggtttcaccgtgttggccaggctggtcttgcctcagcctcctgagtagctgggattacaggtgcctaccaccacacccagctaatttttgtatttttagtagagacaggattttcccacgttggccaggctggtctcgaactcctgacctcaagtgttccccccacctcagcctcccaaaattctgggattacaggtgtgaaccactggccagaagaaatttctaagcagcaaagcattcaagaggtaatttgggtgctgttaaaggtattcagtttcaaaagggagacagcaaaaaagtttggaaaatttgcagcctaataatgcgatagaaaagaaaatctcattttctgagaagaaattcaagctggctgctgaaatttgtataagtaacgaggagcctaatgttaatctccaaggcaacggggaaagtgtctccagggcatgtcagaggtcttcaaagcagcctgtcccatcacagacccagaggactaggagaaaatggtttcatggactgggcccagggttcccgtgctgtgtgtagtctagggacttggtgccctgtgtcccacccactgcagccatgactaaaaggggccaaggtgcatacagctcgggctcttccttcggagggtgaaagccttaagccttggcatcttccacgtggtgttgagcctgcaggtgcacagaagtcaagaattgaggtttgggaacctccgcctacatttcagaagatgtatggaaatgcctggatgcctagggaaaagtttgctgcaggggcgagccctcacggagaacctctgctagggcagtgtagaagggatatatggggttggagccccctcacagagtccctactggggcaccgcctagtgcagctgtgagaagagggccaccatcctccagaccccagaatggtagatccaccgacagcttgtactgtgtgcctggaaaagccagacactcaacaccagcccgtgagagcagccaggaggggggctataccctacaaagccacaggggtggagctgcccaagaccatgggaacccacctcttgcatcagcatgacctggatgcgagacttggaatcaaaggagatcattttggagctttaagatttgactgccctgccagatttcggacttgcataaggcccgtagccccttggttttggccaatgtcttccatttggaatggctgtatttatcgaatgcctgtacccccattgtatctaagaagtaactaacttgcttttgattttacatgctcataggcagaagggacttgcctcatctcagatgagactttggacttgtggacttttgagttaatgctgaaatgagttaagattttgggggactgttgggaagacatgattggttttggaatgtgaggacatgaaatttgggagtggccaggggctgaagatatggtttggctgtgtccccacccaaatctcatatggaattgtaactcccacaattcccccatgtcataggtagaacccggtgggaggtcattgaattacggctgcgggtctttcctgccctgttcttgtgatagtgaatgagtctcacgagatctgatgatttgaaaaggacaaacccatttctcttgattctcattctctcttgcctgctgtgatgtaagacatgcctttcaccttcagccatgattgtgaggcctccgcagccacgtggaactgggagtcgaattaaacctctttcttttgtaaattacctaatcttggatatcgttattagcagcatgaaaaccaactaatacagatacattgaagttctcagagttccaacagagaacacatctctttaacacagtgtctcccaaaatataatttaataatcattacttattaataatccacagaataatgcagtgtttgagattcctccatataaaatatagtctactatgaactatctgataatccaggttaatttgtaatctgctttcaatccatctttccgactttagtttcaccaggaagtctatactccatccaaaatgaactatgtacttttttccgcaaggatccaaaaagtgttcctctgatgtgcctttttttgcttatgttttcttcctctttatggaatgcctatcgcctctccctttttacttttccatgttcaaaaccaaaagtgcatgtaggcacttcacagacatatacacaaaacagtttacttacaaaatggtgttcttctaggtgttcagctttgcaatcaacatactaaatggagcttgaacaggctggagtgcagtggcgccatctcggctcactgcaagctctgcctcctgagttcacggtattctcctgcctcagcctcccaagtagctgggactacaggtgactgccaccacgcctggctaatttttttctttgtattttttagtagagacggggtttcacgctgttagccaggatggtctcgatctcctgacctcgtgattcgtccgccttggcctcccaaagtgctgggattataggcatgagccaccgcatctggcctgaacaaacatttttaatggtgtccgtgcaaagtgtatctaagtagtaatcatgtcaggtactgctatgaggaaaacaggtaagcgaagttttttgtttgatagtttgctttttgagacggaccttcgctcttgtcacccagactggagtgcaatggcacgatctcagctcactgcaacctccgcctccggagttcaagcacttctcctgcctcagcctcccgagtagctgggatgacaggcgcccaccaccacgctcggctagttttttgtatttttagtagaaacgcgtttcactatgttagccaggctagtctcaaactcctgacctcaggtgatccacccgcctcagcctctcaaagtgctgggattacaggcatgagccgccgcaccgggccgccaagtttttacacatatgccatgtgagagagttggtattgagtttttcaaaggaggcagaggtgatcaggttagttttaatggagagggtagggcctacatcatatcttgatgaaataatgtaggctgataactttttgcatatatgattagaagctttaaagtcattggacactgctctggatgggcagacttggaaaggagatggtttgctctgcagagatgctcaaccttttttggcttagatacatgaatggcgggttgcttcctaatacgtgatttgatgattgaacaactgttaagggcaccaaattcagtggtgtaaacatctcaaatcgaatcctgcctttgctcattgttacttaaccttcctaggctagtgtcttcctctgacaactagaataacaatgccaatatcttaaagtcaaagcatgaattaataatacactgcatgtattcatgcatggaccctaggatatatgcagtgtattattaattcatgcatgaatataatacactgcatataataataatgaattaacatgcacgaataatacaatgcacataataatacactttacataatagattggcatgtagtaactttctatatgtggatactgttatttacattatccttcttcatctgtttgctactcctcctctcagacaaagccaggaagaattctatggcattttatccatattcaccactttgaaagtcatgaagcattcttaacaacctatatattttatgaaaagaataaaattataaatcactaccgtggccacattttaaaagatataatattttatctatattgcattattgccaattcaaatttagttatataataaaggaattatataatttaaactgttgaccatctcttgtagctggaaaaatgtcctgttttacatggtagccctaacctttcccagattaccacagtctgatgttttcagacataattcatttgcagtaaatagattttatttttaaaatggtctatccagccctttatatgttataaccagatccagttttaatgagataactatagataatagggtcatattttcatgtctcttaaataatatattgagatcattctacttataacaatgtaatgaaaataaatgtttttttgttattgaatagaatttccataatacaatgagtttcctgagataaaagcttcaatgctaagtgaaatgtagaactaggacaatgatcctaatggagagatggctaatagtgttcatccaatgtgccaacttcagcccattggaaatggcttcctggatccccgcattgaaaaggattatgaagcataatctaggcttggaaacaaaatgtgtcacattggttattaatataggagctgaaaatgagggtcttctgtacatatcatttctgttcaaatgaaacatatatataatgtccataataactagagcatgaaaacaaagaagaaactagaatattttctattcaatattgtggtaaatattggacatcctgaaaataaaaaggcactatgtaatatgaatcctgggcaacctttgatccttcttttaattttcttttccttatgtcttctatcttcccagtctccccccatcctctcttctctttccttcttctgctctgtttctgggtctctttctctttcttttctcctttttccttccttcttctaactttttgtgcatctacagtgtgcttggatactaagccaggagcccaagtaagtcaacagtctgtggcagattagaaaggcagcgcagcactgtttggttgtatccaatcggtcatttgtaattagtcctgatcacatagaggactccagctggcttttcctgaccagcatatggatgttccaaactgctatttgctaacctcctccccaacttcccagcaagctaatgacccaggaggcagccatttcccaccccactcctagaggtaatggagagcaggctgcgttgaaaatgcctgcatgctcagccatgcatagaatctttctaggactgctctcattcatggagagttaattgtcctttgggtttcctaggtattaatctaatgtctacctgaatattaactcttttttcaagcccagctaaaggcaccttttgccataatactgagcatatgctaaaagtaatctttatataccagtttgaagggaggcaaagtgatattccaaggaaatttagcattaaccactggctgttacccatctctacattagccaaagctgataattttgtatcgtttggattccctcaattcttcatttttcaagtaaaattgctctataacgctattgataaatgtttttggaagtcactcatcaaatatcttgcatactttatcagcgtgtgcttcattaaatgtaatttgggtttattcaactgtttttctgcttttctatcagctgaaacccagaaatcctcttttatcatattcaatggggaaaatcaattgcaaagtaattttgcttcctatttcatctgcagataagttgctgttgctgatatgtagtcctgtggtatggtcttaaccctttctcttggatggaaatgagaggaagaaaaattacctcccgctttcatacgtatgttgatgaagggctgaagaagtctttctctacttcataataattttatttttctccttttggaaatgagtttatgtgcttctcttgcgatgatgggtaaggcagtgtagaatatcttctcttggaaggatgtgcaactatagagaagggtcacagctggagcatcccttgctgagtttgcctagaatctggtgtcttctttgccacctacttggcatgtgttcttgggtaaaccccctaagctttctgggcctcgggtttttgctttaaaaatttgtttatgccaaagaaaagaagagaaattttaaaaagaaaagaaaagaaatgcattcttctttttaaaattaggatgttgttgaactattttctccaccatgaaatcttgcatttgaaaacccaggccccttcctcccctttcaatgggaaattattttaataaatttttatcattctttgactcttttttcattcagtgatattttctgagatctgttcttatcatgttgacacataactagatttgattacttttaactgtttctagcattacattacataaatgaatattttattcaaccagttactattcatactattatttgcaatatgtctttattatacaaaatgctgtgataaacattcttgcacatgtgtgtgagtgggctctctaaacccataactagaaatggattctagattatagaacagtttttaatgtttatatatattgcccaattcccttctaagtagtaatatcactcaagttcccaccagcagcctaggaaatgtccatttcccatgatcttaccaacacttgatattgttgataggaaagttgaacttttcttgccaattttatcagaaaaaaaaaatccttttaactagtatttcttatttccatttttatttaaatatataaagtggggaaattaacttttctaataaaaataatgaaaattgattttaaaaagagcttaaaatttattagagatttaagagttctctgaagcatttttcagaaatagcattgtttgcctgtgtcatggaattattcattcagtaggttaaaaaattgcataatatggtcaaattttcagtgagagctctcactcctaacatccttagtgcaaggggtctgctatttatgtgaccgttcctgttgaatttatcatgggtcagttatgaaaacacaggaaccctgctccaattattcagaagtcattgacttggagttgctcaatttgcttatacaggaaagagttgttaaacattatcctttctgggctaaaaatgaagttgcagtgtgtacagaagtttgccaatgcacaaaaggtcacactgattgatgggctttgaaaattggccatttatgtcaagaaggagatgatgataaggtttattattctgtgaaagtcttccaagtggtgaggacatgtcaatagcacaactttttctccttttgctttatcctttgaaataatgagtcatgaaaccagagagttggcatgcagtatggccggcttcctcatgcacttcataatgctgatctagtagtggttggcaaattagtgctcgggtaccaaatccagcttcaagcctgtttttgtagataaagttttattagaacaaattaagaaaatcccattcgtttatgtattgtctatgctttcttgtcccacaaagacagagttgaaaagttctaacagaccatctgatgctaaacttagaatttttactctctggccctttgcagaaaagggttactgatccctggtggaacctgccgtagacttcatttgaaagtttgattgttaatagctatgtgaattctgtgcttttattaccttgaaacatttaaagaacttttagtaattctcttagcagatggattataattgttggaagcttataatgaaattctaagtttataaaatatttttgtttgtcctaaaagaggtgaggataatagtataagtacttctgaaatatgttttgcctcacagtaaacattaatttaaaccatgtattttgtttcctatgttttctaatttattattaaaataatgtcacctttaacttgaaaacaggggacttattttacacagtaactctttaacttttaaaattaaaaaagacagttaaattatggtttatggatttttgtagtgtttaatttaatggtaagaaatctgtcttatgattacgcaaaacatctgtttttttatcccagtaagttaattcattaagttcaaaaagtcttacttaaaatagccctaaaatattagcatattcattggcacataaatgtttaataattatattttatatttccttaatttgtagtgactattattatggtggtagataagtaagatagtctccagagattctactgattcaagaaaatactacgagcctcatattttaatagcatgtctttgtcataaagaagaaccaccatcaaagtcttgagaaacacaatattaactttcttttatatttctacacttccaatatccagtagatatgtctcaaagtcatacacatttgcttatgcacacatgcacacatacacatacacacacacacacacacacacaatccttaattctgccatgacaaaaattacattggtgactttcacatgtaacaaatgaacaagctgttaactaagaaaattcagacatttggggacaactaaaagtcagtataaaactaatgaattgctggaaggcaaatcagaaattactgttggcaaatatctaaaataagaacagaaataatcacacctgaaacaaactcaagttgaaagatgcatccctacttatacttcacgtagagaaagaacctatagaagtaggttactgatcctacaatgaataaaaccagattcctcttccaaaacttgttgcaattcaccaattcattagtttttactatattgtttgtagtaattttatgctagtaagagtttatgctgaaccaggaatatgatgggaatctgtgtcttttctaatctgtagcctacgtacctggcactgggtaaaagctcagtaaacttttgcaataaatgagcattggggcaagtattaaaacagattattatactgaaaatacgattctaggaaacggcccccaagcaagtgtgatcaaactcagtacagacactttattatacacattttctcatcacttacacatcaaagtgatcacaggttctaagtctgtgagcctgttttcccatttggaagaataagtacaataatgttacctatttgctagggttgatttgagcattaagagttattatatattaagcacttagaaaagcctggtatgtagcaaatagctcaatattacctgcttgtaatagtagtagcacttgtagtggtagtagtattgatagtagtagtatccaaaagcatcttttgatatccctacatttccccatttaatgtgtaaataaataataccaatattagcaaatgcattgtctagagcattcatcatcagagataagtgtaagccaatcatgtttgttcattccgaagatacttactatatgtcaggcttattataaaccatatgattatatatatatatatatatatatatagagagagagagagagagagagagagagagagagtgtcaggtgttgtcttgttgttgggcaggtagattggagatgagtaaagctcttgtcctgcccttgatgtgcatgcagcccaggaagggaaacattatgtaagcaagtaatttcaaagccgcatagcaattttatccaatgcaaagttatagactatgagaagtcagcagcaaataactaaaaattgttttaaatggaacttgtacatacattttatcctcccaataaccctacaatatcagtctcacctatgagaaagctaaaaggttgagtcacaaccctagaatatcctataggcagtgtaaaaaaggcaggattgaaccaggtcttaagagtccacagcctgtggttttccagcccctctgccattgcttgtctgggagatggaaagttttggctgggacatccctcactcaatggtgtaactgcccaaaccgtccctggtctggacgccacaaatggagcagaaagagaaagggagagaagccatttcattgtaggactcttgaccacagtctgttcagtctggcctggtttcttcttggtgcttatgtacgtgctaattgccatggctaaatggtgtcattgtggataataatgctgtgatgaaatgtttaatctcccctagggtttggtggacattttcagctgctgatctagtgataagctgggcaatgggagggaagctactccacttcaaaaattatcttcttgtttccgggtaatcacttgttggcaaatatattaaataaagactgatatttaaataaaagtgctttgaactgggataaaatatttatacacagtttgaatttagtgttttgtcaaaggtttttctcctcctggactctgaaaggcgagtgaacactgaaagactgtctctctcatctctcacctattgatgagatccatccagaccaggctgaaaaatcttgtgatcagtgcatgtaagcattccctcctggtcctctacctctaaagcctggaagagatctacacatacaaatagtggcccagcaccccattttctctgtttggcattgattaaatcactccttcatctagtttggaaagtttatcatctaaagctgtatccacacatttcttgggccagttacactgttaatttcttataccattctaatatgtgacttggaactgatccgttgctgtgtataagaagtccagaaaactaccttcactttgttttattcttagtttgcctgaactgttacccataacattttatccccaacatattttgttatgaataccttcaaacatgcaataaagttgtaaaagttatggagtaaacctatcaacttttttggggggggggatttgtacccatgtgatgtctaacttttgtgacttagctagtgtcttaattttttactcaccccatctcagtttttgaaacacgcacacacacacacacacacacacacacacacacagacatacatacagatactttctaggtattagttatgggttgagtatcctttatttgaaatgcttggagccggaagtttttcagattttttataatttttagattttagaatatttgtataataccagttgaacatctcaaatccaaaaatccaaaactcgaaatgctccaaatgagggttcctttgagcatcatgtggtgcttaagaagttttggaattggaagcatttcacattggggttttcagatttggaatgttccaaactgtataacaaatgactgagtgtgtggaatttatattgtactatacctggatctaaagcttctgtgtgcctctaggttagcctcagagcctccctcagcctcaatttctatcctatgaaatacagatagcaaatcccattctaaagattattgtttgaattaaataaagcaacatgtgctaagaatctggcacaaaccctggccctagccctggcacttaataaatagtagctgttttaaattattactatatgatgtgtacttggttatttaaatatgttaaaagtacatttaaattattctacattaatgtgtattaaaatagtttggacctgggttttgttcgtttgtttctctttgcttgtttggtttttcttttccgtagagaatttaacaattttacttgatccttgaagaactactgagttgttacaactttgacttgggtgaggatctcttacgtgaggctcagccagtaaagttttatttccagtaaaaggggccaaggagtgctttgcaaacctgaagagtaacacctgaccccattcataccacatggaactgcttccccctggaaattctgggctttctcccaaatgcttcatttgaaggtgaatgccttgtgaaaaatgccacatatgtgcctctctctctactaaacagttaatgtagaataccagaaaagatcccctgcccatgctgtctttcttaatgaatggtgacaatgcactaatttaagtacaattggcccagcatctctcattgtgacagaggcgtttccaccgaggaaagtggcaagggtactctgagattgtgggcttgtccagggctgagtttgatttatgaaatgagacctaggagcctggattgaacagattggcttgcaagagacagctgtactggaggagctgctgccaggtatgggtagtggaaatagagaaaaatgaacagtgggataaaaattcctttcccagtccctacttatcaacatgaaacatctgcttcagctacagtggttcccagtggcagtcagaattattgatatggcaaaatcgctgcttatatgcagcacaatggcatgtccccccacccctactggctgcattgtaataattcattactgtaccagtgcgaccaaagacaccatggatgtgaaaggggagttagtgccagggcaattgtgcaaatggtgagggtggtggaagaaagttttcaccacgagcaataaatttctgcctgctgttctattttattgtggctcgacacagtgattatactggttggaaaataagcaataagcgtctgtctgtctccagttgtttttaatattcttgtttaatgggagaacatagcttttatttaaactaaacataacggatgcattttaagatttggatcggtttttgaaaaaaaagtatcttgctatctcgtatgttaggtaagcatatgctgctataaataggaaaacaaatatgcttagttcagctttttgttagataaaatttgattagggatgtgcaaaagctgatgctgtcagccaacacatagcaccaggaagcaatacatactatgttagaatgaaaattaaatgcatttattaccagggaaactggttttgcaggaacgtaccgagaaagtttacatgctcaaataaataggaactcgaattccttaatttcagtaatatcactttataatgcatgctggtaaacttgtgtatgagtttccatggtggctgaaggatgattagaaaaagatttgctaagccaagttcttgtggttcttaacctattctaagaagcggggcaatgcaaaaatataaaggaaaaacaagagcccacacctgtaaagatactttactttcatatgtgtccttactgtttttaacctataaaggaattttagttgtgccttcttatctctgtgataaggcatttatttgtttctaaatgttgacagtaaaaaaaaaaaattggtatgcaaaaatagaaacttttaaattaattttccaaataaaattgtaatgtggccaatttagatgtaaaagctaaagcttgtaggcaagtgtgatatttccttgctgcttttcctgcggtacttagcactagtccttgggatgaaaaaaatattgtttgatgtttcagacaacaatgaaatgaagcattggcaaattaataagcagatcttacctgacagcctggtcactgaagaggttaacacactccagtgctgacaacatgataatgaggatttatggtgagcaggaggtgaaggtgggtgggatgcttccaggctcccatgtgcggtggctccagccccctgcagacataacgcctcaacaagagtgaaggttaccttctggactgtaacaatggctgagctatgtttgtggcagagtgtgcataccctaaagatatgcagatagatagatagatagatagatagatagatagatagatagatagatagatagatagataaagacagtttttaaaataattgtagtcttttatagtttggtgctttctaatttcacatgtatactgagtgaaaacagaattttataatgaaaagaaaagaaatggggccaggtgcagtggctcatgcctgtaatcccagcactttgggaggccaaggtgggtggatcacctaaggccaggagttcaagaccagtctcaccaatacagtgaagccctgtctctactaaaaatacaaaaatgagccatgcatagtggcgcgtacctttaatcccagctactcaggaggctgaggcaggagaatcgcttgaacctgcgaggcggaggttgcagtgagctgagatcccgccattgcactccagcctgggcaaccagggtgaaactctgactcaaagaaaaaagaaaaaaggaaatgaagcattccctttgttgaatataaggtatacagttggtgggtggatggatgaatgcgtggctagatggatggatggatggatgatgggaaattagtttacataacttttaaatatctttatattctttcccctgtctactgttctaattttaaatattatctctcttcttttttctctctatttaaaaactacttttattttcctcaaaaaatgcatgctcattttttgttcaagggtcttggtacctgctttcccctatgactggaacattgttccctggattttcataagacatgttttgatagcccttgagtagacagttcaaagtctcttccacaatgtcagtatcccttaacacatgcagtcatatttcccttattgtttattatttccagaacatatttgtttgtctgttaatgacctctctccttctagaatataagccccataagaacaacgactttgtctaatttctcgttatttcacttgcaccaagaactgtatctcttatttgatgctcagtaaatatttcttgaattcatggtgggtatatatagaaagtaaaactctataagcttattctttgacttttttatatatgtctaccttatatttgaggtccatggatggttctaagttagttaatatttaaaaataatgaatggagggaggattagaaaaaaaagcaagtataatacttctagggccccaaatgatctcagctcacaaggaagcctcaggtttaaatcagcatgtatgttctcaactttcccctcattctcagtcagcattagctcagtttagttttcatgactttcactctgtgctacattagataccttactgggtggtatgacttattagtcaaaagctaaggatgtttctctgtgggatattactattaatatcacatcatatttcactgttctgactctttaatgtgttgatatccgttgttaatatgatattttgcaagactgtacagtctcttatttttttatcataaaaatcattatttcaaaaattgttataactgttacctttgtattacaaaatgaatcactaaactgtttcgtaaaatgtatttccacttctgtacaggatgtccattaaataatgaagatgtacttggtaacagaagtatttatctgcacactctaaattcaagctagttctgttttccctgaggaggcaagttggtgtgccgtttctcatatttaagcgacgatatcttgaccccaagattgtcagagcctccccacaggactccgccatgagattactcagaaggagcctgtaatgagccctctgcacacaccacatggtttcaattacagttttatatgactagacagtgtggtgctgggaaggagcgattgaaaacgatgcaaagggtctttgtcttcgtgcttcagttacctgggcctctgctttcagaatgttcttctacttaatattattcagatttatcttatctgggtgaaggaccagtttctgaagttagggattctgtgttgaaataagagaaacagaaaagaatagtccaggccgcattcctaatcttgtcatgctattcccctttagttttcacacttgtccgagacctctgggatgacgttttctatctcaagggtgctttcaggagcagatgccctatagcaactgattttttttttttttcttgagacggagtctcgctctgtcacccaggctggagtgcagtggcgcgacctgggctcactgcaagctccgcctcccgggttcatgccattcttctgcctccgcctcccaagtagctgggactacaggtgcctgccaccacgcccggctaattttttcgtatttttagtagagacagggtttcacagtgttagccagaatggtctcaatctcctgaccttgtgatccaccctcctcggcctcccaaagtgctgggattacaggcatgagccaccgcgtctggcagcaactgattttttaaaaaggtggtggtgagtgaaagtttcctcaaaattgggggagaaaggtgatggagttttctataacttaaaaagaactatatcagagcataaaacattgcctacatagttctttgtagataaataatagtgacttattaaaaaaataaagtttagacttaagaaacgatctaatagaattggaaatattggctcaaatcagctatgtacttgcttctggcttctgagtggggtgacggacaacttatttcaacatttcctgaaaagctgactctttacaaatgtatgtttattgaatgttagagatgagtgtggtcctagactggaaggttccgtgggaggagggtctgttatggctctcttgtcttctctcactagtgcattatacgcaagtcagggatatagttgtcagactcatgagtaaagaaatgcccaactttacctcttctcttatggttgggaacagaagtccagaggaaagatgtgggtttcccagggcgacagccagtttgtggctaagagaagcctagaatccaaggatgccatagttttccattgcatcagtgacaattgttatgtgatgaaagtgcagtgttctgagaattggaaaggagaactgaatgtatgtctttctcaaaatggccttcctgggttactgagaacaagaatgcatggttgtttctagtttaacacctcttttatgacattcaatcagattcactaataacgagctcagattcttattaacacacaccgggaattgaacaatgagaccacttggacacaggaaggggaacatcacacaccgtggcctgttgtggggtagggggagcggggagggatagcattaggagatatacctaatgtaaatgacaagttaatgggtgcagcacaccaacatggcacatgtatacatatgtaacaaacttgcacgttgtacacatgtaccctagaacttaaagtatgatttatatatatatatatatatatatatatatatttaaaaaaaaaaacactggtatggcagctgtagacatgtaaatgaattcctgtagctgagtgggtagttgaatgagaaggtgaagtttttgacagcatgtcagatttccatggatgaagagagagagcacaagaaaagtggggtgagaaatagaaaacagcccagagagagaacctgacaatatattgtaactgcctttggaagcttcagttccttacataactgagtaaaatagaaaataggaacaacaggttaaatacttttttaaatggagtttttaaagctttccagttcatgtagagactcaaaaattctctttctaatgcatttgttttgttgaaatggcccaatttttatctaagaaaacacatcttccaccaatctgtcatctcctctaattgaagaaagaaatggttaagcatgcccagtcactattgtttgagtaaaaaagacttacttgtccctttcccgggataggaagacatcacattgtgaacatctgtgaatctcattatcaaaataaaagacaggaaacttgtgaatgattgtatcatccactggttgtgtgactttggacaaatcatattgcaccttttcttgactcagtttcttcatttttaagaaaagccattaaattagagactttccaaggtttcttttacctcttttgtcctcatttagttcatagtccagggagagaacaggctctagagttcaaatttgtcccaattcaagatcaaaagaatggataatgtagggactaggcccatgaactgtaaattgagccaatgtgtaaacatcaactcagttaaaacatccactcatctcaacattcgattttcttctgtggttattttggcatgcaggaattcagattcattttggaatatttgctaggtgcatcacactctaacaaattactagcatgttttaaagtcttcctgcattcctgtctataatggttttaagctttataattttccatctcttcactacttagggacatgggtaatcaatgaaaatgtgtatttcaagaatacgcatgtcccccagattatagtttatcaaaatcacttttgaatcattccaattgaattttcacttcttgtaaatcatcagtgcccataatcatattatggggtcacaggagatcaccaagaaaggtatattaaaggcatgacagaggagtagcacaatgcccttgaatcattcctcagtaatataagaacagaatttgttcttggaaagctggtgagggtgggaacattttctttcctttccaacaggcatatactgctcattctcaaatctgtattgctgtactagtcaggatgtttactgtttaaaatgagaagaacagcagctcaaatgatcataggcatgaaagggaatttgttggcttatgtaattaagaagatcaaggggtcaatatggatggcttcaggcatggcttaaaacagagttaaaaaaataatggcactagaaataactgtgtgtgtgtgtgtgtgtgtgtgcatgtgcacacgtgtgtatgtgtctgtatttctcatctctgtgtgtgtgcatgcacacccacacatatttatgtgtgtgtctgtatttctttgtgtgtatgtgtgcacatgcatgtgtatgtgtgtgtgtctgtatttctgtctttctctctctcctcgccctgccccatctctttcccatccactcaaccgttggttctattttcctctatattaccttttcttccaggttgacctttctcaggagctttggctaacagttacatcagatctgtattctaccatatttcccacaaaagtccagggactcctacgggcttggtttcagggactattcacctctgaatcactatggctatgatgatccaagcctgagttacatgtccatgatgaaagcctgtgatggagttgtcctctcccaaatgatgttgactaaaccagggcaagggatgcttcttcaaggggaagtgaaatgctgttaccagaaataagggagagagtagtgaaagaatgcatatcctccccaaaaaagagaatttattcttttggcccacagtgttgtgaagcaaatcaatatatgatcaagaattaatccatagattcctttctgatcttaccaatgttcaaatttatctgttcttcctgtcttcatgccatgcttccaagtgttgtgtagactcattaatgtttaattctttattttgagaagcaggaggaattccttcttatatggagtttcttgttcaccgagtgaacactagaacaataaaatacctaaatagtcaaacaacaaatatacagttcatcatttggattttgttctgagctttgaaatgaaaatgcagctcttctttgaaacaggtatctcatgtcaatccaaataaaatatcgaatttcctgaaaaagattgtatgatgaaatgcttcatttctaggagtcattggcctggattatccccttgttgttgatgtatgtgtagttttttttttttttcaaatgtatctcctgggaacattaaaataaaacatttcattatccatcttcttttttattttttttccaagtgatgtctctgccagatagggaatgcatgtaattcactgttgcttttaatttgtcagtacattaattttagttgataaataagttaactgaatatgctgtcccagttatctttgatcattcaagttcatttggctcttgcttttaaaggctattctgtgcctccccaattctccttgggtttatatagcttttaagttgtcattgaccaagagaccgttcaagggtgattatagttttcaagcttgtttgtatgcaacagccacgaccttttttcaaaagacacccagctgctcttagctgcaccttgacctccaacagacatttattacaaatcaatttcatagattgtccatataataatctagagtgtctctggtagcaagatgatgagagggcaccaatttattgtccttatgaggttcaaaagagcaacaaaatcatgaattttgaatgaattttgagaggtcttactaattttttcactttgactatccttaagagggactatcatgctctaaattttagagacaacgtctctaatagattctaccatgaagtctaggtagaaagggatagaggtgttcactcttggttaatgactctaaaaaatctcaaaactggcagtatggaacaggacacatccttggaagagatgacccactgtgtccagttacttatttacactccagtcaataggaaccccaaaccactttgagcattctggggaggaagaggagaacttaatattttacattacttaattttattccataggtagttaatgatctttatgttttattctatagcaggaatttacatgtagttggtatctaataagcactgatgaatcaaattgaacttaatccaacctctaattcttttccaagcaaaaataattatctttactaagtccatttcttgttgctatgaatacacacacacacacacatctggtttttaaatgtactatgcctttattccagaggttttactgtgtattttagtaaaaacatcattttcagacaaaatgtagactagctagaggtaactgtgcttcaaagaatttatccactaggatattaatttccatttcagagtatttctttttacacaagatggatgttctgctttcaatttattagctacataaatgagcttatctatttctaatttcgacttaatataaaaagcatcaaattttagttttcatccatctaattttcattttgtatatttatttgtggtaagctgattttggtttatgccatctgttcatcaggttcaggcagataatattaaaagtatatgttctccaatatgtgaatatccacattcataagtcatgctgcagctccgaaaagcgctgtggttgatttaggctgctctctgggagaatgatgttaccacagctaaatacaagcgtgagaatttctcagtccactctgctgtttccagtcgtggtttgaagcagatggcttcttctcaccggcctttcttaccttagacaaaaatgtaaaaattattttgatggcttctttcctccttagcctcagagccatcttggaacattctctcctctctcctttgatatctctatcagtcccctctaaaatcataagaaagtagaaagcctcagttacattaggaggtgatttagttagtagaccaatcattctaaaacatatggaatcatattgcaaaaccttataagagttagataatttaagttcactgacctgctttttattttattttattttattttattttattttattttattttattttattttattttattttatttttagacagtttcgctcttgttgcccaggctggagtgcaatggcgcaatctcagctcaccgcaacctccacctcccgggttcaagcgattctcctgccttgagtagctcctgcctccctagtagctgggattacatgggtggcatgcgccaccatgcccgggtaattttgtatttttagtagagatggggtttctccatgttggtcaggctggtctcgaactcccaacctcaggtgatctgcccactcggcctcccaaagtgctgggattacaggcatgagctaccacgcccgaccagccttctgcttttaaagtctcttctctgtctccccaaacctatgcaaaatgacaaagtacttcttgaaagaacccactctccagcaactttgaaaacaatctattttataccatacacaccaaaacaatgacaacatttctgttctttttctggtaagtaaataaacatttgcctcagagactttaatctgagttagtgtaacatcccattcctaagtcattgagagagtttttactttccaggaatcttttaagcaaaatatttaccaaacatgcatatgccaataactacaagcattttcaaatgcagtcatttgggaaaaagagaggcagctaaggcaacttgatttttttttaatacgacattttactaattgtcttagacttggtgatatagctagtttttcaggtcagagaagtcagtgttgctcttttggaatggttctttacattcccaaacttttaaattatttaaaaataaacattgttatacacaataaataagaaactaaaactggtaatttttatcatttgtttaaggtcagtcaacattttcagtgccaggcacggtggctcacgcctgtaatcccagcactttgggaggccgagacaggtggatcacctgagatcaggagttcgagaccagcttgggcaacatggtgaaaccctgtctctactaaaaatacaaaaattagctgggtgtggtggcacgtgcctgtgatcccagctactcaggagtctgaggcaagagaatcccttgaacccgggaggcacaggttgcagtgaactgagatcatgcaactgcactccagcctaggcgacaaagcaagactccgtctcaaaaaaacaaaaaaaaaaaaaaaaaaaaaagacatttttggttataatgctgagtgatttcaaaatgtcaaacaagtgaaaaggatttttatggccatatctaagaaagtaaagctgacgtcatgcatagaaaactacatctcaacagaattttattagtagtaaaaacactgataataacaaaatacaacactaacaacatgcttattatttgccagacagttttctaactgctttattatataaacacattttatccttacaacacctctatgaagaaaatactattattatcctcgattcactgatgagaaaaagaagtcacagacagtttaaataactgatccaaagtagcacactgtgggtgaaagctggagccaggatccaaaagcaggcaatctagttccagaatccgtcttcttatctgctatgaaatactgtttgcattaaaaataacaagtgcattcaagttcaagtccaattttctttctttttaattatggtaaaacacataacataaaatctaccatcttaactatttttaggggttcagtagtgttaggtacagtcacattgttgtgccactgtcaccaccatgcatctccaggattctttccatcttgaaaaacaagcccttcacccatcgaacaataactgccctatttcccccttcccataccatctggaaaccattgtctgctttttgtttctatgaatttaactcttcaggtaccttatgtaaagggaatcctacgatatctgttgttttgggtctggtttatttcactgagcatgatgttctcaaggttcatctgggttgtagcacatgccaggatttccttccttttgaaggctgaagaacatcccactgtaggtataaactgcagttagtttcttgattcatctgttactgaacacctgagttgcttctttctacctcttggctactgtgaataatgctgctatgtacatggttgtataaatatctctctcatactctatattcaatcctttggggtatatacccccaaatgggattaccagaccatatgttatcagtgaattgaggataataatatgtttaattttttaaggaatcgtcatactattttccatactgatcataccattttccatacccatcaacagtgcataagcatgccaatatctccacatacacaccaacacctgttattttctttatttaaaattttctttaaagtagccatcccaatgggtgtgcagtgacaaattttcttttgtaatcagccatgtaaactgtaatacacacattgaaaacataaccaatgtgacccataagtaaatttcctaaatatttgcttacttcttatttacagtttgcaaatctctcataaactagataggtcctcagaccattctgcatttccttgtatataaagataaacacacacacacacacacacacacgcacacacacacacaacacacactcaaacgcatatatatatacaaacatcaaataaacttttgtgtcttttatgaaaaatacgacacattgagtggaaggatcatatatttcctcttccatttctaaagcatttcaattttgaaagagcaatagagatacaccctctcacatctgagtttagaatactgaggtccagataggttaagtaattggtcccaagttgaaaatttagttagagccacatctagcctgaaatttttcccaatgcagcagcccatccaatctctaaagcgcatcatccaatgtttgtaatacattatgtttatgatatcttaaatgtatagcattatgtattacattatagatattaataaaatactattggtttaaaaccattttcataccccacatagaattccaatataagccatctcccactatttttccagctataccatttgttttaggtagactggctttaatattttgaattgagatggggattcagcttaaaaactgtgaagggttcttttaaaattttatttgcactgaagatgctgagtgtgaaagacgtaagttcatctctctctaactctccatagttcttaacatagagatgatgaccctgacatgtcactgatatttttagaaataatggcaaaacgtcttttttttttttctcccttctgctgaatataccacagacaaccacagttcattgggctggagagtttcagctgtataactaaaaataaatgcctctgtaaaacaccaacaaagacaatgtcagtttccctaaaccactgaaaaatgtgctttaaaaaatcaactgaatttcagttgggtaaatgtctactccatttgcctccgggctgggcttttaagggactccttttattttaatcccttttgtttttcagatttatcacttaaggattgtatgattggtgcaactcatactattaaaatgaactgcagttgctgatctactcacaaagaaatgaaattgtaaactccactttggtttcaaaccacaaataagcgactaataaattagcacaaggcatcttttgataggaggagagcctaaactgaatgtaatttttagtagtaaaacatgggactcactatagcgccatagtactattttaagcattatgcgtcaatattggttttttgaggttttgttttgatggaaaaggtttaaagttattttgttcatattcatatatactgtggtgtttttaaatattaagatatatagaaacccagaaagttgagctcttttttttttttaactttcttttttagggcacttgaaatttcttcagggatacaattgctcttttcacacatttagaagagaataaaagagagagaataactcttttcctttatagaagccacattataattcattccttgtggtccatgtactagatggcctcaagagacagctccattccaggaggctcttctagcacttagtgcacagcccccaccctgactttgaagactcacagcaaagcctactgaagtcactgttgatggagaatggtctgacactgtgatgccaacgtgctggttacctcccggcagtctttcatagatatttaatgtttataagagatattatactgtcccgaacttgggttatttagcaacatatctacatagatggacactcagtaaagctttataaataaacagtgcccttctcttgcatgtatcttaattctgtcctaagcacaatattctaaaatcagcaaccaaggctctatgtcaaataaataaacatatggcataaaacataagcaaatgcatcactattgtagagtataaatttaactatttctggtaacatgattctaatttatatatattttgtttgcttgtttcacctaaaagttaatattcttgctaattttaggtaactattgcttgttgatcatattagtggtttacagtatatgtgatactaatttaatctcaacagatttgagggattaatggtttgtgagaaacataatggttgtaagatagagatgggaataaatcgcatcactcaaaatcagtgcatcttcaagagacagattgacaatgaagtttaagagccaattgattgatcagttttacatgcacatacatacatacatgcatacatacatacacacatgcacaaacctcttccttaaattttcttcagactaatgcattctgaaacgggagagttccctgacccccaccccccccccccattgcaggacatgcaacaggggtataacttgtctgtttggctgttgtgcactcaaaccccttacaggagggggagcatgcagacaggtaggtgcaggagccagggcaagtgattttgggctctggccccatggtagcatctacaggtgggtgcctgtgacatctgaagccccagtgggcatgttacagtgctcttttagctcttctgttcacagacggtttaagtgttaaccagctcagtgccctcttggtacttgggttcttgtccagcgtccaggaagaatcaggtcacacggacatactaaaggatggtgaatgtggggaatattattgcattgccaatggagatgactttcagccacgactgggatggatggggagctggaaaggggatggagtgggaatatgatcttcccatggccaatctcttctccaactgtccccagcagaactcctctcaaagttcagacattccttctctactgtccttctctgctgcaccactctgctgctcttctgctcttccgttcatctgcttgtggagccttgggtttggggtttatatgggtacagggactgtggcgcgtagagggccaaaaggcaacatttgagcacaaaaacaggaaggcctgttctcatttagagctgccagtttccaggctggagggtggagcgtttgctggagaaccgccttcttctaccaagtatttccgtttcctgtctttatcaattctatagggcactgaagtaaatgacaaatgcaatgaactctatagtcttcaatgagccaaaagcataacagttactagttgtaacattcaagaggatattggatgctttttctcctttttctataccgtaaggtgctactctttcatggaaatgtaagtagagataaaaatgtaaatagagatgtttataaggcatataaacatattatatttcctagttcagtatctacagattgagacttaagtttcaaaacagtgaacaataattctgtctttttcagtatcagtgtcataaattgccaatataaccatgtatgaatgactactgataatagtcattagactagtctaatgtcataaagatggcaaatggcagaaccagaattccaacccaaggttattatttcattctggaccatcttcgtcagatggtttgtgaccattgtcagttggctagtaattgcccatagaagagtatttaccccacagtaactgacttgtactcaaaaacaagttatgtcttttcagcaattatgtgtatgtgagtattttttgaatactagaagatatttattttattttatttttttttgaggcagagtttcacttttgttgcccaggctggagtgtaatggtgcaatcttggctcagtgcaacctccacctcctgggttcaagcgattctcctgcctcagcctcccgagtagctgggattatgggcatgcaccatcatgcccagctaatgtttgtatttttagtagagaaggggtttcaccatggccaggcttgtcttgaactcctggcctcaggcgatctgcctgcttcggccccccagactgttgggattacaggcatgagccactgcgcccagccgaagatatttaatgttatacatgggatattagttttatttaaactttgcaagagtgttagttgtttagtttgtttcttaactattagaaggtttcctttcatagaaggaaaaatttgaagtttgaatttagaatgtttgctgtgctgatgaggaattgggcaggtgcatgagagctctgagtttgagtctcactgaaatcttaggtgggaggatgaagatcgctgtgtataaatttccagagagatgctccaattcactgctgaataaatgggaaccagagctgcctcaggggacttaatgacaatttctcatcttcattgattgtgtcagatttaattgctgactcagaggaaatatttgttcttaggagacttgctgcctatcaggaatgagttgaagagttctagccctgaggaaaagtttatgtgagctgaagaaaagatgctttagagagagagagagagagaatgtgcattgttttcttttcttttttcaccctctctcataaagggagtagggcaatgttaagcaggtaaaccctaataccatctacaacctcgtattaccatagagtatatcttcgacaagtatatagatagcctctttgtacagatgagtaataaagaaattcacatctgttgtaatctaatcatctatctggatacacagtttttataacaggaaggggcaaaaagtaaaatcccttaatgatgaattgctgatgtgagcctgtatcacgaataccatattaggtttttctttttaatgtttcttgctatttagtattacttatagaagtctttgaattttcattataacattaagggtgaagagctataaatgcactcacctcagcaaagaaaaccaaaatatttataaatttattttcagaaattaaagacagaaccctggaactgcacaacaggcctgactgtattaacttataggagattatggtaaatttctattgtaggaaataattggatattgtttcagctttcaaatctgtttcattagtattagcaagagattaatttctctctaagtaaattttctgaaaaaaagcacttcactatgcatttgttgaaaatgtgctgaactattccaatttaattgagataatcagcatgcatagtatgtacagttaaatctaacttatggtccataacttttccaataaagtgtctcaagttcactacatgacattgatgtgtttaccgtgggaaagttttaaagcaccgttctcaaaaaatatttcacatctctctagtttggatattcacacattactagaggtgtttaagttgcaagtgatgtcaagtacaatttgtctaatatcggtcctaagcagagatgttccccacatttgatgttaggtgctaatgcatagccagaactctgatttggtgaatgttcacatatatgactatttaagcattctaatatggcttttttcccatgtaacggagtttctggaatagtgtgagatgctattaaagatgaatgtatcttattttgttttgttaaaacaatcaacagctcacacactctctcgaagtcaccttttcttcctatccttaagtgagggggagagatggggcaaaggagaatcatgagctgaacttccactctccaccaagcaccatgctctgcaatctccatgatctcactgggactctctatccatcctatgaaagtattattaatctgatttgacagatgaagctcagcctggataagaaacatgcccgggccgggcgcggtggctcacgcctgtaatcccagcgctttgggaggccgaggcaggcggatcacgaggtcaggaaatcgagaccatcctgactaacacggtgaaaccccgtgtctactaataatacaaaaaaaattagccgggcttggtggcgggcgcctgtagtcccagctactccggaggctgaggcaggagaatggcgtgaacccgggaggcggagcttgcagtaagcggagatcgcgccactgcactctggcctgggtgacagagtgagactgtctcaaaaaaagaaagaaagaaagaaagaaacatgcccaaggtcacaaaactacactatgagaaacctgggatgtatgggatgtatcagtatctgccttgatccaaagtccatgaatgtccagggcacatgactgaatattgattctggttcctaatgatactgacccaaatgtaatcttccttaagaaaaaagacctaatggtgactgacttcaggtttagacttccccctctcccccctcagtctggctttatcatctactcttcacactatatgaagtcattacaatcttcttgaagaggagataaagctcgttcctacgaatatggtttcccttatgtggcccactgctctctgaaaggtcctaaggatagtttgctatttcaatgtccagagatagctgaattcctcctcctccactccttgctcctctatagcacacttcccaagcatgggctcacgaactctcctccctacttgtgttgtcaaacacagcctcactgcttcaagttcaattgggtgttagagacacatgtcatacctatagctaacctcatagtcctacaatgtctaatatacataacagaaaagtaaattgaattaaggcagtccaaaaatctacatgtgtctcaatgcatacaatgaaacaaatttatgtgtgctactgttttcgaggtttctcattcattgcaattatcatagtggctgatatcttgcaccatgataacatcttttgaggaatataattttattgataactaaacatagttttattatgcctgatagttaaaaatacttaaaatatagtaaagttttcatttataaatgtgttgacattcaatattccaaaaatattatttttaatggaaaatgatttttccaaagtgtatctttaactttgttttgtaggaacataaattacttattcaagtaatttgtataagtaatacaaatttggccgagttctgacttagtttgtaaactgttactaatgattttctcacgtaagcaaggtctccccacgtactaatactgtgtataaggaggctccaactgcacagtgattcacctgaagtagttcggacttcgggtgctttgctgattttagccatatgtcatacactataatcaaggcatgcagcatacaacgaaacataagttgcccagccaaattggaggaaatgaatcctaattttggattcagcagtaagtttaataaacttggtccttaaagctagactcactgttatggcttggtagtatccccgctgaaatctcatcttgaattctaatctccataatccccaagtgttaagggagtaacctggagagaggtgattggaacatgggggtggtttctcccatgctgttctcgcgatagtgagtgagttctcacaagatctgatggttttataagtgtttgacagttccaccctcacatgctcacagtctctcctaccgccttgtgaggaaggtgactgcttccccttcagccatgattgaaagttacctgaggcctccccagtcgtgtggaactgtgagtccattaaacctcctttgcttataaattacccagtctcaggtagtatctttacagcagcgtgagaatggactaatatactcaccttaggtaaaataaaatttacaataacaaatgaaggtaagataggtcattattactcttgtttgagaaaaaaaaaaaaaaacagtaaccttgtgccatttcagagggatcttcaaagatgccttttaaattatcccacatagaagcccttctaaatttcacgaacccagagaaagatatttgttcctttccatatttgttacagtgaaaataggactggaattatgatgaaaataagaacatattttatagaacaccgtgatactgaataagctaaattaaaattttatgtggtaggttagtctactagccctgcttgatttatgtatatggtagaaaatttcatacaatataacatttaggtatgtatattatagtagattaagtatttggttacctcatatatttgtggatatttctggagaaatgttcgctagcaccttgatcagaagtataaacctataagctggcatgtattctattcacatatatatatatatttttgagacgaagtttcgctcttgtcgcccaggctggagtgcagtggcacgatctcggctcattgcaacctctgcctcccgggttcaagcgattctcctgcttcagcctcctgagtagctgggattacaggtgtgagccactatgaccagctaatttttgtatttttagtagagacggggtttcaccatgctgtccaggctggtcttgaactcctgacctcaggtgattcaccttcctcgacctcccagagttctgggattacaggcgtgagccaccacgcccatcccacatcttgttagagaaagttttctggaaggatggcccatgatgagcacaaacagaacttctaggaattcttgagttttcagaaacagtaatattagtctactttgcaacactagaatgtctgtgcatgctactcttagaagttaagcataaggtgaattttaataattagaaatgggaaaaggaggaaaaacaaaacttcaggtgttcagaaactgtccatcatgtgttgaaaatgggaatgaagtaatgaagtgctctgtaatacatttacatatatttttgatagcaagaataatgtgcctatgagggcatcattattattttttccataagtcttagaaaggggaaaccaaaaatttgcagagcttagaaagctagcaggcaaagttgtgtttaattctattctaaaatttatagcaattctctttttatgatggaaccaaccatcaaataccaatatgtacttctctgataccactttctctcttagacaatttataagaacctttatattgaatcattgattctcaaatgaaatatgtgctgtatgtatcccagctttttatttgtagtattcaaataattcagcagttttaacatgtgatatgcacaggaagagaaagcacagtatcattaaaaaatgtgacacttctgtgatagaagacatttctattgtactcaattgaaggtctacctttcccatgttcaaatgatgccacttgtaaacatctctgtcttcctgaataatgtgtaattaagtgtattttaattctaactttgttttcctatatttaaaagaagtacctttagatttacatagaaactttaaatgctatcttaataaaactattctgtgggatacgctacatggagtgcttaatcttgaaacagataaaaagtaaagtttgtgggttttcttttcatctgaagttaggctgataagaagatcatcaaactagggattagtcctaacgctgcatcaaaatgcatattttcatgtctatgtaattaggttttaataaacatgtttgatggttacttaaaaaacatatttttcaatgcagaaatggcatcttgtaaactacagtataaagagacttttgcaagactatttgttttttaattacagcctgattatgataagcatttgttattttcccaagtaaagattaaattaatgttataaatcaattttctaaatttaggcttaaatgcaatatgttagacacaactctggatgtctgctatagtaaattatggcttttccgacattttctagaatatttgttattgtgtataaccttttaattgtggccacagtttttaaagtgcttatgaagtttataatgcaagtgtttggtttaatgagtcattagccattaacaaatcatttctgcagttacttttctgattgcaatttaggattttatttaattctttttcctttacatttttatttataatccatttttattagcaattgaaatcctagatttttttttcagaaaaataagacatgagatgaggattttttagctgtgtgtgtttattaaaagaaactaaataatggagacagcatgggagtagtcataccttgcatcttacgtttattgttctgaacaagaaatttcttacctttcagaaaaattgcaaatgtgttttgtttcatcataatcttataaatttaccatgttagtagtgtccactatcttcctttatcttttctctatgcacatataatattttccagatataactcacttcaaataatttctctttacgagttgaataaagtccttttatatccacaataaaatgttgcaatgatcagcaagcctcaaatagtttattggaaaaagatcacttgtgtcaatcatttccaaataggaagttttcagaatgaaatggaaccatttggacagtcaggatttctaccataatgaagctttaataagccagtaatagaaggttttgcagcaatagatgatgacccagacataaatcacattactagatcttaagcaggaagttatgtttgtctatactgacaaatataattgcctatattttgtgactccagttcaattatagatcaccattttacttccagttcaattataaatcatcattttacttcctaatatgtcagtagaacctttgaaattgtaacatgattctgaaattcaaaactacagagaggtatgggcaatgcttgcttttttttttttttttttttttgcttatggaaggctattttcctcaaaatctatttgcaattaatttagtctggcttttatttttgcttttaaatttagaaaaatagattctttctgaactgtaggattaaggaaagcattataataatattttctcactaatccttggaagtaatggtctgttccatggaggtggaacttgaagaagttcctcctctactcaatgatctgaaagaggccaaatcaagaccctggtatgctgtcatacatatcacatgcctggtcatggagttgtggaggctgaggcaagcaacacaagcgaggtagccatttacaattcagaagaaaaggatcctgcaatagcatccagaaactgttcattctttaaaaatgacttatagagacccattgaaggaggtctgtcatctatatagggtttggcagcttagtatggaaatttgatgaaagagcaattgaatgatagccaaagggtctgtgttctttctctccagcctcattagataactgagtggttttaaatcagtctttagaatccctggaccttagttttctcatctgtcaaataatgaaagatagtttaaaaaataaaagtctgaaatcctgaatctgcaagactgcggcttctctggcgaggatcccctaacttagaaagcaagtaatctatattatgaaggaagatgtggctactttatgacatgcccttgcttcccatctctacatattcatgagaattcttccttgctctgttgtacactgaagggagactaaggtccttatgagttagatctacaagtacaatcattttgtttccctttggctaggagctaacattctttcccaagctatggctgtgtaattaagtagagttctctgaatatttgtaaaagaggaataatctgtagcagttttctaaaaaggaataaaataaaaataaaaagcatggtaatggagaagaaggagttaatacaataacaaaactctaagaataaaagtaacgaaaggtacaataatgtaagaattcaagtttaatcaggtacgctgaagtggcaatcttcaataaaaaaaatcagttctgaagaatacagaatattaaatttgataagataattgcaattttattatttcaagatagttgtcatctcttagaagtgtcaaataattaccatacacattcaacagaacagcgtggcagactatataatacgaatgtgtcctatgacattcccacagctcttgttagacaggtaggtgtgtggtgatagacgcagaagtatggtatctacatcagtgcaaaaagtcaagagaggctttacgttgaaaatctggagaggggaaaaatgtaatctccaattcacagcattgcagtatagtggaaaaagaactagattaagtgtcaagaggctgtggattgagtcctggcagtgtggtataaggtaaatccttttctttctctgagccttctttttgagaatctcttccttggtatgcaacgccattgccagttaagctggcttgagccccaggttgctcgcctatcttttgctccttagaccattagtggtttctggaagttaatggtaatccagccaaattgagagtagaggctcctgtttttcactagtctccctttaacttccagaacagacacttcctgcaatttttgtttccactgaagacatccaatttggaaattccacttccagctctctgtggccctcatttgagcatgcaccttttaaaaatgagagttgtgagagagaaccttaaaggaaacatcttaaaagttagctccctgaagggttttcaccaagttaagtttcccttttatacccattattggaaattatagccagtgttttaagtgtaaagtaaaatactcttcttaagcctcctttcacaagcctactatttttctagccgcaatagtttaattttgttttgacagtggctagaacactagaaattgttgggtttttattttatagtaatgactgtcctgaatgactaattttcactgctatccatcatgcctaaaattggctggtttgcttggctgaggatgttatacatcagttcaggaacagaaaaggtcttgccttggttgccttagagtgaccgggaaagaaaatggtggtggtgacagggaagtaatggcttcttccctttccctcgtatctctagtgttccatttatcttcatataaaggctttatctgaagaaaaattaaaagttagaaaaaaaaccttcgtgctaaacagacagtttaattggttctgctatttttggaaactgaaagataaatgctacgtgtgaagttaataaaccataattggaatttgcttaagagcattctttcattccacatggactcatacacttcaggaagccaaaagacctagctgggccttaggaatacataagcccctttcccaagaacagctgtgactttcagtgtgaccttgaggaatttaataacttttctatgtccccactggacaataaacaaattggggtgggaattgaaaaactaaaaacaaatacactcagttaaaaaaaaagaaactggaaactttttcagttcttggatgataacactatcgtgtgtgttgacatttgccattttcccagctctgtgtagtgcttttttccacaaaaagactttgatatttttatgattaatttttgtgttatgtacatacctatgtaggcttatcattgtgagcataactgccctttaggttttacatgttatctagatctgaatgtcatgccatccaaattatttgacaaacataatcactcttactcttattgatgttaacaatactgtttttttgtcattgtttctttactggttatatatgtggagagaaatgaatctgatagtcccaggcatggtctggcactttcagcatcatataacttttccctagacatatttaaacttgagctaaatagcacatttctttaaagaaccaaggacgaaggaaagttcattctcattctgaatttttaaaaatatatttgaaaatatcttttcagctatgcttttattgccgtatattctacctgaatctttgaaaaggaaagagtggcttatagttttcgatctgctacttgtttcatagaaatgcctatataatggtggtgagattgagcagatcgtagaagtgttattgtagattgtgagtcaatgtccagtagggggttagagtaaggacactgaatccagaacaggatcacatgtcagtgcagctagttactaattgtgtgatattggacacatctgtttccttatttagaaaattggatcaaaattgtacctatcttatggattgatgtgagaatttgatgacctgagaatttgtggttcaggactggagcagtacctgtaccattagatactcaatgagcatcatcaactcaagggaaaattggagctttgcaatgggcctgagttttaatcccaattagcatgcttactgtaagcaggttctcaaactctctgatattcagttttccatctgtaatgattttttcctagcaggatttatggattagattaaaaatctaatctaacctaaaaataaagctatttcaaggaaacgcctaccccacttacccaatgatgaaattttttaaataaaaatgttttttgtcaagtccattatgaaaacttttagagatgtagatgaagttgtcaagtatttacttacagtctaatttattagtatagttatacaagattttaactatatcatatatttgctcaaactgtaacacaaatttaatgagatacttttgtttaattttacattcatattcaatatcaacgtttttacctaatataggtgttcagagctttcatcttcacctcagtctgagggtttggggatacagcagttcatgaattcatgtatggtgttcattttattccaatccacaagaacctgttacaactcttacttttcccattcacccaataagcaaatactaatctccatggtaggttttatactagactgtttttttaaataagtagacttttttttttttgagacggagtctcactctgtcgcccaggctggagtgcagtggcgtgatcatggctcactgcaacctctgcctcatgggttcagggaattctccctgcctcagcctcccgagtagctgggattacaggcgctcactaccacacctggctaatttttgtattttttagtagagacagggtttcgccatgttagtcaggctggtcttgaactcctgacctcaggtgatccgctcgcctcagcctcccaaagttctgggattacaggcgtgagccattgcacttggcctaaaaagagatatttgaaagatttattggcatgcttatttgaaagatgtataaatccaggacaaagaacaaaatctggactgttttcaaattttgcctttcttcatttttatttactgatttcggtttaatcagtgaaccaccaaaagtttgcaaacctagtatatttttagatgtttcaggcagatatatctcctccaagtatattatgttgtgaaaaataataaaaattgtcggagctaaccataaaaattgaaaacacaaatatatgcaatatttgttttctaagggatatttcctttgagaaggattgaccttatacttaggtatatatagaaatatgtttaatgcacataacataacttatactgaaaattattgaataataccttaactgttaaagaattaaatacgttgaagaatatcacatgtacctagaacagccttcctcaaaatttgggctgcaaggtatctttacactcttagaaactattgacccaaagaagtattgtttatgtacattatacctgccaatatttactgattaaaaataaaactgagaaatcatgaaaatattttatttatttattttaaaatagcaataaacccattacacagtaacttaaataacatatttaaaaatttatttaaaaagcatataatttttttttgtttgtttttactttaagttctgggatacatgtgctgaacgtgcgggtttgttacacaggtatacatgtgccatggtggtttgctgcacctgtcaacccatcatctaggctttaagccccgcatgcattaggtatttgtcctaatgctttccttccccttgccccaccctgccccacaactggccccagtgtgtgatgttcccctccctgtccccatatgttctcattgttcagctcccacttatgagtgagaacatgcagtgtttggttttctgttcctgtgttagtttgctgaggatgatgacttccagcttcagccatgtccctgcaaaggacatgaactcattctttgttatggctgcatggtattctatggtgtatatgtgccacattttctttatccagtctatcattgatgggcatttgggtgggttccaagtctttgtattgtaaatagtgctgaaaaaaaatacatgtacatgcgtctttatagtagaaaaaagcatataaattttttaaagtatttaagtgagaagaataacattattttattatttcccaaatatctttaatgtctgacttaatacagttgggtttgttattttcgttgaagtatatgaagaaaatccagcttcatacagatatatagattgaaaatggagatttttaagaatagctttttcaggtgattatggatattcttattcggtcttacaaaaattccattagtggtagtttcttaaagactatttacagtgtagaatctttttgaaatcatatcaatgaactttttgtactaaaatccattgacttttcttgcagtttcaatggtctttttccttgtgcatggtcttgtaacagtacactttggtcattaggaaaaatgttgtttcattgaggtatgcagatcttccacatgtggacacatttcattataaaatgtcaaaaaatcatatttgtaaatcaccatcaagcttatcagaaaggtcttgaagtgttgggaaactattgtgctcatgatggcaaactgaagtcttacacaggatgaatttttgcttgaaagcttgaattgaatcactggcaacaaatactgatatagctggtttttgtttttttgtttttttgttttgaggtggagtttcactctttgttgcccaggctggggtgcaatggcatggtcttggctcactgcaacctctgctgcctggattcaagcaattctcctgcctcagcctcccaagtagctgggattacaggcacctgctgtcacgcccagctaaattttctatttttaatagagacaggttttcaccatgttggccaggctggtctcgaactcctgacctcaggtgatctgtctgccctggcctcccaaagtgctgggattacaggagtgagccactgtgcccagccaatagctgatttctttaaagtgactaagtctcttgatttattttctagagaatgttaaatagactagtctgtatggccacagttgtctttcagagattattttagataaaaataatgttccataaaaaaagtgatggttcagctcagaactaaaacaatcatacaaatacttttcctcaaggcaactatgatactttggtttccaaactaaaatgctttatgcatacttcccatttgatcacaaagaatatattttttaaatgtactcaagggccaagatttaataaaattaataatttttactgcttcgccaaaagcatttttcagtgaaactagaattttttttttctgtgagtgaataatagtaaaaaaaaaaaaaaaaaataccatgactagtaaaacaattttctgctatgcctttgactcgtgctaaggaaccagccgttttcctcttcacaaatgtcaacacaatgaaaaagacaaaaatgcataaacattataataaaaatagttatgatctccaggccctgttggcgggtggggggggaggtctcagactatgcttgaggaaccattaacagaggaaattgaataaatagtatttgtatgtaataataatagctgacatctattgtttacatacagtttcacattattgcattgttaaatgttgttatctacaaaataagtttggttaccagtcacctttttagtattcctattcagtcaccagttttctcaaagtggtaatctgcactggaccttcatgtcaaaagtgttgattggtgaggttctactaggcttattggtaagatatatttttaatatcactttttcttccttctccactttgcccaccaaaaaaatagaggatagatagatggatagatgatagacagatagacagatagataatatattaagatggaaggaggaaaggagggcaataggtgggaaagaagggaagaaaaaagcaaccaagcaagtaatgaagaaaaaaagaaggaagatatgaaagaagtaaggaattgagatgaacaataaaatgcttgttttgaagctgaagtttagttagggaattacggttcattcaatttagtagttactcataatcaccttgctaaattaaacccaggtgtagtgaatgctgttgcattaaatatattttcacatgcactcaaactgggaagagcgaaacaccaggaaaacatgaagttgcagtgtggttcttgtatatcgttgaaggactgaaacaaacaaggctcaatggccatttctttaaaaatactgactaatactttgaagaaaataaaacaatccaaatgaaaacatggcttgcaggagctgcttctgtttcctcatcttcttttctgtttgcttttacatagaagagtacagctgtggtttaactcattgtgataaaactgctaaacatgtgcctgtaactgaactccaggagaaaactctgccaggaaactgtctcctaatgatacaatctgcatattttaatgatgctggaaatgtaggaaacggcatagactctggactctgctcattctgggctttttcccctccttgtagcttgtgcattgtttgccttcattaacatatgataactggaaatgggtttcctatcaccatccaccagccggatatggcttgacattttcagagttcagatgaaatacttgtaacctttctggggttactctatattggacttattttaatgatgtccattccatcaatgagaagctggcatggccactgttttaaatagcacaaaagaaaagttatgtctcactacaaaaaagcacagctatggaagatattagtagcaaaccatttttaaaacattttgcaccttcctctctcgcttttatgatatgacttctcggttttgcatttttctttgctccaacctcaagtgccttgttctcttactcttactttatcttagccccaccccttaatgttcattgagcacctgctatgggctgagttctttgctaatcactttatatgtattattttatttaattttcacaatattgcaaaataagcatgattgcatatgactactttatatatatgtgtgtgtgtgtgtatacaggtacatgtgtttatgtgtgtgtgtatcatgtatgtatgacagtgatatcagtttggaactaaattgagtatagtagatataagcagaaacaaactttgtgaagttatattagttgtccaaggacacacagttagaaagttagacactggaccaaacccagatttatctaaacctctgagttatcatggtttttttgtaaagaccagaatacttggaaatataagcctttgctggattttattctactcaatccctaaactactcagttaaattgcatacaaaacaggggaaattccttcataagttattggtctgaagccaattatataaaagtgaaagatttggggtcctactctcccaaactattgaataacagaaatggaatagaatagattaagccttcaaactaagaatttttaaaggacaaactcattggcatccagattattttaatatacattgttcatagattactttttagaaacactgtcaagtttatagtctaaacaaatagattttaattatgaataaggaatttaggatttaaaatattattacctggaaaatcatctttaaaaaaagcagattataatactccaaaggaaaaatgggccctttacttgaacataaagttttcattttcacttttcaatgttttcatagcttcttagatttattggcatcacgttttttactctgcattgtggtagcatatttacttactagactgtaaacttgaagccatcattgcaagttcattccctggtatatggaaaccggaagcatagtaagatcagtaaaatgtttggtgaaatgcaaaatttaaagacattgaacaattcaaaagaaagaacagaatcgtgtctagggagtgggccattttaacattttaatgcatgactgtttgaatggtttaaaatacagatttctggacacactgcagggattctgagtcaacccgtctgggaatggtccaggaatctgcattttataaaggcgtctaaggcatttgcaaccacacttcaaggaatgtggctgaactgtttacagttttaaaaagtaattgggaatggttctgacttgtgccctgctttgcatatttgaatcccatcttccagcaggtaagctttcatttggaatccttgatccaatagtcagttatgtcttcttttccatcccagcctaaggctttccctggcacccctcttaactgactgcttacttcccctctctcttcctcactgattgtaagacattcccataataggagttacacaaacggctgcctggcataagcactggttaatgctcgtaatgtttttataaagactgtacacctttttatcaggtacaaaattatttctccaagtattcccctgttttgtagaaatttccatctcataaggaggtgagcaagagttgcagaattatgcatgtaaattactaaagaggaaatgtgaacatgggatgctttgcaaatggtagctattcggtgttttcctggaacaacttctgaaactctagtgcaccaaagttagtgctcttagaaataacttaggcctggaaatctgcattttgacacaaaatctagatgattgcgatgtaaatgattcatacatcacttcttaatgaactttgcaccaaggatatggtcaaagcaggtcgttcatttattttaaaacacttttcagcttctttaagcttctatcaagtattttcttgctcaaaattctccctaaccctttagagcatcttttgtgttctgctaaaggcctcaagtagccagtcaggggagaaataacacataaacataagatagagagatgaaatttgagtaggcttggtagttttatttttaagattctaaatatttgatgttatttcttaaaaggttaatataagaagtctgtttaacagcacagtttctgaaaaccaggaattcccataaaaaattcataggtctgaaagatacaacacattttggatatcggaacccttaatttctttccgattctacaagcatatcctcagaatgtcttttcaatattttgtactgtctggttgtgtagtttcttcacccataaaagaatctgtgaaattagagacgtcattttatataaaggcatttcagtttttaaaaaggatatataattacatccagggctatcacatggttgctgctgaagtttacaagagatgtgtgcctacttctagatcagggattggcaaactgcagcccacagaccaaatatggcctgctgcctgttcctgtacagtccatgagctgaaaatagatttacctcttttttagaatcctttttttagaaaaatgttgtttttatatttttaaatagctgaaaaatcaaaactggaataatattttgtaatatctgaaagcgatttaaaatgtaaattttagtgttccataaataaagttttattggcacacatccacgccattagcattgtctatggctgcttccatactacaaaggcacggttctgtagctgcaacagagaccatgtgtgacgctccctgcttggcacactataaatcacagtgaagcagttataactcgacagcgtttcaagtgccacatgtgtcacgtacctgtgtgaacagccattttcaaagatgaaataagtatgaaatagaagctcactctagatcagcattcacagatggacatttacaataaatgccggtgatagtaacactgactttgagcctcaattaagcaaactgttagcatatacatacaaaaagaatttcagtcttttcattactagactggtattacaaaaaattatgctaaattgttagtattatattttgaatttcgccaaaaactgtgggcatttgttttctttcttgttatgtgagtatgcatatattaccgtcaattttgcagcttcgcctgcaaagtctgaaatatttcctatctagacctttacagagaaagtttgctgacccctgtgatggagcactgagtgcatgtaaattatgagatggtattttagttgtaaaaaatgtttcatcgctatagagttatctttcaaaaatgtaattttcccctgattacaaaagtcatatgtacaactgatagaaaatttaaaaactgctgcaggatataattggaaactctccttaatttttatcacctggatatgatgaataaaccctgctaacatgttagtgtattttctctagactatttttttaaatacttgcatatgtttgaaaccttactctaaaaacaattttcaatgtcacttaaactttgagaagtagtttcccatattattcacaaatctttgcaaacgtgatttgtatggttgaatactatatattcatgtggatgtgccataatctgagtctcctttggtgggatcattgaagtttttgggttttgaacccccctcctttttaataatattatttaaaaaaattatgctgactaatttatttgcccaaccttcagatttttttacagaattcttttaaatggtagattactttcattccatatgtaattcagttgagaagttggataacacgccctaatttttatcaacacatccttttgggtaagtcaagctactcttagttgcttgataaaacagaggttgctttatcttatgacagcctaatcgtacagcagtatttatggcacacactctagaacaagcctggaggctttaaatcttaactgtgtgacttaagtcattaagctctggaaattggaaacaccagtagaacctctctcatagggcaacagttatattaagtgaggtaattgacatacagtgcttactcagtgtctgacaactagtaagagctcaataattgttagcagcaatataataaagtagaaatatccagctctctcctccctcaaactgaggaatatccatttcttcagaaaaacctgtgactttgagaagaaaatctttctttcactacgttaaattcagcttctttcacttttcaaaatatcagattttcgaaagctacagctataccacttatggtatttacgtccttgacccagtcacctaatctctattgaattctccttttcctcacttgtaacataggagatcaaagtcacttactttattggattgttgtgagaatgaaattagagcatacatgtaaaacacttagcccagcccctgtacagagttagccggccaatttcctattgcaggctatgataaagacaaacattgaaaatcagtgattagacaaaggatgcttccttgcccctggcagccttcgaaaacttccctcaccttactgtggatagcagcattactcctttttactggagaaaaagatagtctcagatgcataatcagatgaatggaccatgcagaaacgctgattaaattagttatgtgtattttctgtgtgggtatgtgtgtgtgcacataaaagagcaaaaaaagagtttaaatgggcccaaaggaaggcatttaaatttgaagcctatagttgttccatggttcctcttggcttctgatatcagttcctcctattaaattattaagtgttaagaaaagaaatgtttaaacaaagccactattagtttttagtcaaattctgtgtgtacttctgttatattcaaacaagctaatgagtacattctttttcttctgctcaacttgaaaaggttacaaacaaataaactgtctcaaaatctttattctctctggaatttatttttcagaaatattaactcaccttattttttaagccaaaaatttaagaagtttattataatttgttattctaattctgctgctgagttggctgttttatttaacgataaattgaatacaaaagctccccaaggcaggaagacagagtaccaagctctgaaagtttggcagtttgacatttcatggtagcctcagacagaagttaatttcgatgctaattatgtatacatacttaagttgttgtatgggctagtgggagtgtacatacatgtacatatatgtatgtcttggaggttacactacaactaaatttagagtcattttgtgcagctgggcgtggtggctcacgcctgtaatcccagccctttgggaaactgaggcaggcagatcacaaggtcaagagttcgagaccagcctgaccaatatggtgaaaccctgtctctactaaaaatacaaaaattagcagggcttggtggcgggaacctgcaatcctagctactcgggaggctgaggcaggagaatcgcttgaaccccttattacctcagaatatggcctcatttgtagacagagtctttccaggggtgatcaaattacagtgaggtcattagggtggaccttaatctcactgatgtctttataaaaaggataatcttgggcacagcgctgtgcatgaaagaaggacaatgtgacgagatctagggagaagatgtccatatatgaatcaatgagagagacctagaacagacccttccctcccagcgctcaggagccaacccagcagacacctagattttggacttccagcctccagaactgtaagacaatgcacttctgatgtttaaactacccagtctgtggttacaacagctctaccaaactagtacacattcccttaaaggaagttcgtacagtgtcttacaacaatgaactacattaaaacacactaaagaaagtaagacacaaagggagattgattgttcccatatactgacatttgaaaagatctaatacatgggaaattggtcttgaatcaactcataacatagagttccctcaagagtcccaattcatcattaacatccatcaaaaaaatcaaattcctcctaaaatgcttaagatgggagataggaaagatattgcatgctaagtggaccaacttgtctttaaataaaatgaaaaacttatctctcagacatgctgaattacattacatacactccattgcatatattccagtaaaataaattcgtgaccagtattctgtgtaagtacagtgatatattctgtagcccagaattcataattttactttaggcagcttaggtctcttaaaatatctcccgagggttgaggtcttcatccagccggtggccctattaggaagtagactagaggattataaggctttataaatcctaatgttgctggggctggtaattcacaagtagtagatgcagaaaccacagggagaagctcagagtgctgggagaactgaagacaggaaagtaagaggctctagaagcctccagattaatcttcccaggaagaagcggagacactaatgcttgagaaacataaaaacagactacaaaaagcagtaaggaaaaaaccacattatagcttttacttattttgttggactgttattttcaaatcacacaattgtctgagatgatttaatacacaattacataaaaaatgaaattaacgtgtctttaaaagcataaaagcaactgctaaataaagccataacatttttctctgtgctaccaaggtaatgaaccatatttttcatctctaactgtgcctctgtgtcatgagtatggaatttggggcaggaggggggcagggaaatatataccttcgctactgagagatcgtctcatagctccctgggaggtggttcagagtgcagtgggttgaagaacaaaacagcaatacttatgaagaaccctgccactatgacgccaaatgcctaaataccccgacaagttgcaggggaaagacaagagccaatggaggatggcagagggttcacattttgtatctcggtacctgtttggctgaataaagctgacttctgaatcaagatgctgttctgttttaatgtagaaaagtattgtcactgaaaacctatacaaacctaggtatgcatatatgcacacatatatggaactcgatagggcctcctgccttcatctatgtgcacacacacacaaattatacatacacacttgtaaccacatgttcgtattagaacttttcccagtgtctagtagaaatacctccccttagtagtcttttctgtaaggtattctccaagtttctgagaaaaaaaaaattatggaagcatatcttattttcaaaatgatttcacagagagcctgttccaacgtactgcaaaataaaagtaaagattttactcaaagattgaataaacataagcatacatagaacatctgccatactccagaagtggtgcttgtgttggggatataaataaaacaatagaactttgctcctgccctcagggagacaacagtctgacaataataatagttattatttttgccatttctttttcttttctttttttttttttttcttttgagacagagtctcactctgtcgcccaggctggagtgcagtggcgccatctcggcttgctgcaagctctgcctcccgggttcacgccattctcctgcctcagcctcccgagtagctgggactacaggcacctgccaccacgcccagctaattttttgtgtttttagtagagacagggcttcaccgtgttagccaggatggtctcaatctcctgaccttgtgatctgtctgcctctgcctcccaaagtgctgggattacaggcgttagccaccgtgcccggcctgccatttcttaaataatatctaatacaagttactagtgcactgatatatgcctaaagaatacatcactagatgaaataatgcaatgtaatgatttttttttctctgttactcaactactgcatggcatttggttgaggaacctgtacagattggaggtgacaaccccatcactacatgcttgctctggaaagatgagctttaatcgaaggaccaaatctgtgttccatggacacttgtttatattttctatgatataaaatgggtagggagaaaaaaatcaagtgagcaattatgtttcacatctaggcttaattaaggttttatgtaaaagtacagcaaaaatgtacatatgtacatacataaatatcaagagattgtttgttgtcctatctcagtgggggaacagaataacatatgagatggattagacttctgataggcggatctgaaggcatcttgttttacataatggtgcggtatagtggtctgtggagattttctttgaggacgcaggccataatctagtccaattctagttatctttggtttggggcctgggtatttgtgtcactttagggagttgtctgacaattttggttatccaggatgatatctgaatttgcacaatcatcagggaaattatctgtgggaagaggaagcactggagacaacaaaaggcctttaatctaaaccagaactagatagatttgcatgtgtgtgtgtgtatatgagtgagtatgtgcccgtatgtgttttcttgtgcatttgtttacatgtatttgtgtgtgtatgcttgtatatgtatgtttgtatttatgtgtttatatatatgtgtttttgtgtgtgtcttttatatgcatgtttatgtttatgcacatgctacgtgtgtgtttagtgtatatgtgtatttgttagtgaactttctgtgtatgaatgtggtctgatgtcttttcagccagctctcaaaggtttctgggtttgggtttttggtctttcattgtaattaactaatggaatatctactttcactaattaattcaattctgttaaatcttttggctggttaagtatcaaataaagagctatgttaaatgtaaaaatgtgagacaaaagctcaggatcatttcctagtattgtcattcttgcaaacttcaggtggaatactgctcccaagtctgggttgccaattttgagttcaatctttttctttctgtatttattttgtcagtatataatgcaaaatttaaaggaatgtttcttgctttctcacaaattgttaacctcatattttctggtcatagaaggtataatttataaaattattgtaaaaaatgttttgaaaaatagagaaaatggagattacctgaaaccccacagtatcctcaggtaatatttgaacaggtagatagaattgcacccacatcaataagaactgagtattagatcacataacactctttctcctgctctaatatgtctctccaggaattctactgtttctctccttcatcataaattattctgtctttcttggatcttaactgtaagcatagtgtgtactgctctattgcatattattttttaaaaaatcgattcttgatcccactttctctgctaaaaatgaccctaactcttcccttttctttatagaacaatgtcttgaaatcattgtctacattcactgtctcttgaaacacactccagtaaagctttagaacccacccttccaccattccaccaaaaagactttatcaaggttattaattactcccatattgctaaatccaattgcctattcttagtctcatcttactggacctataagcagcatttgacccagccaatcactccctccttcttgaaatatttcattccctggccttccaggatggttttgctcgtgactcattaactactgttcttcagtctcctttgctatttcttttcttgtctttgacctcttagtgctggagctcaccaagtctcactcttcagacacttcactctatgaaatcctgcaccccgcccccttctacccccaccacatccaaagtgatctcatccagtttatagttctatttttatgagactcaactttacatgagatttccctgatctccagacttaaatattcagctgcttacttagtatgtccagttggaagtctaataaatatcccaaccttgacatgttcaaaatggaattcctggtcttacctctcaagtggtcctagctatagccttcccaatctcagttaatggttacttcatccttcattttgtcaggtcaaattcttagagtggtccttgatttgtgccctgtctgcctgccaccacttcatatccaattctctccgttattatgttttagaaatatttcagtaacctaactaccgctgccacgtccactgctctaactctggtcgaagccaccaccatcactccccctgggtcatcgcattggctttcttagcaggttgtcctactttgattcttgcccttacaatctttgttcttaaaaatggcagccagaacaatccttttaaaagataaatcaaaccatgttgacctttatttcaaatccttgcaatggcactctgttgcactcaaagtaagggtctaatgccttacaatgacctatgcaatctggctctactgacctttcactcttctttcccattccttctgtgatgtagtatactggcccccttgctggttctagacatccccaggcatgtcatcatctccaatcctatgttactttctgttctctctttctggattactcactccccagaaagccacaaggttcactcccacactatcttcagacctctgctcaagaatcactttgtcagggagtgtttctgaccaacatatttacaatggcaacactgcccttcagcattctctccctccctatctcctgccttgctttatttatttatttatatttgatgtcacttagcaccttctaagatactctacagtatgctagtttactgctgtaattttattctagactatatgcttcattaaggctgggatttttatgcattttgttcactgatgtctatatcctcagtgctaagcacagtatgtactggatatacatgcttttcgtaagtgaatgaataatatgattgccattatactatatatgttatgttgacatgatttttacaacttagtaatacctgagaaagttcttattttgttaggtatctgacctctgatagcatgattgtttctggtacaataatattccatttcaataatattaatattccataatttattagctccctattactggatatgtacataacttcaattattaactaatataaagactactacctacataaatatccacctacataaatatttgtacaaccttcagattattatcttagcattacttttctgcaagaggtaaatttgaaccaaagcatatgctgattctacagatttagatatatattcccaaattaacctctggagagttagcattcattttctcaaccaccgcagttacaaaagtacccttttcccagcacactgagccacactttatattgttattaaattcttgtcaacttgatccacacaatgcatataataagtttttttaaataaactttttatttcaaaataactttagatttataaaaattgcaaagacagaagagtcttccttatttttaacatcttatataatctttgtacatttctcaaaacagagatattaatatcaatatgttactactaactccatctaataatgttttgatttgccgtttttcttagttgaatatctctctcctcatttgtcatttgcatgtcttctttcatgagatgcgcttgtatattgcattccaggatttttattgtataatgcatttttgatgaattaatatagtctgttttatatatggtacacagatctctggaaggaagcaataatttatacccacatgtcttaaaatatctctcatattattgataatttttctaaaattagtagacattatgccacaaaataattgcattatcataaatatttgagttaacattgatatagaaaacaggacaaacatgactttttaaccaagattaattaaattcaagttatttattgatttattagttaagcctctctactgcaagtgacaaaaagtctaactcaacttccttaactgtcaatggtaatgaattaatgtgatgggataagtcccaaggtaaggtagttaagttcaggaatccaaagttgtccttaagctttgacaactctacgtttctcagctctgtatgttgacttcatttatcagaatcttcaggatggtaaaaacagcttctagtaaaaatcgcatgggtcatgtatttgtctaggaatcaatcacagtgacacaaggaataagctatgatgattggccttttccagaggcaagtgtccactctctcagacagatggaatctcatgtactgagattggtagaaagtatatctctgaattaaaattgtgaaccattactggagtaagttaggcacacgatggaggcaaacaataaatatctagtattgttagatttcacacatgattgttaagaaatccattttaatgtcgtatgaagccatacagtattccacaactgatctgagcactgcttccaattacctgtgaaataaatagaataaatctttttaccttattttttcctatggggaagtcagccctatgatatccagttaattggtgctaaaagcttgttcttaactttattcactgatcattctttccatctgtaacagaaaatttaacactcaacatcagtttttatagtgatccaccagccactatgccaattattaatgccctttgttcaaatgttctaatgacccactgtccacagtacatttcacaaacacattggaaaatttttgaggctttcaccaaaaggttgtccgctgttacccaatgaactattgcttagatctcctactgtgaatcttctggtctttcttttgttttgctatatacctacactgttgtcaaggatacccagctctccactctcttgtttgaacagtccacaaggtgttctattaaaagtcccaattaaatgtgtacagccattcacctgtacattcatccctttactcccttgcccacccacatacaaccaactacgtgatctaaaaaataccaacaggtcaaaagtcatcaagcgaatgaacaaaatacttggaatctctaggtgtcacataatagccatggcaatattatctcggataattgctgccctaacaaagcagaataaactcagattgaaaagatgtaaataaaaggagagcaatggaaagaggaacgctttttcaattttataactattgcattattagtattttaaaggttaaaagagtttcttcaatgtaaaacttattgctctatgttgagcaagagagaagttgttgagataagcagaaaagcatttatatcatataaagttatagaaatagttggaatttaaattacattacatacttagtaaatgtctgtttttatagaggtacttcttaatttatgaggcagtatagggtagtggttaagggcacaggctttggactaagagagatattatcattctcatcattcctgcttgctacttgaatgtccttgaggagggcataaccctatttgggactcagtttcatggtctatacaatgacattattaaaattattaataatagcacctatgccatggcatctggcaaggatacaataagataatgcatgcgatgggctgagtacagactttccacgaagaatcaatggatgttagcattcattaaataatacacaatgttattaaggaggttgtgagcaaacaatttcttttatatttaggcttctgtagttttatagaatttatatggctattttatagaatttacatggctatttataaaatttatatggcaatttttaatactttgtacaatgctttacatatttccattgtgctatgcctggtgccatgcaagagtaaaacaaaaaggcattcaaaaaacctggggacacaacctatagaagagcaggctcaatggtgacatggtggtggccaatgtgaggaagaggttacatgtatcttgtgccatgatagggaatagaaatagatgtgtgaatggaatgttcaggaaggcagattttgattgattataaaaaggaatggctcaccctgaaattcagaaccagtctacaatgctaaggtatactgctggacaaaatcagctactttaaggatttccaagcagaagcttggcaaaatgtcagccaggaaatcatagaggagatgcatttgaagaatagagtttgagcatggattaggtaaggtaattgttaggaacccttcctgctgtgggattctgtgattcttattcataaataaaagttagatttttttaccctgataggttcatattcattgaatcattcattcaagaaacctttggtggcccacacgtgtaatccagcactttagaaggccaaagcagaaggattccttgagcccaggagttcaaggatgcggtaagctatgatcttgccactgtactccagcctgggtgagagagtaagaccctgtctctaaaaagaaaagaaaaaaaagaacagaaacctttattggcacaatgagaaacaccatcaggccatatttattatgagcatggaccatggagcttaatatgcctgagttcatccctggccttagcatttaatttattgtgatgttatgcaaatgactaaatttctctgaaggcttcattgattcatataaaaatggaagtagtcatagttttggctcatagaatttttgtgggtatcaaataaaacatagaattgaataaccatagccccattattggcatcaagtaagcactcaataaatatttgctatgattactattaacagtgaatgaatgaaagtactgagatatggaggattgaaggtgaattacatgatatcttagttcataagaatttagtcagtgagaaagtactgaacatccgtatctagaatccaaggtaggagataatatatacacacgtttctgtaggggtccactcatttattcggcatatatgttcatatatctataacaggaaagaaggagtatttggcttcagggagttgacgtgatgttgtgttggaaaaaggaatggcaaacaaacacataaacaatataaaatagggtggtaggcataaagagtggcatgggtgtagcatgtgcggtcaggacccacctggctaaggggatgatatgatcgtatacttgggtgatgaaaagaaatttagagggaggaaagacaatttccagatggaatcattaaggtagccctcatggggaaaaataatattagagttgattcttgaaggatgggtagaatttaatgatccatccgttactcaattcacttagctagtacttaaggagtatgtgacagccagtggaaacagtactggaaatgcaagagagcattctcatgtggaacttcagatggagaacacaagatgaccgctatcaccatcaaatggaagacagcaacaatagtaacaaagataataagcacacttcttgcagaagatataacaattaactgatagaagaaaaggtgtaaaaaaaaacttacctaaagggttgaaaggtttaaaatttctagcttgaggacaaagaactttgtcagtagacaatagggagttgctaaaaggtcttttgagcaaggaggtaatataatcaaatgtttaaaaagtcaacccaagggcagttagaaaactgtttcaatacttatgcgtgatattatagaattgcttgctcattcgtccattcactcattcattcattcgacaatcactgatcctatgtgtccagtccaatgcaagaagattagtaggagaaataggaaaaaaagagttacatatacaatcaagtatgaaacaaacatgtttgaagccaccacatgaaaaggactataatttcaagtgaagtaaaagtttaaagaaatagctgtaaatgtgttttctctatcctttgttagaaaaatagaatattctttttaaaaatccaattatgccatttttctaactgtctaccttagtctgttatgagcaagacttgaagttggactgaacagatgaccccagataaaaacactaggataagaaaaacctaatatattcaaccaactgcaataattcatatttttaagatttcatttagactattatgaataattttaatatacggcctctaaaatttatgaactgtagttagatggcattttcaattcacaaaggcaaatgaatgtatttagatgatatacaatctttctaatggtggaactttttaatataaagtttttattgtaataatttaaaatgaacaccacacacatttgtggagaaggcctcaagatcaaaatttgcaaatgccaccatcggttttgtaacctaatgcaaacttgtagttaaataaactagtaagaaatcatactgtttccttttaagacccaaagtaatgtaaagttcctttaatgttttttttgttttgttttttgttttttttttttgcatattgagactatagacaaccagaattaatacaaacatggacacaaatttggcaacagcaaaatgggaattatgcttgaaaattctttggggctgtttcctcagcctacagtggcaaccccttcttcaacatagtctccagtcaaaagatcacaagggttgaacaagagtagtgaggtgtcttttatgacccaacctccagcccagccatgaataattacagcaggagcaagatacatgatccaagctggattttgcaaattctagcagattttcttctgcaaatgtgggtaatgggcattgggaaataatgcatattaaggaagtgccgaataattgctggcaatatactatagtggtgtcttgatttctgtgatttctgagatccggattgttcttctcttgtgtggatttttttagaggaccagtatctctgcagtaaaatttgtcttgttcaggttaattttaattagcgttcatggtgtgctacctaaaaacaaaagaaaacaaaaagactttaatctgaacagtcattttacaattgcagtcaataaaggtttaaatgttttaaattactctaacattatatagtcagtataaaatattttgcagctcaagaaattatgtcattggttaaaaactgattctcatgactttgaagccacacttaattttatggtgattttaagatgttgcaaagtattacagattctctcatgctttcctctaccatatacaaaaccagaatgaagaaaattcctagtgcaagcaaaggaaaggcagccacaaatatatatgatcttgaactctaaatcaattggaatagattttaaaacagaactaggacaatccttttagaaatgaagttagggcagaaaatggtacttccagggtagtgttgtaatttggatgtgattcatttcagtccattgcttgaattattcgcaaaattttccttcctcatttagttccccgaacttttcaaggatatgtttatcagcagcaggaagaaatgcctggtagctttagaagattgccctgtctctttgcattacttctttcaactctgatgtttacttcgatttttaaaatgacactgagaggatctgtaggttcggatggattttgttaagagaaactcaatgtcacagagactaaaactcctcctgaacaacaacaatcagttagtaatccttttctctttctccattacatgtcctccttttatttgttgttgtttcttgctttagtggtacatattaaaaattaatggctgttacatgattttagaagggtatccacttttcttttattagcaggtgtaattcatgaaaagtatactgcagaaacctccattacaatgccgctttctgatagaattcaattgagagatgttattgctatttattaattgctcggtctgcactgtcatggttgatgatgttagcacagaccctccattgagttacattcttgtattcaattagggatgtgtattattgtacatgttaacactgtagaaccggggatgctagccatctgtagatttgattttttttcccttcatagtcctcaaaaatggagcattttacatcagcactgctagagagacttacaaaataaaataagcacataagcacatcagttgcaggtttaaaaacaaggacagtgtaaaatttaaatttgaagattctatcaaaagtatttgcataattagaatcactagacattttcattttaatcattctaggtggtcgcatatctgaagaagagtaagatcagaaatggtactggtttatcctgtcagaatgtttttctctggctaaatggaggaccatgttatgatattaaaagatcagagtgactaagataataaaaccaagtgtgctaaaacttccccaggtgaagaagatgcgtgaattgcaaaccagtcctaacaggacatttaggaggggaagaatgctacctgctcctcactttcttccctcctggtaccaaataactgctgatacttccaatatagagcaacttttcagaataaagaaacagaacaggaaagctagctggctggcagcagcgtttaatttctcagactcttttcatgaattattctaaaaagatgttctctgacaacatagatcctttctaaggtacctcaataatgcattgccgtggcagcgcaatcatttacctttgatgactcgacattcaccctggtcagttttgtcacttaatgtcaatgtggattgaagatctgcttttgaacaatcatggccttctgtttgaaaacaggaggcatacaccccattgctctggccaaattccaggttaggtaataacattctgttacctaaagaccccccgcagtttcaattagaaaaaatcgttgtgccttactcctctacctgtggagctatataagggtaggtatcgcactgctaaacagcaaacttgtttcaccccagaaggaactgccctttatcatcatccttaattaatatttattgggtacccatagggtgaatgacttgggaaaaggcgacttagtaattaaatgtttccgaatgccggttgtcccctccgagaatgaacgtggaggaccaaagtttgaacagtctattcattatcacagaaatagcatctatccttgtaatatggtacttcctcgctcgcttctgatatctatccatctggtacacctctaatcaaaactatttttcacatcattggatcctaatcgcctcagaattatgtcgagaagctctttgtggggactgaccaaagagtatgagttggcctcttggctctgaccagttgcaaattacaaatatctactcttctgcagggcagggagggggtgagtttgttgtcctaatgagcagcatgcttttaatgttgaaagaagacctctgtgtttctaggattacattgtcgtctgtgccatctgctcttcttttttgctatctagctctgttcacaggatgcagaggcgccgggaactcttagaaagaattgggtttagtgtttcctttctctgctctccagacattgtcttgatttgtagactgattggagacctgtctagtgaatgaattcttacgtcaatgatcatgcttccttcttgccctgtgcctactatgctcagattctcaggatttaatattttctgacataacttccaagaaggtatgacattgccaggggaagtaaatatttcagggatgaccctgctcaaccaaaaaggtctcatccctctacttgaggcatcgaccctgaccctctggtctaaacgttttgttctgcacaggtgtacattcacacatcctgggcacagatgccagcagatacaggagataaacaaaacagtttctccttgagcttgcactccagcactgaacagagagcccccaccccgtgcggcatcacacaagatgcatccttttggctctctcaaggatgatgacaaaacatgaattaagaaaaaaaaatacacttttcatgcttatttttaaaattttatttcaaattttcaaatgtctcaccactttcctcttttttatttcaggagaggatgatgcgtgtgggagcggattactgagatgatgacgatattctctgtataggggaattatcttataaaaacatgtacaattgcttgtattttgttacagaaccaaggttaagaactgcatttacaatggttgtgataagatttagcatttaaaaaaattgtaacatataccaaaatatgccatagctactagaatctagtgacgttgtttccatgtgctttttcttgcactctcttccttccctcagttgagctcatcccctttcacacctagcttcatcccaatgcaacttctggtcccttcctctgtgtcccgtgggacctttttctactgctgtgatatgtccttgtattcttagcattctcttagaaagtatcctttattgccccaccataaaggactttttccatgtactgtatcaggtatccttccaaggttgcaagcagcgtagaaaactctggagaagttgagcaaaggggaacttagtggaaggagagtgggagctcagagaatcactaggcaggctatagcaccagtgctaaaaatgggcatggggaatgtttcccaaaaaaagtccttctgttttagagatgcatactgaaatatttatgactaaaatgatgctttttctagaagttgctccattgtagggtgggggtagataggattataaaagaaaccagaatagtcatgagttgatgagttttgtagctggatgatgggtacatttgagttcattttctgtcctcactaatttggggcatgtttaaaattcccatggaagaagacaatcagaattaaaagatgtatccaaggctggttgtcctgagagctacccactattgtacattaacagagatggatgtcgtgactctcccatagatatgaaatgcatgctaaggtagacacacttggttcataggtatttgctccgctttgattcagtcaaggggtctgtgtgtgttagtgtatgtgagggagtgtgtgtgtgtgtgtgcatgtgtatgtgagggtgtatgtgtgtgtgtgcatgtgtatgtgagggtatatgtgtgtgtgtgtatatgtgtatgtgagggtgtatatgtgtgtgtgtgtatgtgtatgtgagggtgtgtgtgtgtatgtacgtgtatgtgagggtgtgtgtgtgtatgtgtatgtgagggtgtatgtgtgtgtgtatgtgtatgtgagggtgtgtgtgtgtgtgtttgtacatatatatgagggtgtgtgtgtgtgtgagtgtgtgtgttctacaagatgtgggtgtaaatatatgaatgcctgcattctgaattgtgtgtatgtgtgtgggtataggagtgtgtgtgactgtgagtgtgaaatagatctgccagtgtgcaaagcctgagagcagacgtggcagagttgaagggcctttgttgtctgtagcaggtccatcttgtatttagttgacaactgttctgtctgataattcctgcagcctttgaagtttccatccagtgaatataaccctaaaatatgaatgtccttttccccaaaccaagtatgcttcattattatgaaggcatgatctgtatgctgtcactcagtgcagtataacttaaaaacataatctgcagtgtagctaattgtcaataaattttctccattatatctcaaaatttttaaaaaaataaaaagaaatggataggaaccaaggtgacctagattattaggaagcagaaaagggagaaaatcgtgagatggtgaagaactgcctgataagggagctgcaggtaaaatgagcaattaccttattttcatctctatcactggactgaagtcccaattccaggtaggcagtgtgtgatggaatgagcttgcttttctgcctggtttctagctgtatctagaagatgacaggaacgttctggaagaaaatgggatcctccaaaggtgtgatgaggtgcaataggtgtttgaattcaccagggccaaggactttgggtctagggaagagaggtagttcctcaaagggaaattagcaagctgtttggagagggaagaacaataccggtggcccccagtactaaatgtcctccttagtttgactccaagactcacaactgctcatttttctctttagctttaaaatctttagtaagattttaaagaacaaatttgagactcctttagtgtgataaccaagtgtgggccttcaggaacagccccaatttatgtttcttgttttcctctggcctttttagtccacttgcaggctacaaataccagtcacacaaatactttctttcttgaaacatgctgctttcttccattcgcagatgccttggttcaagattctccttctacctgaacttcctttgattttcttttttgcgttacaggtatttacttgttcctctcaatccaaatcacatggcctgtgttcccattacactgcatttccatgggctggccttgccaatggtgttatggtcagtgagggcatggccctctcttcaggttacagggtggggcacttgaaaacaggaagcatgtccttcacctttatatcttctctaccgtggcaaccagcaccatatatatcaagtagaaggcacccaacaagacacatattttgagtgaccctttcatgctttggtgacttgtttatgttgattgtaatgttggcagagatgcattcacaatgttgcctcaatctacatcttattagtgatggatctgtactgacttctccctccctgtccccattccccaaatccttcttttatctccttgtttctcccaaactctgccacttttcacattacccactgaaccatcaggagcaatagtaaggactctctagttgccctgaatcaggttgagaaagtgtgaggacttgttacctcaattggtccctgaatctttagttagaagatttggagacactgtaggtagttgtactttgccataccctctaccttattttttggtggcagtcttagaaattaacatttattgaagtaatcaattattgcaacagaagcacaagtaaaagagggggtggtaggtaaagtagaaatatatcaagagaaaactaacttttgctattatttgtataattgccacaaccctaaaaagaaactatttttctaaatttaacatttgaaaaagatagtgggaaacttggaagtaaaaatgaaaaataacaaaaaaaaaaaggtactaggtcatgttgcttgctctagatagttttggcatggctaagatgtgctagaaatatttcattttgacatgaactctgaccacttttcacttgtaatatcgccagcatacatatatttactcaagacgggatagagtttgtgataacaatagtgggatgcactgtggccatattaaggattcaactcacttatttgagctgagtgcatgggcagcctgtagtgaatgaacttgagtgacctatttcttcttttttgtttaagaattaggactataagcagccaaattatgaatcaggaactaatagaatgaatagatgcaagaaaacagcatgcaacaatttaatgaaagagaaatgtattatatatgctcaagaaacaagtaaaatgccacttttagattacagtttttccaatctgtttatttgcctcattttctttaactgctatttcactcaactacaacttttaatattcattgggtaaacaatatagaaaagcttggttatttcaaatctgtgttgagctccttctaacttatttttatatttcaccatctataatggagtatttacttataataggacactacattttgcatggataagttatttctcttctttctaaggtgtctaagaatatcaggttagaaagacatactggttaaatggttgattttagtcaaaatcactgcagcccctttgggatctactgtttttacaaagtgtggtcctgggataattgtgtcagtttcaggtggggattcatgctgaaaatgcatattcctgtgtcaattctaaagccaaatatataaaaatgtctgctaattttaacaaccttccagaatctgtatacaccagcttttgagaactgctcaactgcaacttccgtctcctgggttcaagcaatcctcctgtctcagcttcccaggtagctgcgactacaggcgcacgccaccatgcctggctaatttttgtatttttagtaaatggagtttcacatattggtcaggctggtctcaaactcttgacctcaggtgatccacccgactcggcctcctaaagtgctgggattacgggcatgagccaccacgcctggcccatattgttattttttactaatcaaagtaatacattttattgtgcaaaatttggaaatacagtaagcaattgagttaaaaataattcactatcccacaatgcaaaatctttacaatcattatatatttttttaaattggaagcacataaagaaaagccattaatattatgctgtatatacactctcctttttctcacttaacaaatctaatgcttaacttagacagtgcatttgtagaaatgcagtgtttggaaaggaggaggataaaaaatggtacgggagagtgcagagaaaagaagagaggaagaaaaggaaggaagagaaaggagatgagggtgatgatggcaatgtgaaagttaatctaaatgtatgtgtcagaataatgtcttccttttttttttttggtggttggaaataaataactttaaaaactctataatgaattatctgaggcaccagaatctcactgttaaaaaacagatattggctgggaacgctggctcatgcctgtaatcccagcactttcagagaatgaggcaggtggattgcttgagcccaggagttccagaccagtctgggtaacacggcagaaacccatttctacaaaaaatacaaaaattagccaggcccagtggcccatgcctgtagtccaagctatttggaaggctgaagtgggaggatcacttgagcccaggaggcagaggttgcagtgagctgagatcatgccactgtactccagcctgggcgacagagtctcactctgtctcaaaaactaaaacaaataaatttaaaaataaaagccagatgtatctgatgtttgacaacttctttccattagagttgggaacagatcactggaaaaatggggacagtcagtttgatcacaggatttggtttaccgcttggattcattttacatttttttaagcaaaattaacttgggaacttctttatataacttattttttgcgtgcctaatatggaacagatgcagtttttgtccaatggaagtgatacttgagctcgtctaatgaaaattgttaaagtgccaagtattcttattctgttattagggttatattaggcaactggcattattcattatttctaactaaagtgaaacgtggacccccatgcatgaagatatttattacttattgatatttaaaggttgttaaattaatcttatttaaattgctcctactaccaaccactgttacaataatttattatataatattacttgagggttttcttttactttagtataaaacttgcaaaagcaatgtattgcctgtggatttttcctacagttcattgtaactgtgactaattcatcacagctgtttagacatgcaaaatctataatacttcacaatgttgattttctgtttctaagactagagcttgatttgaaaccatataatgaaaaattacatgcatctcattggaagaaatattactttaaccactgggaggtggaagaccaggaagagctgtgtggctctgcagctggggatagtgtatgtgaaattctgatagcttcactgaactttgttatgtccctcgacagtattgagattagatctgtctttagttttgttccagaagtaatgttactgctttatttttcctgttactcgcaagaggtagtatagaatgtcttccaaaatataattccccacgaaatatctagggacctgtttttctttttgtgagtcattcatcactcctttctcttctcttctttctcctgcttctccttcattgcttccttctctttttttctaaaggacagtatactatttttgagttttcgtcattcaaaaagctggggagaagcacaaaaggaagtggtggtttccctctttctgcctcttatcagatcttataatgggttaaagaggaaaacaaatcaggggtaaagtgaggctttgcgtttattggcggggatggattgtatctattccattaacatggatgattgaacgctgcctcagtaccattgtatttgatattcaaactgatgctatcattttcttagtaatgattgaaagctgcctcggtatcattatgtttgatattcaaaccgatgttatcattttcttggtttgcatgtggaaaagactgatgaattattagttacatcaaatctttaacatgtgcaaattagtcaaatgcaaaacatgtttataatattcatggttattattcctccatttatattattttttgaggcttcacacaagagcagaagaatgtgtgaaggtattagctgccacttagttgtttagagtttaaatatttaaagcacagagaccttagtaaaaagaagggatttatgtggatacaaggaaaaatattgttttgtccactgaactgtagttattatatgaaagctaatggaaataggagaattgaaaaatgtaggtaaacttgttgttttaaaatactcaatttgtatggagtttggatattttatgaagtaaacaggaggtgggagtggtacaaactgagtacctattcattcatttcttcagaaaaatacccatttactaagggaatatagcaacacataaaatagatacaggctttgcctccatggagttaggacaggcaggcataaatttaaaacccacataagttgtataattactagtgtgacattgtatgaaggaaaatgaaggggatgacaagaaaatattaaagggatcataattgtcatgaccttggatgaaggaagtctgtcttacggaattgctatttaagcttgactgagcatggtggttcacacctgtaatccaagcactttgagaggctaaggtaggaaaactgcttgagcccaggaatctgaggcaagcctgggtaacatagtgagaccccatgtttaattaaaaaaaaaatgttatttcaactcaggcataaaacattagtaggaattaaccaggaaggaaatgaagagaagagccttccaggcacagaaacaacagcatggcagtggtttgctgtgatggaagtaccaaaaaaatgctaactttttatatagtacttgctccatcatgtgttttccattagcatatagtattttacatggatgttctaacaaagtatttttagaacccatatgcaataactgaattattatacggtcagaacaatgagaaatgtgcaaataatttcatgcaattgtacctactctttctatatgcaaacactttaaagaatcttctaagaagatggctctatgaataacagggagataactgctttaactacaactaactttgtgaaacttggttttcagagcaaaccaggaaaaaaagaaatcagaaaccacatgtcaatactttttagaaaaggaaaataatttggtatcttatcttgctgttacaaataggctgatgtctgaggttatatttaaagatatttttaataaataagactcagcaatcaagtcagatttgatttgctggcatagaattcatttgatataatgacacttaagggttgcttgacttctattccatttcctgatgcccaatctcattattaaggtaagcaactgtgaaaaagggtgactctttaaaactctcagtttaacagtttcacttcattgaattcttgtttaatttcttgttgccgaatatgagtgattgtttttagtatcattcatgaatgacacatagaagatttgctgtatagtatctggaggtatttctggaagtgggtttctggatttgaaaattttccatcatcttgaacctactttttaaatgtgtctaaattaaataaatcaatttaatttgtttgtgaaagttccatcttcattcacataattacccaacagacttaaacaacttttctaatgtaaaatgtcagttaattatgaatacatattattaaaaccaaacaagtagccagaagcatttttttgaatttgtaattggatttctgtatgtttttcttaagaatgcaactatcaacttttataatggtaaaccaattgtaatcttgttaaacatgccttgatttcagataaatagaatcgtagctatctctcaaggaatcaaaagaaaaaattattttaaatgcaatcttatttttaaactgtattacccataagtaattttagttatttaactttttagaggaagcatctcattagccgtgggttagaaaatcaactctctgtggcacaattcattaaaaataggatttctcgttcttggatagtgttttgtcaatatcaaaggctgaagtatttaatgaagtatttaaaatgccacgcaatctagcaaagatacctaagatttatatggaagagtatatcttttatataaaatttccaacttctaaaaaaattaggacacagattgaagcagtactttcagaaatatctgtcaccaccacacaccttcaattcgagatgaatgtaggcttcacatcactggtctgggccaagtgacatcatgcaaatggtggcactagtgtcatgagtaataatggcttcccccttcaaccctgtcaaactgtatcaggttgctaagctctaacttttgttgcagagctcaatgaaaactaaaataaaaaaataaaacaattaccaggttgctgtgtatgggttagtatagtgatttgccaataaataacaattaccataggaattaccatggaatgtgaatttctttttcctcttgttttgttttctttcttttttctttttttaatgaaatccatagaggttctttctctgtagattttatttttctttctactataaaattagaacttgtcactccactatgggactctgacagttaaataatagttcacaaatgattagcggaatgagaaattactgcccacagaaagagctctgtgactcagcagataaagatatacaactcaagtttaccaaggaaaccccactgaacatgtggaaacgaaaggcagatgtaatgctatctattgaagcacccagccagtttgttacacgtcccttaattatcagaataattttcacttgaaacttaaaaacaattggctcacacatatttcactttaagcattttcagctttgaaagggggttggtgaatgacattaaaaaagctccacacaccccctttttatcctccatctccgtttaatggaaaaaggattctggtaatatccagctatcttgctagtacagcaccaagcacaaagaaaggacagtaggggtggtgattttaattatctatgtaaatttaactatgcgccacagtcctgtgattgaaactcattactttaactttatagtttagttatgagtgtaaacctcagctcaattaaattataaaccagatcctgatggctccacatattcacagtctttgaaggaaaaacaaaaagaatatagacaggacacaagagcatctcagctatcttttctatgtatgttatcatcccccaaatgccactgtgaggcatgcatgcaaggtggtgtatactgcattgtaacctgtcactgtgcaacagaaataagctaatgttaagagttatttatcacaaatttaaagacaggacaaagtaatagtagaagggtttttaaaattttgtctgttttacagaatagtggtctcataaccctctccctcaaaattgtgtattaattagaacctcaagctcaatttttccctaatatctgacatatcttttaatatacattttttgagacagagtctcattctgtcgctcagctggagtgcaatggcgtgatcacagctcactgcaacctctgctcccgggttcaagtgattctcctgcctcagcctcccaagtagctgggattacagacatgtgccaccacgcccggctaattttgtatttttagtagacacagggtttcaccatgttggccaggctggtctcaaactcccgacctcaggtgatccacccacctcagcctccaaaagtactgggattgtaggtgtgagccaccccacccagcgatcttttaatattttagcgtgtgctatttctcattgtgacaaataaaagtcattcttcttgtctatatttttgttacctcaggggattatccataactgtcagattgtgtaagctccattgactgtagactaattgtccttacattaaatatattaaaatttctaattgtggtgagaagcaatgctgcatttccccttgagtcactgttgaatcagtttcctcacatgggagatttatttagagatagttttgcttcacttgaaataattgaggacattcaaaatgccaaagttattggattaacttgaaaagttgcgtttgctctacagatttatttcaagtacaaattttaaggtaggtgcctttaatcgacacttaattaatgcgtttacttttgttcgattatttcttggaattatatttcttacctcagttgtgatatttttatttgtaccaatgacacactcaggaatctaataatttgaggtttaatgggtaattaaagccactagacttctctagaagaggtcattattattagcgataatagtaataagagcgaacattgactgagcacttaccatgtgccaggacccacgctaagcatttcagaggcattgcctcacataattttaacaataatgctgttaagtggagttattcccattatttattatccctttctgggcttagggatgctgaataaccaaaggaagtttaaaagcaattaagtggcatagccaggttttggacctaagttcttttgactcccaagcccatatggtggggataaattcaatgatagaacaatatatcatagttaaacctaaactacaagtgaggataactaaagaatgatatgtagctatcatcttatgtggctgtctttcactatcaatgttttatctactaaattcttaaaagcaaatctccatccgtcatatagatttgcatcgggagcctagcacagcacttggcacagataggctctcaataaatattcgttcaattgaatttgactgatgtttgttttaaatatactgaaatataaaatgtactggcttggtttggaatgtggctgtattcatgcagttaatttactctctgaagttttcaagttagtgactttctcttatgtcttctaagtgcaacactgtgcttgtcacatctctaaagcaatttgccatgctcccactaagatgaattttcctgaaataatgtctgtgaccattttggtggcattttgtgatgctactagtgaatttccaagttatactgaagcaagcgagcacccatttgtagagctcaccttattcgctttgaaaatgccattgctcttggaagaacacttcgagtgaaaagggaaataagtgtggaggatcagcagtttgttttataccataagtgtttctcagtaattattttcccgaactgttactatagaaaaaaatcaatgcttatcaagaaaggagaaagaaagaagaaaaggaaagaaggaaggaaggaaaagaaagaaaggaaggaaggaaggaaagaaagagaaaggaaaggaagaaagaaaatgaaagagagaggaaagaaagaaagttgacattttagttgagtttagttttttgttgttgtttgtttgtttggactggggaactccacctatgattatatctacgtcacttaaattgcaattgcaatacttctgatgttttgttgtgtatgatgtgcaaaatcttcagtctcactatgtttccaaacacagatattaaatcatagctttttgtcattttgtgatgagatggattcaaattaagtacactgtgagataataaaaaaaaaataaaagaaagagagagaaatggatttggggaaggagacaagtgtggtcctgtttgaacatggcatcaattccttcttaacaccatccctttcttcttctacattttatcctatgccatttatcccacatgtattacataccttctatacataaagcactgcaataaggaattagcataaattcaaagataaataagaatagctccatgtccttaactcatcacaatctagtagagaagagataaaacatgcacaaagacgacattgattgtcctccaaggaggacagataaaagactgggaaatcagagtaaaagaaattgtctttaattttggagaggctcatagggtaagaaaaaatttcactgagaaggtaaaacgtgaggcctttaggaaggagtagagatcagctgcttctgaaatggagatgccaggaacacagaacattcctcctcctccctaggacagagccaacctcattctaaccactaccaagcactgatcacccttaatgcttgtttgctaccaattcctacaggatagaagaaatttgcattcttttgtcatacaaatagttgacttaaatacaatcttaagggccctgcaattaactaggtttgtggcagagagaaatttacttcttattgaatctcagtttccttctccatgaatgagataaatggacaagaattgtgattacaagctccagtcaatggtcatgactgcctgatatgcctggtagcctgtgccataagcattgcaagaacaagcctaagctaagttgaaagagaggtgatcaattaagtatgtcaagggcataaaaataaggagtgatggtatgcttgccatatatttacaaccacacatttagtcagttcaactaaggtgagattcctcattttgtgtcactaaattacaaggaatacctttatttccccaagagaaatgaaatttgaggtagaatttcttagtttaagctatttgtggaagcagtcttagaaagtcattgtcagccttttataggcagaacacatggattttaaagcaaagcagaaatactgagcatgtgagttgtgtgatgttccgttttaaggatagtttgaacacatagggaatgtcagaattggattgtgaagctctagatttgaaagcagttgaatatcaataagatttgactattaaaaaactcaaaaaacaccttgaattcattactggattgcctaggtaatgtaaggaatatgacacacagatccatgaaaagtatttgagaacagcatataaattgcatgttttggtgcttggatgtaaccaataagagatcttaggtataaattgagtaacatgccttagtcactaaaagaatttggcatggcccacacagctgttaatgggtaactctgattcttgctttttaaatttgagtttcatcagcactatttcaaatagttcatttaaaattaacaccctaacactgatgctaaggtgcatgacagtgcataataaaacgtaattttcattttacattatacagattacaatccctacactccgagggatgtagtggaatcttttgctgtaatgaatttatagcatggtgctatcagttcctctgaataaggaaaaaaggaatagcatcttttgtatgtttatttttctttactgatgtttctttggcactatgtttagcctcctaactacacctcttaggtttggaagagaactcagatttattacaaaattatttttaaaatatggcttatccattgcccacaagtgacacaaatgtcagaattacctatggaactccatggaaagcaatttaatttttcctatgtctgagcctttttggtgtctatttttatgaagtagttttcttgtgtttttttcctccttttataatttttaaatggataagttgcagtagcgtttctttctttgaagcagggatgataagagcaatcgcagagtacttctagttgtcaatgcccttaaattataattgattagtacacgaataaaggagtgataggggattggattttgaaagaaaatgggactaagtgtaactggtttgaagatatgattttattgtggaagagttgaaacacaaaggtttccccaaagtctcatttttcatagacatgagataaaatctgtaactctcattccattggggtttaggctatttgttggctttaatttaattggatagaaagcaaggaataatggtttactttgagctctcttttatcttccttagtaacatgtcacttatatgacccagggaccttctgagggtttttgaaaaggcctctttaaaatctgcttgcacttatttgggcactaaaatatgttttatttggagatgttcagaggcaataaaatatagaatatcattttaataatagagtaaaattcggtaaaaggaaacagtaaatacacgctgaaactggagtaacgaagtaaagcctgcctcctagaagttaaagtgcccggttttataatgggcatataaatgccttatgagcctgtttggtaggaaacacttaaatatgtagatcctctgtgaagcctcattacttatgtttctaaatgtttgttttggcatgtggtgccgtctttggtatacatgccatttgcaggatccgctggaatagccactttagagcaggtgcgcttgacaggatgaactgaacacacatattatctgctctaatgaagtgcacttattcttagcctggggcatagtcagtgatgttctgtgatttctctatatccatccagcagaagctttcctgtttctcaaaatacctcaccctagacatcgaggagccacttctatggaaggaaaagcagtttatcctccactgacatcctattgttagctgtgctatcgagttggcgagcagtcatcatcctgctgactaagaccccattctcctgggtctcaccgtggtcagatcaatgctctaatctctgggaaggaagaatgataaggcatctatgtagggtctcctctttagtcttcttttctcttagctgtttctttcaatgcccagattgccagtgagttaggctgcagtgctgaatagatcagagtgtttcactagaaagcacgcagtacaaagttgttcctgctctcttcaactcagtggccccatgactttgcataggacattttaacttacagaatcgcaatattcccttttgttcattgcaaaagctatcattgagtatcaatccatgtttactacctacttttcaaaatactggaaatacaaacatgccatccctattttgcccttaaggagccaaccatactacagagaaaacacggaagtgaacagccagttatgaacacggccccatcaccttcctagaattgtcaggtaaatgagaccataaatgggtcagcacttcctaagctctctgctgtcatattaatttcaggacatggctatgacagtcatgttactaatagggctctgcctagtaaccgtgttcatcccagaagaatacacaaaaatgtctttcatggttcgaaacttggttagaaataccaggatcctcataaaaataaatgatgcccattgccattaagtaagaatttgcaagcaattgttagaaaataagttctagagattccagagaaatgagagatcccactggaagcttcccaagtgcttcttggaagaggtgtagggcctgaatgactgacaggtcaaacctacccaggcagcaagccagagggagggcattgcctaccaaaggaacaatatttgcaaaggttgagtggctcacacctgtaatcctagcactttgggaggctgaggggggtggatcacctgaggtcaggagttcgagaccagcctgaccaacatggtgaaaccctgtctctactaaaaatacaaaaattagcttggcatggtggcgggtgcctgtaattccagctacttgggaggctgaggcaggagaatcgcttgaacccgagaggcggaggttgcggtgagccgagatcaagccattgcactccagcctgggtgacagagcgagactccatctcaaaagcaaacaaacaaacaaaaaaagaaatgtaaactgcatgtatggaaaggaaacctgagccatcaagttcatgaaggtaaacaccgaaagtgagagttgtgaaggtatttttgctcctgtccatatgatacacagttcctttttaatctgatagataatgtcattggcaaattcgctttgccaatgacatttaagcatgaaacttaacaaccatataggcttcagactacatagacataaaaagaattggaaaagttacaatgtttctactgtctacagcatgtagactgcaagtagagtatatatgtaagtgtctttgcaaggcaaataataagaaaatagtgttttatatttatatgacaaagaatctcataggttaaatacaatgttgtttcatccagagtttgtataatttttaaatgaaaagacacatagtttagaaatgtagatcaccttttcattgccaatgggttccaatagccagggcctatgctaagtcctagggataccaaagcagaagacttcagagccttgtcctcgaagagcttaatgtcaattgaagaagataggtagagaagatagtgaatcatagggcaatatatatatacatatatatacatatatatgtatatatatacacatatatacgtatatatgtgtatatatattttgagagggagtcttgctctgttgcccagactggagtgcagtggtgccatcttggctcactgcaagctccaccctccgggttcatgccattctcctgcctcagcctcctgagtagctgggactacaggcacctgccaccacgctcatagggcaatatttagtttaatctataaatatttggggcaaatgaaagtaagttcatttccagttttcttgttaattacactcatttagccaaaggaaatgttatgcatgtaaaagttctgtctatttgatgaactctctaccagtctttgctgtgaagtaactaaaatattagcctgaggacacagatttttttttagaaatttcttttgacagtgattgcctaagtgccagaaaacatagcaaaatgctagtttttgtatcaaaactgttgcgtatataatattcaggaaaaatgtaaaaggaaatatttaggacaatcgaatataatctatttctgtaagacactagctaccaaattcttacttgttagtgacagatatcatctaatttaaaacatggtctttacttccagacattgtaaatgcttctggattgcagcatagatttcatcacatgcctaaaatctcaagtgtattttcactttcgtaacctctctagacattttaatgaaaaacaaagagtggaaaagttaggtttcacagaaggtttctaaatagaaacctaattaaagaaattaataatcatcctttgatgccatgctcgtgtgcctttttccatctctaatggaatctctgcacctagaagaattgtagcttttgcttgtgctcttgactagtaacttaatgtggcgattaagacacattctttatatatttgcatatatacaaagacgtggatgtccttttaaattatacccaccttctgcctaggctaatgctatattaaattgcattgaaatgcaaaagcacctcaatataatgattttccacatcccatttacttgttgattattaatgaatgcttcctgagttgtgttcctgctattttgtctttaagactactttcagggttttcgcatcatattcaagaggccagtcagagttctgtgcttgcggcttcattaaaattctgtcctacacatcatctgactcacactttataatctatcagaacacctgtttgctttacaatggccacgaggcagctcaaaacactgtggtatttagcatttaataatgagcacaagatatgtatttttgacactttaaattttctttagaaaagtgcatggaaaagagccaagtttgaatgaattatctaaacttttgcaatttcataatgtgaattttaaccaacttttaaaaaatgtgtacgagaaagtgccttctctctttgtcagtgaaccttaccttggctaactaggaaaggctatagagggaaataactttaaaatgtcactgcataaactaatagtgatatcaaaagtattttaagaagagtctgtgcattattactttccctatttacatacccgtctcacagacacttcattgtaattctcactctgagaggaagctgagaagcttaatgtcactgttaatatctagatatgtttataatttagtgacttaagtcagtgatgggcactgcatacatatacataaacgctcttttctttaaagtttgggcatttacaaatgtgattgttaaatggccctcaatataattgtatctatttgaaatacttcaagggagggatagggagataatggatggtctcagaagggtgaaattccttcactatattatgtaaatgaagaaacgtctcctagtgcttatgaactgctatagttttcagcgctaatagaggacatactgcaagttgattattgtaatccaacagcgttatctcatcagtgagcggattaagggagctctctcagctgaggggtctgaataagcattttcatttactccctgctgggtcattgacaaatggaagtttttatctgggaacatttaaaagcataaacagtaaacaaacctatagtttcttcccttgcctggatcctttaccagatttgtgctatcttgcaaaggctgataccattcaacctagcagtcaactgacttctgttgtgtcccccaaatagagaattatatgcacctggtgatgaggggggttgatggagtcgagagagagtcagatcttccccgttcaaaagcattcagcaggggccgggcaccgtggctcatgtctgtaatcccagcacttgggaggcggaggcaggcagatcacttgaggtcaggagttcaagaccagcctggccaacatggtgaaaccccgtctctactaaaaatacaaaaattagtcggatgttacggcgcacacctgtaatcccagctatcacgaggctgaggcaggagattgtagtgagccgatatggtatcattgcactccagcctgggtgatagagcaagaccctgtctcaaaaaaaaaaaaaattaatagtttaagttcatttgtcatcctcttctatcccttgttcaaatccctgtactcagcaatgacattcactttctgtctaatgacgccatgacaggtgacaataaagctaacttcccaaacctggatttccctctatttcatccccaaatcaaaacttacctctcatttccttcctttgcattacaagagatccttcattctttgatttgaccataagattagagaaattatgttaatgactgaaagtagactaatgtcctatcattagattgaatcatatataattgtcatttttgtaagtcaaaacaattgaatgtttgtaattgtatatggcacaatctgaaatgtccagataatgtgcacaggttaaccgatgttttaacgacagtgactggagtagctaacatctgatgatcatgtgactgttcatacactcttctcaatactgcatgcatgttcctggcagtatcatttaatcatcagtcctattaacaacatgaaaactgagactgagttatcagtccggagtcacatcatgacagtgaaagtgccagatcagtactaggctagaatttttatgactttaaagatcattttcttctttgtctccaaaaaggcccaagtgttgaatggtgtgcttgattcagctggggccagtggcaggatcttttgggaggatgggggtacagaggcttcttgggccttgagaatcttatgtgtaggcagtatccataatgactgtgtttagattcagtcttggagaagagaagtcatatgacctactatggtgacttacttcttgtaagttttatgcagcgatgttcctgtagagagagcatgaagagaacaaagccttacctagtccatatcctttcctcttttagtgcaaggcttgaatccataatgtttacccctttactacagaccatagtaatttctctgttctgacatctaacactctgtaacaaacaaacaaattttcattacattttatcctgtatggttgtctcatggagtcatatgcttaaatattatcttcttatccaggttagaactttttccaagacagaaatcatcaatatcttgtctttatttcacattttctacaggatttatcccaacactgagcacataacaggtcactaaatgtgtgtcgaccggttgatcaattaaggtctttgattctaaattttacttccacatctaccattgatccctttatatagtaggaatattaagggtactaaacacaaaacaagttctttctcagacattgaattattaaactaatggcattggtgcttatgccaaaaccatgcactttaaaaaataaggattctagatctgtagtacacatttattatgtattggagccaataagtcaacagctgaaatggttatacctgtattactttcaaaagaaaggaaaaaattaaggggctcagagatcagtgtttcattttgtatacctctaactaaagcatgaaattatagttcgctaagagaaggctatggagattctgaaaaatgtaaccactttggctagatgtcaaaattgaattcattatttcttagaaatgattttagacctacaattcacaatcaaattgtgattgttttttaaacacacacaaacatctctacacacacagtcagttcggatttatattggcactccaagaaccgatgtcaaactaaattttaagtgaatgttagttgtaactctgatacatgtttacaagacaaatcatttcagatgtagcaaatgaatactttaagatgtatttgaaaataccgaaaacattctaaaactgaagaatcatgtcacaaaatgttggaaattagaaccttgattcaatactttgtaagcataggctaaatgggacctaaacatttcattgaagttaaaattagagttaatcataccagatatttaatcacccaatgccttaatgccttaaacagcccagcaaggagcagttgaggaactgtgcagttgagttttaaagtattttgatattccctgtaaccattatatgtctgcattagactaggtctcattgagcagtacacatcaagatgcctaaaatgtagatggctgtataacagcaaacaaagtggttatgaaacagcaggatctcggcaggaagtaaagagatatctcaaagagtacctaatcaaacctgacaaatggtgtaacatcttcagatgaatgactaggcctgtaacatatttttagttaatcttcctcttgcttgccagaaacaggctcattcatgttctttcagtatgagatgggagggtaaggcttttgtatgaggatcataatgcacagaaaccagtgaagatttggtccatcatgtttagaaaagatgaaagagagggctgatttggatatgggcagacttgtttaaaaatagattgttcctgataccaaaaggttgaagagacttctgcagaatagagtttatgattcgtcattccagtgctttgtctgtgaagtgtgtggcttgccttctaggtgtgtgttcttctctctactcttcatcttttctccacgtcatggcgctgcttcctccctattcctgcttcctcataattcaacttccacatggcctctactgcttgtttgacttctctcaattgggcctttcactttcagctccaatttttaacgacttaattctctcccggtaccagttcatattcccaacatattggctcagctcaactttttccatttattctttttcctttttttttttttttttggtgccaggtcatgtttaccacaaactgcctataaatcagggctcgttcctaattaattagccaaaacttgatgagatggaggtaatagatgggtcatagagccaataacatggtcatatggaactgaccattctggagagactgaggttggggttgttattgcagaggttgtcataggcaaccatatgccatgatacataggtctcagaaataaataaacaacattcaggatatttatagccagagacaaaggttgccgaaaattaactttcagtgtcttagattaagtggattatctgagatccattgcttgaaccaataaaatgcaagtatatcactactcaaatattcacatttttttccttaaggcaagattggtcaatttttagcccttctgcataccagcagagaaagatataaaatgagattcaaattttgaattagggcatatccattgactttgaacaaataggctctggcgtagctagaattagacatggtgaaaaccactaaatttacccaggaacactgcagaaacattcatcatatacaggtttattttgggcattggtgaatcaagcttgtcactgtgtctggtgggatcttggcatagccaaacacattgccatggcattttaatatgccttctgactggttacagaaatccttattatttcatgaatgagttccagaaattcagactccatgtgttttttagggagttctgggatcagcattgagaaaaatattgctgttgtgttggagcgtgaaatttatgcagaatggaatccaaatgtgacttgaccacctaaggcttagaaaggtgtaaaacttagctaatacagcactgtgttagccagttcttcccttattggagtatctctgattactgtacaaaaattacctttagaaataaaatttaattaaaagattctctctctatctttctcttaccaagaagaacactggtgcacaatattaatttatggtatcctttgagtgctgaactctatattaatcctcaatttataaagcacaattatatttttcaggttttcttaagacctttcaaatgtttctaataaatgggttaagacatattctctttcatttctcccttctctttaaaaagtgaccagttgagttgtccctgtccaatttttaaaaatatccctactctttaatgtattcaacactacttatatcatgacaagacctttttatagttaaacatgaagtgacttaaatgttctggataaattagtttgcttagaaaaagtcctatttggagatggagttacagcatttcctttgatagattcagggcatgacaatactacccttgaacaaaaatggcactttattaaatggaactcacagtcagccttatttcaatcatcaaagaagtaaaagtaacactctgatgattatgaaaaagaggttggatgagatgtgaaatgagtaatgaacccagagtgaggaggtctgttcctcattctgccttaattatctgtgtgattttggacccctcattttctttctctgggtctttttttcccatttgtgaaatgagggctatagagtattcaatcctttaggatcttttgcctgtattatttattttatatctgatgggaaatacattctttatggaattttataaagttatcatataaaaataaaaatctacttaaaaggcacatttttatagtaagatagcatagaggaaaaatgagtgaatctcaactagattcatctaagggataatgcctggatttagagagtagctggccctgggagatggtagctattaatattactactacatcctactttgtacactttacccagcaaataggcctctgccctataaaaaaaaaagcaagtgatttcacctaggcagctatgtgtgttagtattatgtgactatcctagggctgccgtaatgaattatcgtaaaccagctggcttaaaacaacaaaaattcatttttttgcagttctggaggccaaaagcaaaaaccaggggagaagaggcaatggcctcttccagcttctgaaggctgttgtcattccttggcttgtgggcccatctccctctgctccattttcctctgtgtgtctgtctcagtctccctctgcctttctcatgtaaggatacatgtgatagcatctaggtcccagccaggtaatccagggtaagttcttcctctcaagattatacctgatcagatcttttgccatttaatgtaatagccactctgttgccacaggaggtaagatttgcaggttccagggattaggaaatagacatctgtttctggaggccaccccagttagcccactacaggtgggacagcaggtaactattgagcacgtgcatcatttctgtgggcagcaccatgcagtgctggctgatggttgcacacaggaatgtgggctccgtgttgtaggatcttcccattttaaagcaaaagctagattcgattcaattcaattcaacaagctagatttcagtgagccaacgtcaaatatcaggggattttacacataaatgtgtagacacaatctggattttgtgtctacgtgtttatgtgtaaaatcccttgatatttggtgttcgctcattgaaaaaaagagtctactcatgacaaataaaactattctatgcgccacatttgctgtgagggctgcaatgtctgaaaaacagaataaaattacctttgagagagcactttgtaaccatattcattaactccacaaatatttctttagcacctaatagaataatatttattttagattgaccaggggagagcttgccgctttcagaaaatatctccccaaatgcaactctcatagtttttcttacgaagaaaagagagcattaattagtccaatatttcctttctggaaatattgcctatgtttctgtgcccttcattgagatcagctgagtttcatgatcctggaataaagttaaaatccaaattcaaagtcgtaaatgtggtctgatccttgagtatcttggagataatggtaccccaggttacctaatatctcatacttactggttattcatctcagttagcctatgattcttttataggtaaagaaagcaaggccattcacattccatatagaccataatccctattgagtcagcatctctgaattaggccagtgtgttagaatgccaagtccttcaatttcattcattattggctgataaactgtgtatttctttaatacaaagggagaaaattgttgcaggtgcccaatctgccatcaatagccatgagactttgtacaagttcataaacaccaattttctcatctgaaaaatagggataataacaatacctacttccctatattgttttgagaattaagggggttaatgcatgtgaagtgttcagaagagtgtctggcacacagtgaacacctaataagcattagctatgccaattattttcatcagtattatctttattattaccaaacatgggtaaatatctttattattctatctcctttctctatggcagcgtttctcaaaatgtaatgtgtgtaccattcacctaagtaagaatcatgctaaaatgcagattctgattccttagatctggatgaagcctaattctgctttttaacgagctcccaagtaaggctggtgctacctatgagaagattaactggctgcatgtcataatcatctagaaagctttcaaaaaaataccagaggcataaatgtaccctcctcctccagaccaattaaatcaaagtcactgatggtgggaaccccaggtcattgctattttcgaaacagttccccaagaaaatcgaacatgaggattaaacccctctcttactacataagaatttttacacgctcacaaatgatggggtaaaaagaaatgccagttctctctattacaaattaaactctcatcccacctggaagaagttagcagcataaactgtaacacatctgaagtggtgcccacggttactcttgcaagcttcttatgggaaacacaatattttggtatttcccaacctggtgctgttaacaagaatcatcccttgtttgtgtttgttaatcagcttgatgagcagtttctgtgttgatcttcccaaactgtgttggccagttgccaaatcaagtgcataaattacacactgccctctctccaagctgctcccaaccctgcagaacatcagaaagaatttcctttgaatgcgcaaatctgtgtaagccgattgcttagactgatactttgtggggttggtctgatgtgacatgatcatgtgtcacaatattatgacactgtgatgacgtattttaatgttaagaaataatattttgaccaatatccaaatgtcagtctttttgaaaggtcagattctctttatataatggtgtttcctagagaagttatttataggtcttgaggctccacgtaccaacctaagcactctattccaagaaccaaggagcaacatatggctcagctctactgagatttgttatcataaaagaatgcatgagtgtgctggtaattccttaacaaacattaaggaaaatgagatgccaataatatggaaatttcaacatggttgacttctctttatagaagacactctgggtatcgctaaagtcctattgacctgggacctataggaccaattctaatctttcttccatttctatgtgttcctgtggtgatttctcaccaggtatccatttttaaactgcgatcattttatattctcagatcaggagctctatggtaggaatcaccttagatttgaaatttctagcaggttataaccctctttgagaagtatgaggggaaaatagagaagcaagtagtgaaacctgcattcctaacgactatcttcatttgttatgtgacttggttgacactattagaaaaatgtagcttgtattatttttattactaatattattactatcattattatatactttaagacatctctatcatctcccaattaccaggacataaatctagatagcaaatgtcttttttctttatgttatgcatattcagaaatgggtctccttgtaaatggccaacccatttaacaaaagaagaaagacctgcctaacaaaggaagaaatatattcatttatatattcataaaaataagaataaaatataaagcgcccccaatatttgcatagcaatgtctagtgccttcatgaacagcaaaaagagacctctactgcaaaatccagatattaaaaatgactaaatagggaagcaaggatatttaaaactgggataatagaggtcatctctgaaaaataatcttaagatgtgaatgcatagagtcagctacctatgtcaaaaactacctatcattatctgtttaagaaatagcacacacacacacacacacacacacacacacacagaaaagaagaatgaatattctgcaacagattgctaacagtggggtaatgagaatacatggttgtctatttttttaatgtttcataagaagcctatatcactacttgtataatcgggaaacaataacaactgtggattgacttgaagtgcaatttgtttgtttttttcttttttcttgtttacgctttgtgattactttagaatcaatatatatttttataattcttattaaaaagttattttatacatgccagtatattaatacttaagaaaaatttctctggatctttactcctaggaagttagatttccttctttctaattcctattcaatggctaattggctgattgtgccttctaccatagataatgctttctccgttagtatatatttggaacctttgtatttcttgaatgaaatctcattcagtgtctgtggaaacctgctcctgagatgttcacagatcttttaagtagagacgtaagattaaggagtcttgctgaaatattcgtaggtatatttctgagggcgtatgctgtacccttatctgacccacaatacatcaaaacagcatggagttcatttggattcaaattcaatcaatccctgtctcctggcatgaagaatgaactctctggactaaagaatctttgatcaggaattccacactctctcccaacactcccttcttatccacccctactcacctatatcgccatggagggagataattcttacttataaagatggacaactgaaactttgcattaccacatagaaaaaaagacattcttggatttaactttttgatgcaaaaaggacatatctgaaatatgacgtaggccctcatgcacaggcaagctcaaggattgtgtttgctagaactaaaaattaagaaaagaacagtcccccacccaccacaaaagaaaaaaattcagcagatatttataaagtatgtgtacaggatatcaaatatttgaacaaccagaatttcatgctatgattttttttcatataattgcttgacatcctttctaatctatcattttactcctcatgtgttgcattctctggactctgtctgtatttacactgttccgtctgcctagattgccctagcccttgtcccccttagtcaacaaatgctaatactccaaagacgggagaagatgctccttgttttttcttagagcatttcttgacctcagtgtagaaatacttcttattcacctgtgatctcataatattctgtgcatacatctcttattttttcatcaaatacattatttgcacgttatgacttataaatccagaattctgtgagggtagagaccatgaatccttgtatttcaaccttagcaaacagtaggcactcaataaatgcttattggatgaaggtttaatcatccaatagagttagggggttcttgtcctgaggagaggaagacaggtagagttaaccttcaatgtactaacaaggccgagtccatcttttttctatcagagtaactgcaccaagatgtcatgtagcttttctgaagcctctagagaaattccatcctctggtgggaaaggaggggaataaaaaagtttgagctcaagtccattaaattctttttaataaggccttacaaggtattcagtattttgctttgatagctgtataaagtcagtcttctgacaaatttcatattgcctttttttaagataaattttaattattaaagtgtccagtgaaagcctgacgatttggaggctgcgaattagggagcaatgctgaatgatgcagtgtgacagtcgtgtgcaataatgggaaatgtattcatcttagataagaaaggtcattccttccagtgcccctagctcatttggaagtcaaaatggactgtgagatttcttgggctagggatgtgcaatatttggctaaatattctacctcttgctgccagatggaagagggtactggggagctagtgtggtaatgtgaacaaagcatgggtactgcattcagaatcccagctctttgccttactaagaggtgtagcttaatgtctcaatctgcgtctgggtaatttcatctttaaacttgacatataatagcacctactttagaagtttgttgggaggcttaaataaagtcatgtatataaaattcttaccatagtatctgccacatactaagtgagctgggattcaagtccctttttgtcggtctagctatataaatggagaaaattttttaactttttcaaattttatccttccaatccaccatacactgtacggtgcttagcaaagaagatatgattatgttgaagtgttcagcgttcgtagctgctcagcgactgatattattctactcatatcttaaaataatctctgttgaactcaatgaaatgaattcccataacctcttcacatccttgtctctccttgctgtgtgtttgttagaaagacagtagccccctgttggtggtcctttgtcactaagaactatctttaggctttttgaaattctatactatatattcccacgtgatttttctttcattttagtttattcgagtaagtattgtaggtgtggtagaagtagaaagattaagcaaaatagaaaatgatttctctaatagtctgctttaaatctatatctaataatggtaaagataataatcagtaagaaagccttggcttggcttctctccttttatctggagaactcttttctcttcttcatatagtattacatattgtagatcttgataattgagtgaataagtgaagtgtatttttttttcaattttataaattggaatcttaaggttgagaaaaagcaaatcagtcagcaaatggtttctgttcaattgcagcccctctttccatctgagccagactcttggtcctgcttcagaacagtgactcttaagtccctgttgtagttttcacatttataaataaaaagattgaggtgtgatctcctggagttacattaagcccttgaacattctgtaatattatgactcttcagcaatgttgctataactagaatccattgccatgcttcttggtttagtctttcctgtattgcaacttaatgtgttcactttctgcacttaggagaactttcctgtcttttgtagagtaaccagcatatatcttaagcccagaatgtctgaacacatgagtaaatacagagtgagctgagatgaagggtaaccttgaaaacagtgaagtcacgtgtatgctcacttagacagttaatggggttctgttgattggtacagaaataagtgactgggttagcttatgagggcacaaataacaaatgtaaaggtaaattttacagattctttaatatattcccttaactctcttaagttcctaaattcctcttgtgatgatagaaaacacaggcagcaaaggttttggcattcactgtaccagcatttgtgggtcctctgggaacctcataccaacgtgtttgaagctgttgagtggaatagagaagaaaggaatggctactcttccaaaattcaattcattggggtgcagtattgtaacaagttggttatatacattatctatcacaaagaaaaatagatgttccttgaccatttttgtgagaaaagtcctttgtactaagcaatatagaatgtatcccaaagcagtgctgctcaaagttaatctgcagaacaaactgctaccaatccacaataagatacatggagaaagtgagagtgtttagaaactttttagagcaatttgatataaccaggatattcatttttctattcatttttattatattttacatctgtgacagatcggattttaaaaacaaaaatcagttgttctacagataacttgagaaagactgttctagaaggaatacagttttaaaaaatgaagaataaggaataaagctagggtgggccacctaaaaattttcatgtgactatccatctgtaagtacgagtatgtttgtgcaaactgcaggcaccctttctttagttctgtgtgttaggccctgggcttaatactttccttctcttatgtcttttaatccttgagaaactatgtgctggatgttttttagacccttatatttttggccccaaagtggattttctcacaaaatggcagttatcagcagaaagccctggtttaagttttcactctcattacatcgatcccctgctgtcaaaatgggctcctgatccaggaaacaaggttcccccagatcctgtgagcacggagccatcggcccctgctcaagagtcccagtcaggtggagccctgtgcttcgctgtagagctgttcaggaaattgacaaatttacagccctgtcgctgccgtcctttcagtggggaagcgcggcttctcttccagcaagcggacttagatgtctgtttactgtttccctcaaatgtgagccctgctggtgatgcacgtcgcaaatggaagtaatatcatttgaagcagtcccgctagaagcccaggagcaatctaactgcattaactcttccgtctgagtggaggaggctgaagagggtacaggactggactgagctgaagtgaagaaaatagagcaatacacaatccttgactgcaagtagcaggggtgcctaaagaggtttcacttactgccttcaaatgaatgacaccggggtgtcacaggacatctaatattctgttgacaaatcttgctaagcattggaagtggctgaagcagtggcttcctgtatttttgaggggtttctaatgttgtattccccccttatacctctcagattctgcggattgttgtttctgtatgtacaggaatgccctgtgctggtggttctgaaatactaggccaagaactgcaggcttgctttattgttttcagaaactgcagtctactatttctttttctaatgagcatactatcattttattttatttcactgttttctattttcccagctttactaagttataattaactaattaaaattgtatctatttgcaatgtatagctgtgttttgatatgcatacattgtggaatgattaaatcagacagtctgacacgtccatcacttcacacttatctttttttttttgcaacatttaagatactctctcagtaattttcaaatatactatgctttttgttaactacagttaccgtgctgtacaatatatttccagaacttattcatcctctctaactgaaactttgtaccctttgactagtatctccccattcccaccctgcacctctcacccacccctttctcctctctaagttcaatgttttcagattccacgtgtaagtgagatcatgtggcatttgtctttctgtgcctggcttatttcacttattaataaataaactaagattcaaagctgttggggttttgtagctttcttgtaataaataatagccaattagttatcctgcaatgggcgttaggactcagacatttctctgtccatacttgaactcctataaaccttattacccagcacgttgtcttttcacagcctgatttatgctgtggatttgattgtttcctaggtatagtggaaaaagagcatctcttaataccattcatttattcagtgcatctttacttagaattttcttcaaacacggatattaagctgccctaagtggtctgtgtggcctcatctttaatctcatggccacaccatgaggctcctgttaataccctccccattttcaggtgaggaaactgaatattagaaaaggcaaataaattgcctgacgtcttaggatcatgaaagttgttctttgtctcattaagacatttaaggtggtgttagacaagatatacaaaaagtttagttacaagtcattagaatttatatatacaactctctgtcatgcatgctctctctctctctctctctttttatatatatatgtatataaaattagcccgttttcaagttgctaataaagacatacccgagactgggtattttatacaggaaagaggtttaatggacttacagttccatgtggctggggaggcctcacagtcatggtggaaggcaaggaggagcaagtcacgtcttacgtggatggcagcaggcaaagagagagtttgtgcaggggaactcccgtttttaaaaccatcagatctcatgagacttattcactatcacaagaacatcaggggaaagacctgcccccataattcaattacctcctaccaagttcttcccacagcctgtgggaattcaagatgagatttgggtggtgacacagccaaaccgtatctcctatatgtgtatatatacatatctatatatgtatatatacacacacatatatacacacacccatatatacacacatatgtgtatatatacacatatatatacacatatacacatatatatttgtgtgtatgtgtgtgtgtgtgtatatatatatatatatatgctatcctgtaaactgtataatctaatctagatgatgtgatgaaagcaagacatgggactatagtccccaactttcacaaaatatttatccagtagaaacatagaatatgtatccaaaatatgaatgtgaaaactagaatgtgatatgagatgaactttcagatcttcctcctaaatcaaaattacaatgacctgatttggatgattcaggagtgctttgaaggagatagtatattagtagaaacttgaaagaccctcaccgttagagataggaaggtaaaagattccaggagaaatcacaggaaagcagaaaaattgaaatagtgaaagatagtatggcttgggtaaaaatgtttatgaaagggtttagtaagagttaaagcaaaacagtggattcgggtgaggaaatggataacccgaaaaacaagccaatgaacttggtaagaatgaagtttctgaacttggaggtaccatgttcatagtggttttggaaagttttatttgtacaggcttgagtacaatgggttatggcagaagcttgggagaggcaaagcatgcagagaaattggccaggtggttgtttttctttgtttgtttgtttgtttgttgtttttttgagacagagtctcagcctgtctccgagcctggagcacatggagcgccatggtgcaatcatggctcaccgtagccttgacctactgagctcaaataagtgatcttcacaccttagcctcccaagtagttgggactacaggcatgcatcaccacgcttggctaactttttttttattgtttatagaaatggggtctagttatgttgcccaggctgatctcaaattcctgagctgaagaaatcctaccacttcagcctcccaaagtgctgggattacaggagtgagccatcatgcctggttggctgttcttatatagttgttaagtaacatagcatggcaggggatgcaacagaaatggaaaggaagatctagatgtgtgatatatgaaggagtggaatcaataaaaattgacagcatggtattggagtccaacatactggttcttaactagtgttcaaactcctgtcacttgttagacttgtggtttgtagacaagctattgaacctctcagaggcttgaagaagcaacaagcttgaggtttaggccttgctgagtcactgagtgtgtgtccataaggaaggacacatctgaagcatgaaagagtgatcaggtgaggataagagctgaataactaaagatgcgaccctgccagtggtgtccaaatgtgttgataaaacccaaaacagttacttaccaagtgtcaaatgaggattacattgatgtctcatagatgtaagatctcagaggctaagaatactcataagggactgtgggtagtcctcagctgggtagaggaaaaaataaaataggcgttctaagggaggatgccaatgtgagtcaggcttggagacaagaatgctccctttgcatttcaaagagcgtgaaaaccactttaatggactgcaaaaacataagactccaaaagaaggctggggccctgtgcaaattgcctttggatttgcagatttagcaaataaaaatacaggagagccagttaaatttgaatttcagataaacaacaagtaatcttttttagcataagtatgcactgagcaaaattatcaattgtttatccaaaatccaaatttaactgggtgtcctatattttatctggcaactcgatgtggagtgccacaggaaagcatttggactttattcagcgagaaccatttgagtggtatctgagcaatggagtgacaagataaaataattcttaggataattaatttggtgtgcgggatagaggagacgagacctcgaatggagaggacagctgtgatggcgtagggataacacggtgagagctgatgagaactcccctttcttctattatcgtctgtcaacgtggatttccattctgtcctgtcactccagttgtccctcattcctgatgtcacctacatctcctgcagaatacatgatgacctgcacttcttgaggttaaaatttctccttaacatgattccttctttcttttgtttttctatctttgtcagttggcagcatgttgttaacacagtagttctaggttaagtaaaatcatcatttctcagagataaaaatagttgtctattttcttttcaaacccagttgtaaaacttgtgtgagtccaagttgggataacttttcagtctccttttctgcttgtacctctcaatgcatctcttcagaagattccagtaagatgtccacagggtacacaacataagttattgaccatttggggttggggggtatctgcttatacgacactctagccacactgtaacagaggtaggaggttagagatactcaagctcccctttgtcccttttctgcgcctcaaaggggtgacataaatacaagggttgagggaaatgggaccttagagacaaggagaagtctagcagagatgactgtggtgatgctgcttacaggaaacccaggccctgcttgaagaaaagccaaagtcataggtgagaaaacagtggcaaggagaagacacaaaacatgcagacattcactgaagactaagattaagccatgattttaatacgtcctctccaaaattcatggtgaaactttattctcattgtgcacgcatttagggagtgattcagacacgatgactacaccatcataaatggcttagtgctttataaaagggctgggggaaactagctttggccctttggcccttccacattctgccatgtaaagacacaatgttcatctcctctggaggatgcagcatcaagatgtcattccctcaccaaaaactgaacttgccagtatcttgaacttggacttcccagccaccagaactatgagaaataagtttctattctttataaattacttagtctcaggtattttgttagagtagcataaatggactaagacaagccataagaattagagctcacaaatcaaaggcaagaaatcagagtggttcataaactcaacctgcttatggttgtgcagggcacttgggtcaagggagcaagaggcactgaaatctagcttaggatccctttgccaagcagtctacatggttgcatccagtaaaaagggacagctttatcttattagtgtgaagatactctataggctagtggtgggattacaccatgcagagtgtgaatcctggcaagtagttgaaccgtatgatctgatacttgatcatcctgaacctgagtctcttcacctgtaaatagtctaataataatacccacctaggctcattctgagggttaacaagattgataagctataatatacaaaatttttatcataatgactggcatgtggctacaaataaataataaccgctaccaggaaaactctaaaaaaaaagacccaaagggtgtactaagctatttagaagtcaagtaaaatgccttgaaggcagatttaactttataaagataatgatcagcaaacttattctataaagggccagatagtaaatatgtaaggctttgtgagccataatctctcttctctatcccatatacttaaaaaaaaaaataaccctttaaaagtagaaaaatcatgcttagctggtgggcaataaaaaaaacaggctgcagactagatttggatcatgtactatagttttctcactcctagaactcaaagagaatagtagtctatgagttcagaaatttgggatacctatgattttagcatggagccaggcaacaaacaggtagaactcattacttgcttgccctaaggcctcagacttacggttgatgagagactatttgtctagttcaagattagatgtccaggtcaggtacagtggctcatgcctatattcccagcactttgggagaccgaggcaggcaggatcacctgaggtcaggagtttgagaccagcctggccaacatggtgaagccctgtctctactaaaaatataaaaacaaaattagccaggtaatggtggcgggtgcctgtaatcccagctacttgggaggctgaggcaggagaatcgcttgaacccgggaggtggaggttgcagtgagccaagatcacgccactgcacttcagcctgggtgacaagggcaagactccatctcaaaaaaaaagattagacgtcccatcccagtacaaagtttagcatgctgtacaagcacaataaatgatttcgagggaatggattgaaatgtttcaaagtttgttgaggatgggtatggtggatcatgcctgtaatcatagcactttgggaggccgaggtgggaggatcacttgagtacaggagtttgagaccagcctgggcaatatagtgagacccccatctctaccaaaaaaaaaaaaaaaaaagccagttggttttttcagctagattttttcatctgcaaagctaagagaacaatggtgtcaggaataaataaattactatataaagtgtatttattataatgctggtcacgtagtgacaataatctcatcctcatcatgtttcagtgtcttctttgtgaatatgtgcttaggaatcatttcaaattattgtgtaaactcttatcacttggtataaaaggagaaactaaaagttttaaggataggctgactaaaagcagagaaacaagaacctagtctatcaggaagagtacagttatctcagaatgatgatcatttgttcttttgttctcaaaacaagaccttcaacaaaagtcatggctttctacctctgatgctgactgtgaacgaatctgagcctttactaactctcatgacctttgtcttcttccatcttcccaggtatgaggcaaagattaaagccatagacgctccttggggaaaggtgctgttataacccacgtgggtatcattagcttgaaatgtagaaggatgaagattttgaatgaaatagagactttattaaggagtaggatgcctgtagataccagccaattcatgctgtaaggtatttcttcaatacacttcttgtagaaaagtaagtggtggttacaaagccatgatattcaacttagctgtcaaacaagcagtcagcttacaccttaagggaggaaggaaactgtttgaaatgttgcagaatgtgggacactgtaggataatgaggagtttctaatcaggagacagtacttatatccaaaacttgttagcctatgccttgcctcatcggcaaaatgggacaattggacctaacagagtgtgtgccagagggtttttatgaattgcttccaggtgaatatccatgaatctgatgatacttgaagacactgactctcataaataaatgaaagccaaatttgaaaacacatgtgtagttggaaaggcgatttcaaataatcgagacatacttatcctctatttttgaaatgaggttcagaattcagctggaattacaaggctcatcaaacactttgaacttgatacagtttaaataggctcatctgagcaaagtacagaacagccttcatttcccaggttctgtcagtcagcctgctggattgactggtgatgtcttgattgggtatgattccccttgactcatttctctgttgctggtaattaaaagctgtctagttttgttctcatttaacaataagtgaaagggtaatgtctgccagacttttccattcacttggtgtttgtaacagttgagagccttggagcaccatgaattctaagctgaaggtaactatcagtacagatagtgtattggtgttttgcacctgggagctgactataaacctcaaagccaatcggaaaacagtccccagggtaaatggataaattgtcatagatgaccttctcctctcattccagctttgaaaaacagaactttctgtgagtaggtagaataagctgtctgtcatttgcagtttccagcagtctctgagactagtgcatgtgcctaattttacactggaaggagaaaccatgtcgaaacgcagaaggcaaaataagagttaggctctctctaggctcagtatgtttagttctggttcttaaacctttcccatcattatggttttaatcattccgatcagcattattataatcacaaaatgtcagcctaagaaaacgataatctcatcgtcattatgtttcaatgtcacctttgtcaacttgtgcttagctatcatttcaaattactgtatcaatgctgcaattagatataatttgtgatatgaccagcattcacaggtgagtagtttaaaaaaaaagtctcacaccaactgaaatactttattattataggtctattctttcagaaccaagtatgtttaatgtgtgctttcatttgagaaatatttcaaatcaaaatgttacattttaagaatacatgacttaatatttatgacttgaatattataactgtgtgaatttgaagcactgaaatctcccattctctataaattttattattaagatggcatatggaggttttttcaggattgtcctcatgcatgcaattaatgaaattcaaatgtcttttttttaaccagtaaaagtgcttattgaaattgaccattctgtaatgacttctactctttcattgcacagaagcataggtttaaaatattttccattctgttaagttttcttttaaaccaagataagattaaggtataagaaaggaagagaagtgatgatttggagaaaggtttcctaccttctcttacgggaagatgagacctaggtttaaaaagtaggactggttgatcaagcataaaagtgatttatgaaatatgacatctctgtaacattgagaaaaaaatgttttccttcattgagtgctttcttccatatgcaaaatattgacacatccctattatatcaaacaaaagccttcattcagagagataattttatagagcggctggtatcatgtgatcttattaatatttatgaaatatgataataatatggaaaagggggaactggaatacagccctatctttctagaccctattcatttcagcttcaaaatgttttttcatttcacacatcagacgctaattagcaaatatctaattagtgttagaagattaatcgctcatgggagttgttgaggctttgagctttcatgcatgcaaaaacagtgccactttaggtgcatttgttaaggtacagtaactttaagtgatacaacttttatttttcttcgaaaaatatttaaattacatcgttggagtaaatttaggctcaagcaacaaggaagcaaggaacacacaattgaaaaataaaaatgacactgtggagagccacatattcagtcaaatctccaagtgtcaggcaagggtctactctgttttaggcactgtgggaaactatcacaaatttagagaatcatcaagtacagctcctgatttgcagacacttagggaattaccataggggatcaaaatccaaggactccaggccaaattcagccagacatgtgtgtgtttttgtacagctgtaaactaagaataggttttacatttttaaatcattggacaagaaaatgaacaaagaatgatatttcatgacacgtgaaaattaaattcaaatttcagtgtccataaaaaaaattgtgttggcatatagccatgctcattcgtttatgtactgtctgtggctggtttcacaccaaaacagggcgagttgagcagttgcgacagagaccatatggaccacaaagtctaaaatatttattctctggccctttaaaggaaaaatttgccaccccaaaattaaagataaatatctagatgatagagcagagcagctttgggagtcaggtagagccatatcagttccgtagtttgttacctgtgtgactttggcaggtgatttaaaatttctaagcttctatttatagtgtagcaattatgaatctcttcatagatctatagaaactgaggatttaaagagttgaatgggattacttacacaaagtacctcatctgttttctgacttatagtagataaagagtaaaagtcactgccttggcccccatagtttccaagatacaacataaagttaggtttctttatgaattctccctctcaccttccttagaaaggttcctaaatggaagggcaagtggcccagaagtgggaacggtactatttttcacctgtttcatgaataagatggaaaggggataggtactaaactaaaatgatctcactagagatttgtgcttctaatattataggactttgtccccatcttgtccccaaatgcccttaagcatcaatcccttcttctaataaaacctgaagaaagtagctagcaaaaatgtattgttaatgcaagtttcaatgatgttgttcttattttttcactcgtaaaaatctctgttcattccaaattcctatttacaattcatagctgtcagatctttcatttaagtacacacatattaaatttattgactatatcctgcagagttaatgatgggtaactcattaaatgccacggggagtctgtagtttataagtaaaaaagaaaattttagagggtgaggtgttttttgagagagaggtttggagtaaattaaaaactttaaaaattattctacaagctgaaaaatctctgtttcaaagcagcaggaattttaatcaacacacacacacataaagagagatagccgtctcacttcagtgttgtaaatagtaggactggcttctagaatcaatatatctgcactgaaatttggtcataattcaaattgctttaagtgttctttggagacaagaccaaaaactactgaaggggtttaaagtgaggtttaaaccaaagatattacagcctccaatgtatctctgatacctccaaggagcattaattcatttcctctgaaacaatgtgcattaggaaaatattttgaaattatactgattttacatgacagatacataaggcaataatttgagaaataaaatcacaatcatagaaagcatataatcatattcctgaaatataaatagcaattgctttaggggattgttagagttggggcagaacaagaaaagctagtgtcctgaaagtttaatcaatggtcattgactaaatggtcatgccgccattttagtcaacggtcactctgtgtactcaacatgcctactcagtctggaagtatcctgggcagtgggcaagttgtattcagagaagggccagacatggggaatgaccttgaatcagatggaaggatttgccaccaattgcataaggtaagccagaagcccttgaggtctctcaccaggaggttttccctccaccttccaaaagccagaagagaaggaagaaagaaagtgattataacaaaaaatgccataagtcagtcactaagaaggcgctttgtattgaagagaaggatggtttaacacatacctttcaagagcttctcttgaaaacaagtgaacttcatgaagatttataaacatggtctgcccctaggagctcaccatcaggtctttccttggcatgtatgtatctgtacatcatgtgaataagaatcaccatgaatgggggtgttatcaaaagatacagataactagattgtctccctgtcttcctccttctgaatccatgaagggtcaagcccaggaatccaaatgttagtgaacctctcaagtgattcgtatctacctttaaatgtgagaaaaatatccctgggtcattgccaaatatgaaaaacagtcagttgcatagcttttgtattgtcattactggttccttcatacataaaggcatctctcatgaagtttttgttgtttttcccccaaacaagaactttacctttgccaaccattgtattttctggttttttttctgtcaactacaaaggatttctacactagaaattcggaagattttataaaaccaataatgagttaggagtcagccacacaagatggcctgaataactggacgtcacagttatttcttgctttggaccaaaccaccccaaaacttaggagcttgtgagtcaactgagcaattcttctgctggactcccctgggatacgtcacatgactatatttgtctccaagcttcagtggagcctggttggttctcaacgtgtaatcacttgaccagcacaatcagtatcacctaggaaattgttagaaatgcaagttctcaggtgccatcccaggactactgattttaaaactttagaggtggagcccaggaatctgctctaagctggcttccaggtgattccaatgctcactcaagcttaagcacttccgtttagagagcatcggagggggtggtactcttatcatcctgcaagctaggctgagcttcctcaaacggtggtaccacattccattgggctgaaaacagatgttgagatgcctcttgagacctaggcccagaagttgtcctgtgtcatctgtgacaccttctattggtcaaagcaaatcacaaggacagttttaattcaaggggaagtaaaatagactctttcctcttgagaggagtggtgaagtcacacagccaaggtgcctggatatagggatgggaataattgttctggccaccttggtaaacaaccttccatactgagtaataatataatagacttaatgctttattctcaccaagattccccaatattttcctaaaggatttttctcttctttgcaaaaacaatgcctattttatccgttttatagagcaactgcaacaaagtaacacaaactgggtgtcttaaaacagtagaaatttattttcacatagttctggaaggctggaagtccaaaatcaaggggtcagtttgaccatgtgccctttgaaatctgtaagagagaattcttccttgcccctttctagcttacggtgatttgctagcaattcttggtgtttttctggcttgcagtcgcagcattccaagctgtagctcttgtgtcacacagagttccccttgtgtatctctgtgtgacattctcttcctgtgtcttaacatcatcttcctataaggacataagtcatgttggataaacatggctatgtttactaatccactatgaccttgtcttattgaactaactgcatctgcaatgaacctatttccaaataagatcactttctgtggtactggggtccaggacttcaagatcttttgggagacacaatttgatccatagcatctacctggatttgagtcatatggctgactgtattttatcatatctgaaatcaagaagtaactgtactgggaggaggggcggattctaagacctctactcacctctgaagtcaccgcttggttgtgtatggttgaccctcttgtgtgaatagatatataaatgtttgatggtttagtaatcttctggacatggggccctggagagaattatcagcacagaatgtgatacttacgtgggctatgatggaaaagccacagaggatggtatcttcctgagctctgcattttaaagtatcctattacatagcatgaaaatcacgcggtgccatttagcataataataccaggggcacacttaaaatatcatgttatagcttggaaacattgagagctacaatgggatttcaattgtgtaaagggatgtttttacatcatcttccctggaatttatcaggggcacttttattctattatatctctagtgtaatgagactcatgctttttgaatgtttagaccctgcctatatatgtagagtttttgtctagctatatttatatattgattcattaattcatctacttattattcatttattcatccattcatcattcacgctttcattcaacaaatgtgtactgggtgcccctcctgggagacagacactagggagtcagaaataataaaactaattccttccctcatggagctgatattctaaggagagatacacaattttaaaataacgaaaagcaaaaatacactttcaggcaataaaatgtactatgaagtaatatgtgtgtaattggggaatagaattaacatttgtttgaataactctaggcatcatgtgaaggtatattctgtaagggcttgttttttttaatatagcagcgtccaaatacatagttcactgtccctgagaatggcatggttactgctcagtgacccttttcaagtcattgaaaatattttctatttgctgctgatctatttcaataattgagcttgttgggacagctgttatgctatgtaaagagcggagattttggctcctgagaaccctgggtttgaactgaggattggtggtttggttatttattctctctgagcttggcaaatgtccctactaaatgaacataatactgccttgttcttaggttgtcctaaagcttacacgaggtgacatatgtaacactaccaaccacaacctccatagataactgcttaacacatatttgtacacagttttctctgtaatttcattcaagcaatttgggctttttggtggtcttctaaaatggccacttttaaaaatagtctatgaaaacagatcagtcaaagatcctcttctctataatgatattactcaggcacctgcacacaatgaaagtccaacattaaagggcagaatcttgctagataaacatgttttttaaaagatttaattgtcacggctcccaaataaaataatcgtggttaatttttacatcttcaaacacgtatgtatggctttctgatagtgcattatacatcaaatacaataaaaaaggcattaacaaaaaccacttacactaaaatctgatttatgctttcacataagatacatggttttatgcttttatgggtacatccaaagtttgtgaacttttacaaagccctatttaaatactctgctctaagactgcattttatcttcctaatttgggcataataatcttaattatatctactgcacaggctgttggacaaggttccttttcgtgccctccatgagtaaatttgaccatacgtacagacttgacaggccatacatacaaatgatagcaataatattggtaaggaacaaacttggcagcatcgtatagaatgcatttcaaagtttagtaataatgatttgcaaataataacatagttctttagaaaaaagttattgacacttatcacatatgaagcagctcattcaatgttcagaacactcattcgagtcagaaaatattattgtcattttatagatggagtacatgagacccagagaaattaaataacttctccaaattcataggctagaaagtggtgaagcagaggtttgaactcattattcttcctccagagtttatacacttagctgccatgctgcgtggaccacctaatggagaacacatccgggccaagttattcatctcaattgttgtggggctacacatagcatgtcttctttttttgtttgtttttaatgatcataagcaaatgcctgactttcaaattattcctatattgaatgagtcattgtctactggaattgtctcccataaatggcatgatctccctaggaaccttagactgtgaactttatgctgctgagctttcaatcctagacctgaaaggaaatctttaatcaagaaatggagtctggtgcctcagtgagctcagacctcccctcgatgactaacgctaagtctttgctcactgctgaactgaacattaaagtgacagaaggttgcacagaaggtaaatattctttgcgatgtaaacctaaattaggaaagagagggtaggattgatcgtgaatgggtgcctgcatttgatagtctcatgatttaggtgtcctacggagagagggttggcagcgactccagttaaaaaggggaggggatgctccgcaaggcagaaataatgacaaccaagcatcagatattccatgggctcttggctttcttccatgctcaaaagactaaactaacctctcggtcaacttcaatgtgctaatttacaacttaacactcttaggccatatttctgtccctttccccataattgacacctcaatcattatgctggcctcctctcctgggcactctcagtatacagactctgcttatctcaccttcaaagtggcagtcccattgcctgcaatgatacattcctaacatgtcagcccaaagcacagagttattccagtgcgacttaaacttgaagtccactttttttgatagaccagcatctgtctggaagtggaatcttattattattattattttgagacagaatttcagtcttgttgtccaggctggagtgtaatggcttgatctcggctcactgcaacctccacctaccaggttcaagcgattctgttgcctcagcctcgcgagtagctcggattacaggcacgtgccaccacgcctggctaatttttgtatgtttagtacatgttggccaggctggtctcgaacacctgacctcagatgatccacccgcctcagcaccccaaagtgctgggattacaggtgtgagccaccgtgcccggccttggcggtggaatgtgaatacaggtatttgctctgcaggatccattaagagcagcggcacatgaagggcaaagagtggttttggcattacaaatgcttctcaaccacacttttgtttttcgaaatattttgaaatgtttatcttaaatttatttctttttaatcataatggagattcatgccaaaatacagaaactattttgtctataaatgtggaatcctataatagacagtggagctacccggggactttagagtttgcacagtttaactttctctttacagatgtagaaacggaggctcaaagaggtcttatgcctggtccaaggtcacatggctagctgagtatagcctcataatagtccctaagaactgaagatgtcaaaatatgcaatgagctcgttttctctttgcacatttaattacttctatttttctgttttatcacatgtccaacatattcttcaacccttcaatttaagggacaaagggaaaggtggagacaaggataggaataagaacacattggcatctattaagatcatttacaccaaatcagaaacataaatataatccatcagggcactttctcgtagcaaatcaaggagttttcccttaagtaattataaaacaggttaaaggaataagaactctggtcattcatcgattcttgatttttattcccagacttatcattccccaggatgagaggtttgagagaatagatacatttgtaaaatgactagaataattttacccacctcagggattcagtgagtgtttaataccataaaggactttgagatagtcagatgaaaggtgctttagaaggcagacatgattactggattagaatttcagagagtgagaaaggactcttttgtgttgacagacttttttcttattctttttgcagttctatagtggtttaaaattttttctcctaccaatttcttcaatttcagatcatgtccttgacttggtactgctctcgtgagaaggaatgtgtggttggtgtaaactgtctagctccctgtacattttttttctaataagcattttagcatctttgaattcacaaagctaattttcctcattttccacagtggcaatgtttgtaaagcacaatgaaatcacctggggacagtgttctttaaggcagtatttattacaggtcacagacacacacacacacgcacacatacacttccctgtattgaattgtttggagaccacaccaattttgtttcattctacaagggtttccataatatcattaatctctctcagctcttcaagatggcctcttaccatattctgtcaaaaaacaagatatagaccatttactttaaatacctaaaaataaaaatgctgaatcaaatggttacacatacacacacacatgcacagacacacagagctctctaatgtatttttcagttgttggaaatctgtgtgcattgggtggggggagcaatggaacttgcagtttattgagagtgaaatgttctattgcattagttgtaaaatgttctttgctattaaaataagtagtgctaattaataatcctgcagaattgtagagcagcctttgaactacaagaatagattcttaatccttagtatcaatagcagaattctccttctcctttctctctccgtccttcctctcctgcctctcttccttctttctagaagtatctatcgcaaaaatactgtgctaggaactgtgtttgtggtggtatatcagctcagccaatcgtagcagagcaatcttatggacctcacccaggaatgaatttcaacatatctttggtgtgaaaagactgaggataacaccaaccccgaatctataagctttgttttattttatgtgaaaggcctttttttccctcttggtcactcctgtactgtatctagtacacttgaactttataaggctaatgaaaatatctgtgtcctaaaaataaaatgtactggctccaaaatgaaaataaaattacaaaatccaagttaattaagtttgattaaatatctactgaataacaaaactaacatgatatcagctagtcaactgctatccaagtcagctgttatgcagttatatataaatcagatatttatacatcttgtaactattagatttctgttttggcctaatatggaggagtggggttttttcaaaaagaagcagcctaaaaacaatgaggacctaaagtgtccctcttcagatgcttttgttttcaaacaacatctcaataatggcaatggagatttgatgtatctgtaccatagatttaaaaaaagaactctacctgttaccaccatggggatggaggttattttatcatacacagtaactttgtgatgtgttagctgttttttgttttttttttatagtgtgaatacatttccttctgctttttctatcaactaaaacgttgctgtgagctgactttcgttccattatacttctatgcattcatggattcctcctttaaaactattgccaggtgttagcatcttccctgagtaatttcaggcatttcctttgaatgaaaatggctcacttggaaggttgtgaaaggcataaccatgtggaattgagaggattttgtgctgcgatgtggtgagaaggcttgccagaaattgcctgtttcaggctgatgatgcaaaactagacatctgttaaattaacatctacctaacgttttgccttcagtcaaatgcattttttaaaaaattaaatctctcccactctcttcactttcttttttttccactgtcaaaacaatctgtcacaagatatttaatttctgtgtaatgggttacttaaagaaaccagcatatggtgcagtgaatatacctagctacaagctagaggcaaatgtacgttctgctggttcgctgtactactgaagcatattgtgcccagcatagatgttattatggtgctggattccctgagcgctgatttacattagtgccagtttctcacaactcttgccttttaggatcaaaatattagtataaatattcttgttccaccaaggagtcagaaatcactttcgactttggttaagtggtgggcgtttatggctctaacatttcagggagggagaaagaggaatctcattatgcagacatcttcgcacacccctcctgcatccaagaatttgctaatagcagtcagctgatctgtggcctggcagtatgttctagaggagtggaatctttcacacacttacactgacaacaccccggacaccgcgtgcatccctgcaggctagagtactttctacacaattacctttttttttgttgttgttagtgtgtgtgtgtgtgtgtgtgtgtgtgtgtgtgtgtgtgtgtgtgtgtgtgatggagtgttgctctgttacccaggctggaatgcagtggtgtgatcttggctcagtgcaacctccacctcctgggttcaagcagttcttctgcctcagcctccaagtagctgggactacaggcatgagcttccacgcttggctaattttcgcattttcagtagagacggggtatcaccatattggccatgctggtcttgaactcttgaccttaggcaatccacctgccttggcctcccaaagtgctgggattacaggcgtgagccaccatgcccagccataaccttctcatatagtggagttgtcttattgataggggaggagattctaaagtccctgtcattatggtgatgagagattaaatataatcaaaattacttatgaaaatcccttgagccatccatgaagtatgtgtacctccttgtttagtaatgcatgtgtatttatatatggtaaagtgtaaagtgcttattacgtcagaaaatagtgttgactatgtgtcaggcccttttctaggccctgagaatgaagcggtgaacaagaaatacaagattgctgttgtcagtgcactcactttcccatggaaagagacccagtaaatgcatgagcagtaagcaacctgaaagcaaaacataaggctatagattctttatccatctgcccgctcatctatctatctatccattcatccatctatacatctgtcaacagtaaaccataaagaagtacatagtaactgtatgtctttgacactaaactcatgagcaaatccataacaaaatagaagtgtataggttattttatttctccataacacttaaccaatctctctatatggatatatacacacacatacatacatacacacacacatacacgcacacacacaaaaataaacccataaaatataagttttgaattatttaatctatctatgtattcatttgtttatttttgccaaaagcctggcatcaattttgtgtaagttggacaaacttactccattgtgtgcctttgaggggcacagtgttcatatgttaattcatttctatgtaatttgaaaggttcccagattgctccttattgggacagctaaaggcaatctctgcagtacttgaatcatgaagtctcccaagttggtgttgacttctaggctactggtgagggaacaggggaatgtgggtgaactccttcaagccaggcagtcacagaagttaacagctccttggcaattgttctcaaatagttcattccctgaacagctaggttgtgggttttctggggagaaaaagcataatacctgcaataaatcacttaagtctattacttattaatcgaaattctcaagtgtcctgaaaagtatctctaggccattgtcattgcaaagctatcacaaatgaatgagctaggcaaggcggcaaaattcttggtccacttgtaccaaatagcctgaaatagctgtgttattaatcagaactccataaaatcctaaagttcaagctgcataaatatactcaggtgcacgttaggcagagtcaagtgggtgctgtagtcctttttcagtacatcagaaaacttcacttgtcatcatttgttttttatttagtattaattttgagaacgataattctttcccatgatttttaccttgattctctggagccactaatattcatctaatatttttgaaacgcttcttaggaagccaccatatttagtcaaggctgaatgccactgagattactaagaacaaaagatgagctcccatccttccccccaacccgccgcccacaaaaaagggattatgttagcattgtgcagacacctattgacattgtagcctggtaatgctaattaccactggaggcaatgcccatcagcactggaggagtttgctgctttgggcatggaagatgattggcttgtctgcaaagcctggatcataggaggtattccataaaggtgtgttgcgtatatgactgagatttcttctctttctgtctctagggacataaaaagtaatagataactagaggagttacattcttaaacatcctaatggcattgcccctcatggttgcatgaactttcttcatttgacaaatacttagtaaacacctactagctgccagacactatgataggtgctgatgtgcaatggtaagttaataatgaatgaatgaatgaatgaatgaatgaataagtgagacatagttcttgtccccagaacagaattattgtctagtagagaagcaagacattaatcaaataggcaaccaataaagacataattacaagctggggaaaatgctttgatagacagacatggttctagaggacacacagcaaaggaaactgatgaagcttgatgggatcagagaagatttctctaaggaaacgagtcatgtgctgaaactaaaggatgaagaatagtgaactatgtgaggagcagggaagaccattccggacacataaagacatgagcactggctcaatggtgacagggagcctacagttcccaagagttgacagcaggtcagtgtgtcaggaacagagggctgggaggagggtagtataaatggggctggaggggcagcaggacctaaacttttgatagtactgtgtcagtaaatagcgctgatttatcaaaggccaactatgaatgtataaacaggtgtcaaagagcaggacagcataggaagtcatctactctcacatagcgtccagatctgtgcctagctctgggctgggtaatgagacaaggagatgggaactcagagctttgtattcattacaaactagagtggtggataatgaaagctttaagaaatgttaagggaatcatggacgtcatatgtgatgaagaaaagattgggggcgggggttggaaagggctttcaggatcagcatgccttctgcacagctgaatggtgcctggctaatttccctttctaatgagaccagcacaaaatccatccatttagactattcagcttttaggtaaatggaccaagctgttggggtagaggggaaagaggggttgacattgatggatggagttaaataccagagtcccctccttcacacagacttttctaaagcagtattgtgatagaaagacctagaagatcccaggtgggccaggcaggctggacagagcccagtgtctccctgagaaggggaggaggagggcgagatgggggtcttctgtcagcatggaagggtcctcttcaggtctcacaacataatggcacatggcgaggagtttctcaaacagggcttgattctcatgggaagtgtctggggatcattctataggctttcccctggcacaatttaattttttgtccagaattcccaccacagcaatatccattttctcacttattttgcagtaccgccctccaattttatggacaacaaattgtgatttatctagactctaaaataggagtgaccttgttctggaccagagcaatggttaaattgaagtaaggaaggttaccatgccttggtgcaatagctagctgcattatactctaaatagaaaagatgataacccagccagactccttggaaagacttgagcatatgtgtttttaaaaggagtgatgattattttcattcattttctgacacttgttctgatcagatgcttagattctgtgacctcacgatacagtgttcatcatttaaaggagtccaatggcaaaggagattgtgggttatagtcctgctttgagggtagatggagcagtgacaggtacattcagagctgtggatacttagctgtggagaaaagacacttccaatggccaccattctaagcgacttttatggttaattctcataacaacctcagggcatgtgtactgctattttttgcactttgcaggtgaggatactgaggcacagaaaggtgaagtaagttggccatggtcactaagctggtacacagaggggctggaattcagacccaaccagtttgaccccagggcctgtattcctaaccactatcagtgtgaccaagaagtggattgggccaagagggtggcaaagataagaaactcaagagcagctgtttactttcaaaggagcttctctctctctctgctcctcctcctcctcctcctcctccaacctgttccaattgctcagagtagacagatgcttggggggagtgtgagtaggaaagcaaagaaaatccttataaattaattttttttcaatagtcaggattaaaaacacacatttcccatcactcatctctctggaaagcaatggtaccaattgaagtaaacactttcctttctgccgcagcacacagtcatgcgcgtgcacgcacacacacacatgcatacacacatgcacacacaaacacacacacttgtttccattggctcttggaaaagcatttgcagctctgtctactttctcagatctacctaatttggggctggctacgacaaccaaacacatgagctgctttctgggagatctcagcagtttggccttaaaaatagttttgacgaatgaattttaaaaagccctctgagaaatactgaccaactgcacctttgtgtttaacatttgaagcttactatggtaatttttcccttttctttttgctcatttatatgtttcaaaaattcatattcaatattatatttaactcaaacttggttggataccctactgtccgttaaaccctggaaaaacatctcacttgtaagttattgtcttctcctcactgtacggctttttgtacaacataagaagtcattttccacctcatatttggagatttggccttccattcatggagggattgctggtatggaagtcgctagcttgtgtcacctgtaggaacgaggggaaaagaatgtgtaagtcagttggcatgttctttccctaaatcccctagagacaactcctccatttgctactaagaagaataaatccctccctgacatgttgggtctgtaactctcggaatcagtaaacacagccaatttcaatctgactgtcggtcgtagcaactaaattctgggcctgctggagagctccaaagctgcacggcaccctctgaaatgagcttggtcgagccttttcaaattccataaggcgacaaagaaacttcaacgacatgattgcaaaaagaagatagaagagaaaggaaccttgctgttttcattaaagtgagccgcattagttctcaaatcctatgtttggggaacccctaatggttaaacttacacaagcagaaggaaaataaaatgcccttattaaatttcctatgaacatgttaaatattttccctttctcctgtctccatgtcttagactttgagtcattttgcctctgtcatctgtttccagctcagttgagttacaaccaatcagatatgaggaaaattagattttaatggaatatttgattttcattgcttaattgatttaattgcaagtttctatttcagactggaagaaatgcaaagattttcagtcaaatgtagaaaagctctcatttttctgtgttcaacaatgacaaacttaattcaatggtagcctggattctaaaactttagaggaaggcaataatggcatctttctgaattgttattctaagtctacagttcagtttctctttcatatatatgtatgtatacttacatatatatatatatatatgtatctgtcacatcaaaattcagcgtgtacgtttgcttattctagttgtgttgattttgattttgggttatgaatttttgtttgtcagaggaaacaatacatatgtacttatgtaaacccacactttgtttccacgggcacttaatgtcaccaaatatttccttttgttgctaggtagaaagacagcttagagagatagttctctagccaccatagtaggtcagtggacttttctgagctcgcttagaccacccttgataagtagaattcagtctgtgtcaatgcttttgatgtatactggctgcctaggacattggggtgagaagaatccctgggagaacatgcaaggctcattcaccaatgcggagtgcagcaagtaccccccatcccttggtctcacttgtattttaggtgcccgtgttgatcacagcatctcattttccaaagggtcttctcacagcagtgggacagccctgcatgttagcacagtttctgaattctctgaactccttataatgtcaattagggattctaccagaatgcacatttctttatttaaaatgttaagttttttattgtttgtttttaatctttattggctttgggaaatttaagagttttctaatcattttgagagagttttctaatcattttgagaaaagcgtgtgtgcgtgtacacagaccattggcatgtgaaaatttaattatggatgatccatatttgaatttcttatcaagtaccttatatgcttctttgtgagtttttaaaatgtggaatataattttaatataaaaatcttagcctattgtgtggttatgtaattttcatcaatattcttaccatcacgattgtcaccatgatgcctattttgtggagacttcctcttctacaagggtaggaaagcaaaaaagctaagagcatgagctctggagatggattgcctgtgttcaaatcccagctctgccagtgactcattatgaaatttcaagcaagttacttttactctcctgcatttattttcctcattcataaaatgggaataataacaaggcctagctcacaaggttatgtaacagtttaaagaagcaatagatttaaagtgcttggaagcatgccaagcatgtaggaaatgcttgataagtgcactgaatactactgaggttataatatgagcccgatcctagcctgagactgtacgtggcttatttcacttacctcagtcatacccagtaggggggtgattctgccctccaggggacattagacaatctctagagacattcttgattgccatggcttgcaagatgctactggcatctcgtggatccagggaggctgctaaacatcacacagtgctcaggactgtcacccacaagagagaattatctggcccaacatgtcaatagtgctgaggttgaaaaaaatcttgatttaatccatgaagtaggaaatgtttacattatactcattttacagaagagagtatttgaaccttggagaaaatataacttctcatattgcagatttagtaattggaactgctgtgcaacaggcttttggagcaggagggtttattttgtttttaagataattgcatagaagatcttctaaaagccgtgaaacagaaaccttcagtgctttttggaagcagaaccactaaggaatgggttcaagcccgtcagaacagacactgtctggagtgtggcatcaggatgctagaagctccagcctgtgcctggtctgactttgaattttctggatcctggggaagcccatgaggcttggccacagtcccagggtggtggtagacactcccaaggctgaggtaggctttgtcttccaatagtcacagaagtttattttaatattttagcaactggtttgatcattcctgagaagtacttcaaacacataatttcacagatattgttacttaagatgaggccaaattgaaagtataaaaactgaaattgtctaaagcaagggtccccaaccccccggccacagaccagtagtgttaggaacccggctgcatggcaggagtggcaggtgagtgagcgaagctgagctccacctcctgtcagatcagcagcagcagcattagattcgcataggagcatgaaccccattatgaaatgcgcatgcatgggatctaggttgtgcatttcttatgagaatctaatgcctgatgatctgtcactgtcttccatcaccccctgatgggaccatctagttacgggaaaacaagctcagggctcccactgattctacattatggtgagtatgtaataataatagaaataaagtgtacaataaatgtaatgtgctttagtcatcccgaaatcatccccaccaccaccatccactgggtccatgcaaaaatggtcttccatgaatccagaccctggtgccaaaaaggttggggactgctggtccaagggaaaaaaaaaaaaaactgagtacatatcaattaggtacagtcagcagtaaaaatcatcaaggtataacacaaatgattcatgaatggggaacactttatctcagctagcccctgaggacaggagcaacagtgttgatctatacatcccagggcctggcacatagtgggagcttaatgaatgaacataaactcacaatcttactccatcattgtgcaatgcagtttgaatggttgtgacacccataacctcaaatatatacaattcagacctcccacttcatatctgagtagaatatggcagtagttggttggttgcacttctcagcgtctcagcctttgtattaactatggtccatctctacatcccagcaaatcatccctccgttgtgtccccctgcaatgtggatggagaattagctgaatatgcccagaaagccaagtgactcaaaattcatccccttcattctgacccccagtcaaatccagatgtcacaaaacagtttgtgatctgtcatggtcactgtggactgggtgaagaggccacaaccattagtggagatcagttctcaaaccattgctttaggaatgtttattacaggacttggtttctgactttctgagcacagctaaacaaatggtaatgcagtttacagtcctcagaaccatcattttaatagtgatcttcactggattaaaaaaatctctttttgttcttggcctcccacctgtagtttttttccttgttaaatacatgcgtggcccattgcagctccacagccattcatatctcagtgcctgtaggggtgggagtaagggggcatggagatatttcttatgtatcccatatcatagtattttggagagaaagaagtcttctcttccaaaagtatgaaactgttcatgagaatataatgtgtttgcagaaatcagttatgttcaatgggtaggtgttttcgtgcttcaaattaatatctgtcctttaaaaatagcagatgtttagctgtatatgtgggtggtcgacaaatgcaggcactccacatttgctccaagtgcagggctgacagacaagggtggctctcacgaccaaggcaatccccacccctcctctcacccctcccactctgtggcgatgcttccttggcatctcagatccgtactgttgtgcctcacttctcaaatgcatggaagctacacttcccagcacagtaacagtgacctgcttgaagtgaggtcttcagaccagtgccatcatcacccaggagctggttagcaatacagaatcccaggctccagtccacatctactgaatcaaaacctgcattttaacaccaccccaggtgactcttgtgtacattgaaggctgtggtcccagagcactccgtctctaacctctttagtctctcttactgcattttaccttttattacctatttctgtattatactcttcattttgcatgcgacagttgagggcaagcatcgccttatttttttttcttagatctgtttagcatgtaggtgattttcctagcacagtggtacttgatcaactcctgaatttaatgcagatattcggattataaccacagggagagtggtagtatgtacaccagaaagggaagagtgccacctgtaagggagctctgggtttaggcatatttgactcttccacttcacagctgggcagtcttgagcacattatttgtctcctctaagcctcagttgccataactgtaaaatgcagatcataattgctatctcataggtttgtttttaggatcaaatgggagcaaacatataaagcaattggcatggtgctaattggttcacagagagctctcaagaaacattagctactactatatgaattatcatttcagccagtaggttctatactatatcataattccaaaaagaacatccccacctcaactttaaaaaattaccctcatagctctcaactggggttgattttcctccccaggggacagttggcattgcctggaggcattagattgtcatgaactggggagaaggtgggctgtgtgtatctagtgggtagagttcaggaatgctgcctaacagcccgtgatgcacaggacagccccacaacaagccatgatccagcccaaaatgtcaatcatgccagttgagaaatcgctattatccacagaggaactgaggtaagcaaaatcaccattttttcttgaggatttaggtaccttggtatattcatcctctcaaatattaatgttgagcccttttgtcagaatccatctactatgaggcaaatcatttcctttggtacagaatcacaccctggaaaacctgatgcaacctgattaacctattaaaggtcataaaacaataacaattacattgcacatttcattctttaatatcaaagagagctaggttctttgaaatgtaaaacatcataagtgaaaggatagggcctgcaattcccccaggagcccaaggtcattgtataaataacattctggttcccctattaatttcactccattctgggatgtgcaggaggccataattgttagaggaagaggagaaggctgaacttttgctgcccatgacggaggtcagacagtgtaactgtggtccgtggttcaaaacagttgcccaaaatggagcaaaataaatgtccttacagctggtagaaagatcaagatgaaacgtctatgttgtttttcccttaaaaaatcagagatgctgcaagagctcccaagaaggtattaatttcccaggtactactgcaaaaataagggtgaggaggcgagtgttaggctttattcctgctgtgaatagattaagcagacaccaatttacacctcattgttaagagtaacttttttctgcaagtgagaccacatttacatcttttgtaattaagctaaaggaattttttttaatgacatttcccctaccacaaatcatgaagtaaatattttaagtgagatcaaatgctaacatgtatacattagaaccgtaaaaataaaaagagagacagagagacagagtcctagcgccacctttcagcttcgtcatttgctgggctgggatagtctctgtgcctgttggtgctttggttttggaaaaggccgggtatgactaagtgaggcagttaaagagatggtgagcgtggagggattcgctcttggaagggatggctgtgccagcttccctgaaagcaggaggtatggcagtgagttagtgagtgctcccagtcattcagggcacaccatccatcagcaggagcgtgaggctgcgatggcatccatccatccgtctcctgcatgctttgctttttggcaattttcgtttttaggaaaattgaacatagagagctgtatattaagagctctaacatcctttattccccacacaagagaatctagttgggcaaagaggcattttttccccctaacaatagagtttgcatggctgctagaaacaatacaattacggacccagataataaataattgcagaacaatggggagaatgaggtgtgggcaaggaggaaaatggatggtttcagataagatttgcacaaagattgagttggtgaggtgaagtcatcccaggtcacgtctgttctgcactaactaaggtaaattattgtccacacacctgaactgagagctggaggccacgctgccagcctagactgtgcctttgtaagatggaccttttctcctgagaagagctcagaatgtgaagtattcaaatggaagcctgtgactgctgcttggccaaccttgtgatcagtcaaatagaaaatggtggcaagtcatgcctgtaatcccagcattttgggaggctgaggcgggtggatcacctgaggtcaggagttcaagaccagcctggccaacacggtgaaaccctgtctctaccaaaaatacaaaatttagccaggcgtgttggcaggcgcctgtagtcccagctgctcgggaggctgaggcaggagaatcgcttgaacctgggaggcggaggttgcagtgagccgagatcgcaccactgcactccagcctgggcaacaagagcgaaattctgtctcaaaaaaaaaaaaaaaaaagaaaaagaaaaagcaagcctaccacttgtgatctacatgtttatggagcctaaatgccagtgtgtcacatccctgggcacatgcctaggtactgtagcaatgttggctcagtgtgcattctcaactctgatatcagcatgaaaagaccaagcctcagatatatttggctttatttttaggcttttcctgaaaaaggtgcaagcacatcataaactttgtcttccacaaaaagatcagatttaccctttggaggcatctttctccctgtgccacttgccttttaaattcaagcaggcttggagagtctccttttcttcccttgggttcctccttagcctttccatggtggctattctggtgagtactcgcctctctttgcttttgattgtggttctcaccacctgtgaaaagaccttctgatgaaatacttcccaaagaaccttcttgaccttctcttctccttgaccacaaggctacttctgttttctgccaagtgatgtctcgtaaatctttgtaagttgcaccaactgtgtgtccttacagagtctatccaatctcagcattgccattaaatatagaacccaatctgtagccctgggcaccctaaccagaagtattaattttatagtttagcaaatacggtaatgcaccaaataacaacatttcagtcagggacagacctcatatacaacagtggtcccataagattataatggaactgccctatatagtgtaaccgtttttatcttctatacagtgtttttactgtactttttctatggttagacatgttgagatattaaaatacttatcattgtgttataattgcctacagtattcaggacagtaacatgctgtaccggtttgaagcctggtagcaacaggctatgccatacagcttaggtgtgaagtagggtttaccatctaggtttgtgtaagtgcactctatgatgtttgcacaatgacaaaatcgcctaaggattcatgtctcagaatgtatccccatggctaactggtgcacgactgtacttactaagtctatcctatgtaccagccattgttctaagtgtggggaccaaaaagacaacttctgaccctcttgaagcttacattctgagaaagcgagtcagacagtgaccaaaatcagtaaaccatatagtgatttagaagtcttaagtgcaatggaaaggaacagaaagggaggatggagaattgggggcaaggagatgatgcagtttgatcagggcaagccctgctgagaaaaaatgattttggaggaaacacccaaacagagtgtgaaagtaatccatgttcatgaagaagaacctttgaggtagaggcctatgcagctgaaaagagaaaagtgagggagagattagtggagttgacatcggataaattgagggaagggcagagcatgtcaagtctttagaaagtcaagtctttaggaagacttgggctcctctgagataaggagctcatagatggctttgaggaggagtaagattatctggcttacattgtaaaagaatcaccctgattagcagagttggaaataatcagcaggggatgtatcagtaatttattactagataaaaaatgcagcagaacttggcagattgaaacaagaggaaatgattgttgctcacattctggtgtgtccaacaggcagttcttttgggggacttgcctgtactcacttgtacagtttcatctagctggtgggtttcatgggggctggactccatgaaatatttgagcgtttccctcctcttggtttttcatcttctaggaggccagaaaaggctttctttcatggggatggcattcttccagcagggcaagcccctatgctcaagaacttcttgtgccttttcttgcatcatgtttgttaatggcctattggccaaagcaagtcatggccaatcccagagtctggccaatcccagagtcagtatgagagagaactatacaagactgtgaatacacgaaggtaagatacattaggaatccccagcataaggaactgccacaggggcctaaagtagaaatcatggaaaacaattgagaggcgctacaaaatccagaaaagaaatggtgatagactgcaacagagtgctaacaatgaaagttttaagaagtacccaaattctaaatatgttttacaggatgaccttatttttattgtgtcaagtcagtaggacaaggctattaagcttccagggattggtgatggtcttattatgcgtgagatgatgtcataatatagtaaatgaggtcagggataggtttcttttattgccaataattattcaacgagttttctgtacaattgtaaacttagcaattcacttagtgccgtgactacacagcaccctgtcaatatcatcatcagctaatatttatcgagcaccctctgagtacatggtattgcactcacagcaacagaggtgagctgcattaattctttcagccagtgcaggattattgagtggtttattacatcactctattaattggtgccccagcagcttccggaacaacatttagcttccataatgcaattctttttcctcttagagtagatttagctttggtagaatttaactgcacaaagaaatgatagggctatctgcctttataaatatgctaatgttttttgtttatcttattatcagaaacttggagatactggtcccatttcatagacggagaagttgaggtagacagcggtgaagtaatttagctaatgctatgtgctgagatcagggattgaaattcaatcactttatctattgcactatactgcctctcagtggtgtatgttattcccattttgctctcacactaatatatggtcatgaaaacacccaaaaagatttaactggcgtctatattctttaagggagtgtatggcacttttctttgacatctgcacagactaatcactggaaaagtggtttgtttgtttgttgttgttgtttaagccccttattataggggatttgtcagctgttaaaatcaccacttttttgtgtgagttaaattctcatcagaaagatgtttttgcttttatggtacatctaaagttttaggaactagctcatgaaataaatgatctcattgagatccctactttcattttgttctggaaacagttattcactggcgattgttttggttgatcattctttttgagagagttctctttttttttttaatgaaagagttaaataggggagctaagaaaactgtgagtggaagggagccgtttaaatgcagaatttctttgcaaatcttgaaagtagcgccattagatgtcacgtactctgagatgcactagagtgtacaccctccagaatgtctgtctgttgtaattccatcacattacatattttagtgcatatctcttcctagcagcttccagagcttttcagatattcagcatcagaaattgcactgttttttcctggattttacaaatagcaaccagattattgtaaaacagaactatctgataagtaaggttgtgaattgcttttgtgattgtcatgggtaagagcattgaagaaactcgcaaacagtgcagcacactggttcctgtaaaaataaaacctgtagcagtgaatgcgtttttctgatgaatacgttcaaggctgtgatcattgtgcaacttctggttggatgctttcaaacgttccatattgagaaacatcagtaacaagaaccaaatagtccaccaaagcctgtattcaactcaatggagaggaacgtaaattcttacttagagtttcattgaggccaactctattcggtccaccatgggaagcagagatttaaggttctctcttgatttgctttccatttttactttatgataaggtggctccgctactttggttttcacttaaggggttgttccaattactatgcaaaacagaaatggaaaacagacaagacagacttctgttcagcagacaaaaaccaaaatgccagaacatgttaattaatgtgagcagttttataagcaaaataatttgttttaattggctaaataagatctgatataattataataagccaataaactaatttcagaaaactatttatatcacaaacctttaatcacattatatactcattgcaagtttggaaacggatataaaaatcgacccaaattatctcatctttacaaataagaaagatacattaagggcttttttgaaacttcaaaggttatgctcttttcttattttggagaatttctttttctttttggaaaaaatatataggcaatttcaggagcatgaatctttagtgaatcaagaaggaagcattatgagggtgaaaaatctttcttaagaaagcttattttgtccaaggtaaaaggcttattaagatgaggtttcttccacaatgttctttcatatcatattcaccctaaggaaaaacaaacctcgtagaagagagagattgtataattgggcctgaaatgacctcctagaagagaccctatagaattgagaactctctctctgaggattagctgcccatgggtcaacacaaactgacttccaactaatgtataaacgattgggggaaaacgatatgcttccagagggcagttgttaattcttcctaccacaagaatctcaatttgttgggatgagctaattttgacaccaacttgaacactggttgatgcgcagcatgtgcacacacacacaaatacataacaaagtaaataaataaatggcctttcatacaaccccaggggtaaaaacgctacaaataaattatgcacttttacattatactagctgtattttaacaacagtttttaaaaggccagggactgtattataagctctttcacataatttccgaatgacagaattgcatgcccatcagaattgcatgcccaccaaatcaacatgtcttttttaataagtgcattctaggtacaaggtagtactcaaaggaatagcaatatatattgtacaaaaaaaaaaaatacttcgctcatgtaaccttcagtatacttaaaatctatgtgatgaagtaagatataaatcaaataaaaaagacctagtaatattagaagaataacagttcaccaatggtatgagatatccaaaggcaggacaagattaatgggaaaattatatgtattaaaatgttctcggcaatgggtgcttagacatgggaggaaagagcatttactgtgagctaatataatgtagaaaaaatatttttggttggagaagtatcttattttgaacaaaggatagcatacatttaacaaatccttccatgcaaaaggaaaacatagggagatagcagggtacaaaatgtgtttggaggtgtatagaccagattttaaaacactgctagaaatagatgaatgtaggcaaaattgaatggctcattcatgtatcagacccacatatactgaacactcaccatgtgttaggcactggtctagctactaggaatatagcagtgaacaacaacaacaacaataaaaacacgctgacttcatgaagtttatgcaaatatttcaagacagtaagtgtgtgacaccattgattatcctaatatggggagcacaggcagttctttatcttagttctattgtttttcatttgtgcacagacaggcagagaccatggtgtgtgtgtgtgtgtgtgtgtgtgtgtgtgtgtgtataaaaatatatatttcaaataaaagcatttattcaacttgttgaaaattcaacaatattgttcatcaccatgtacacagaaaaacatcacataggttgatggaattttttatgttgttccagattgttttagtattatatagacttagccagagagaaaataaaagagaacataattaatgcatttacttaaaaagaaagaattaaaggtgattaaacgctgtgggtatttgtgtggttagttctgtctttctgtgtaaccttaaaaggatgactatcagctaataacttttccttttccatgcatggaatgggtggcctgaggggcccatcttcaagcagaatgtaaatgccaagtatgaggaccgaaatcaatgagtatcaccttcctacagcttttttttttttttttttttttttttttttgcagagaactgcatttgtttctatctgtgcagccatagctacatcattcatatgtaatgtttgtcttttatattattttgtataattttgatgattttcgtggaaaacgtgatgaaaacatttccccaaaaaaagtgttgctgaatttaaatgtgtttaaaaacttaatccccatgagcatagatgatcaaacactcaacaaatatttaccgaataagcaagctactttgtttacagattgtgggaggtactaaagatgcaaagtgtttaaaatgtgaatattgttctcatttaatttaaacatatatggaagaacggggcacaaaccagaaaagccaagtaataataaaccaatgtggcataagctaagtctgaatgcctgacatggataaaaataactagaaggtaggaagacaagggttaatatcctggctttgccatttgctccttgtgtgatgtcgggtaagttaattttgctaaatctcagttttgttgtctgtaaaatggttccagcaacagccatttggtgagttgttgcaaggttagaaattagaggcaatgataagtccctgtcatttaagaagcattcccattactatgaactatttcattattgggtaggtgttagctatatactagctattatataatagctttacatggattagctattaagttctcacaatattttacagatggggagagcagggtttagagagtaaaagaatttgacccatgttccacaattaggaaacaaatttcagggtgggaatttggacttaggactaaccccaaagcccagctcctaattatgatacatccgagagcactgtgatagctatgggaattaacagtttcatcaatgtaaaccaagaaagtcaaggatatacttgtggaggacatgtaacctgtcctggtctctgataaaagattggagttaaatatgttgatatgaaagagaaaaggccgttctaaacagaacgaataatgtacttgaggctctgaaagggatgcatatgcatcaggctgggcggacagtaagctcttgtgcagtagggatagaaccagtgtttacatggataggttggtgtcaaaccacagaggcgactgaagttgaggcaaacaaatctgcacttgattctctaaggaattgtgaaccttagatgatgtgcaagccgatacataagataatgaaataaaacagactttcaattgaccaatcaataactattgggaatggatgtcattcagagtggcattttaagaaggatgaattggagaagaaaaaaaaaaacctcttaaaacggctgttttcaatggctgtgtcacgacagttgggagaagtgtcacaatgaacaaggcactaatagaaaagtatttgtttgccaaacattagctagtttatagattagggcagagtcaaggtcgtatgtagaataatgtcattctcctttcattcagattccaagtgcattcttgagaaggggaaaggcggtgttacgatctctggtgcagtccttgccagaaccctaggaatgccccctggaatgggtgttgcatttcaccgcccttcatgtgtttcagcacaactaaaacagcctaaagaagagctgcattgaagaattattgcaactgtccaggcaaaagtacacaaatcaagaaatgtcagaggtctgaaaacagtaactttaagagatatggggttggtatttaagttattggtaattgaatgattgtggtgggggaagaactgagccctgaatggcttgaaggattttacattttacactggtgaggagatttggagaaagggcttgcttcgagggtgagttcatgagttgagtggtagaacttattgagttttaagcatattatccaagtggaaaaacccagaggggaatttgaagaactgtagcttgtaaagagggtcagagtggaaagaagtctttatgagtcatccattttgaggtgatgaaatattgtccatgttatccatttttaaaattttaaaaagctgttgagtgggtttcctaacaatggaagttcacatttactgatgcacttgctatgtgctgggagcaggacctaccacggcacagacattgtttattcttaatgacaacccatgaagcaggtagccttacacccatcttaagatgaggacacaatgagacaaaataactcagtcaaggtcacacagcagtaggtagtggagctgggattcaatcttaggcagggtaacctggttccaaaaactgagcacttaactactgtatcatacgctgtcatataagcatatgaatgtaaagctctcccacagagaaataagtcacataaaagttacattcctgtaagaaatattaatatgacttggtcaccccagtataatcacctagccccccaccctactcaaggtatcttaaatcacacatatccactccactacaaatgatatccactcagggaacccacctcctcactaaggaagcggtaaaaataaacaacagcactgatagccatttgtagctttaaaaaaatctctccttttgtctgctttggagatttctttttatctctcattgacaatgttttgcagatgctgttcaataaacctcgggccccttcccctgtttttattgtgctgaaatagttgcgtgctgaaatagttgcatccttgtaactgggtctttatttttattggcagaaaattctcagtccacttattcccttgtataaagtaaattttaactgtagaacctgtatcaataatgtcatttaaaggaggctgcttccaatacactctgcaaaatgtccgcagagatttccggatttcccagtcaccacttccctccctgctagccaggccttgcagctcccttttcccttctacatctgagcactctctgttctctggccagctgccttctgttcagcccctgtgtgttctccattctctgctctgccttaatgataagtagagtttcatcctaagcacattagggtggaggtggggattacttctttatttgggtccaagggaaaaacataccctcctattggcaaaccatgaagagtatgacacttcgagtttaacaagattaagcaatccctctttgggcacagcaatgtggccagtgtgggggaagagagtgttattcttcttggaccatttctcattctatatctggtggcttacataggaattccaaattgcaagatgcctagggtccggggatatgttgttgggacataagatagttgaaatggttgtgtacttgggtttttctattttttatgtttctaaaatgataattgttataagtagggcacatagaatttactttcggatattggaattgcttaatttcgaagagatggccagtcaaaagcttgggcatctcctcttcctgttcacttactactgttttagctctgcttaccatgaaaggtaagcagtcattttcaccaataacttataccaaatagttgaccttggaaccagcaatttacattcttataaaagaggtcacttagggaatttaactgtgtaatcctagcccccatgtggtaggagatgagtagaaatggaacaaagctggtgacacaccatttgaaacaatttgaattgggaaatcatttcttttcgacttcgtgtcaaaaatggaaccttctttaaaatggtacaggaagggagaaggatgcagtaaaagtctgtagcaatagtgactcaaaaactctgttctaggactcacgaaagcaatcctgttgtcacatttggagggaaaccagaaataatttaggtttttcactttcctaatagcttcttttccaatacctttccttcagacaccatgccctcccttttattttgcctttattaatgaaaactaatgaagagaaacaccgtttaaacttgaactaggaaacacaggttttgtagtgctaatattttggtgtgggctctttttttttttctttaagacaattatcaagacgaagcatttgtttcttcttttgtttacccatggcagtttgtcagcagttatgataagtagagttccatctgccagtaaaactacattgcaaattgccgtagaaattagcagctttcatttttgcctacataaataaatatgcgaaataaattgcacataaatgcatcctaaaaaatcacaggtataccacacagttaaatgccaatcagacaaacccagagacacactgcgattatctcagttttcaaacctgggagatacacgaatgtgtttctaaatgagagaggcagtgtatcatgctcgctgagataaaaacagaagctgccagacactgcactgtggctttattctgagaatcctttgcctgaaacccgctctcttttcttgatgttctctgtctctctctctctctctctccccctctccccctctctctctctgcttctctccctctctcctcgctgtctttccctcgctcattgttctctctctcctcctgcctttgatgcacatacgttgtcacaattcattgactctcctctcttctctgttcttacactcaagcctagcggtgctttcgccaggcagcagcagcctctcctgcgagttttaggcatgtatgcagctcagtttgatcgagcgttccttttctgccttttcactcttacaaaagattaaaaggtggcgtcacattgctcccctgttccttcccgcaggagggacttaaaagggacaacaaaaactaatcactttcaataagcattttcttgctggaaaaaaaaaaaagaaaagaaaaaaaaagaaagaaaaaaaaaggcggggggtggacttagcagtgtaatttgagaccggtggtaaggattggagcgagctagagatgctgcacgctgctaacaagggaaggaagccttcagctgaggcaggtaagcgccgatcggagggtttgaccgagtggcttagttaaatctctgttttcaccgttttgtaattgagaaaggcatccgcagcagaagccgatttttcagtcggcttccttttgtttaacatagaaagtacctgtattaattttgatgaattagagcatgcagcaaattcaattgaaaatagatttgtatagtaaatgcatttatactgaatgatttctcctccgttttatttaaggagagagatgagaaagatgattttgatcagaatagcactttgcattacgttaaattctaaacagctaacggaaagaaaaataatccaattgatactgcttttgaactccgggacttaaaccctaggagacagctgccatttgaaatttttcttctaactgaacttctgatgtgttataataatttttcactggaggttttagcaagggtagagtttatttaagtcgagctactggggtttgtttggcttggatcttgtgggtgaagcgcttcttatatctccttaacgtgtgtcaggttgatggttcataaatagagattaagtgttgtcccaaatgaaatatgaagttaaaacatcaggttagggcatgttgtagaaagggatctggtaaataattaggagaactgaattatgacagtttgaaatgggagttaactctggaggtgctgtttgataaacctttctggattctaagcggctcaataatggaggggctgattaccagtctcgagtcggaactttgcatcaggatcctaaatgtggaatacatatggattttcattgtacgtagcttttagaaatatgtcccttttgtgtgctatgagagttgtggattatatttgatggcatgtctcctttaaagagctttggggtgaagcttaaaaggctcatatctattttaacattgaacaaacacaaaatgcatgatctcccagcacttgatttttgttgctacttctgttgttttaaagttttgattatgtgtttttaacctcagtctttgttgattctgtgttcattgcttctgctgctaaaatgtattgctgacatgaaaaaactgagatttgagaaagaaaaaaaaaaaaaacaacccaaacccacctctgattagccaagtttctaattaaggataacagaaatccagattatatctaagattttacctaaaagatagcatagaatgtttaaaattcatttttaaatgtttttatgagaaaatctgaatattaaaagtacaaaattcagttaaaagaatcctcctctggaatgatatatacaagggtgacttcagtacctgtactaggtttggtcctagaaagaactgcactactatggcattgttgatttcagcggccacggaagggaggatattttatgtatttgtctggagataagatttttttcttcccaagtttccaaaccggacttgctcctcaatatcataccctggcatgtctcgcgtttgccagaccatctgatggcatcttgtgggtgcagcctatgaatccaattttatgaggacatcagaaactgctgagtagtggggagtagagaccaaatggactgtgggtctgatcatacttcatcatccagagataatctctggtggaagttccctgggaagcccctgatacaggttggggagacttaatttttcctcatggttgaaagaatagggaaagatgcagacaagagaaaaagacactgctgtcgaatgtttgatgcaatcgtgctggtggtagcatagtgagtttttaaaatcgcatcacatgtaattttttttcagcttaagaaactttgcagaatcttgaagtagcttttctcaaattcaatctcgttttttttctacatcgttttttcctgcgtgaaatttttctctgactccagctacacctaactattgaaagctgttattctgctgctgataatgatgattatttctcaaataagtggcaagtgttgaagggatgggccaagagaaatatgttgtctgtatcatatatgctttgcttttatttatgaaaatgacttcttccaggtgaggcaatgataaatttgaagttgcgacttggctatttgcctcaccaaacaactgtccttttcttagagaacaaaatagaactaaagtaagcagaaataatttcattgtaaactggattgtagttcagcatgtactttttaggcagatggtaatcaaagctatccttactcaaactatttgattcatataaatagcatttttctgaattttccagtagatgttgctggagagcaaagaaaagagcattttttttttttttacaggaaaaaaagaaatgcagtagacttataaaagccaagaaaaaagattcttctccccaaactctgctgatagcattttgcataatttgctaattaatgaattatattgaatcattaccgtttatgatgttctatagaaagctattaaaacttgagttcgattttaaaattatgagattgttctctttagtccctatatataatgtctgtttgctgtgttccgttttcaaaaaatcaacttaactgcacattactattcagaacatttcatccctgaatgctaaaaccctttaacatgcaaatatgatgtcagaggaagaactgaaatagaataccctgagaagagtaatgatcaaacgcattataaaaatatgcaccagttgccaacatgtaatgaaatattaagaaattaaaagcatgcaacctctaaagtaatagaatttcattgctctgagactgttttcccactgaatattaagtgcttaatagatctacccgtaaaaaacaatcgaaaacctacatgatttgtcactgaagttctttcattatatgattttgaaaaattagcccaataggattttcctcagaataggaaatgtaattaacattggatattaagtgtcagatttccaaagcaaaagctataaggcttgatggagaaaataggaatgcagagagcaaacataagcactagaaactgaggggacccacgctggaactgctctgcttgtaatcactgtgataaaatgacaaagacgtcccagaggagcccaggaatctcgtacccagacaggaactgatgcaatttcaggaccaatgacctctatctatgggagtatttatttttggaaatgatcaattaactgatttcaatagtgaaagggaagtgtatatgttttttccaatgagagggggacgtagggtattacaaaagcacttgcagacaggacaagggtgtaacctatgttggagagctttcggttttcttactttaagccgacctagttctttgctggtggattcttctttggcattgaatcacctctttgtcagttttccttcctgaggtgtgaaatgctccataggatgttttgatttaacacctatttatttctcttttctgggaggaaaaagcttatatttagaaggcataagtgtcagctacttctattttgtaattaatgctctaagtccactgggctagggatgttcccgattttatttttatttgattcaaatacatttttttttgtacttgacccatagtggtttttttcttcttctgtctttaaataaggaaagctacacaacttggtgggagattctactttctagtaaagtttgtttgttgtttgcctcttgttctctttttttaatagtagctatcgagcgctgactatattcaaagtacgatgagctaagtgtgccgaattgcacccctaacaacaacaaaagatgcctctccactcactgagaatctgacgaagatgcaaaatatgcgccaaacagcctactggactaaaagtgccaggtcttaactccctcccttaggagagcaggggagaaaaggtcgctgcaggttgagaggaccctgaggagcctgtctttgaattaggggtgaaatgtgaaaacacaaaataatccccatcagcaaaatcagcgtgggcacagggggcacatgccaaaagggaacaaccgatgctagtatgatggagggtcttgaacggcaagccaaggtatttgatagccactggagaggggtgatctggtagctttaggggagttgcggctttggatgtggacagggaagtactggaatatggggtcccaccatacaacacacccttcccaggaaattctgaaacgtctgtctacagggcatctattcttccgttaaattgcagccttacggaggtattgctaccagtagcctatatcttccccttgtagcaatgctgttgagaactcctggtccagaggctggaagcctgtgaataatctgttgcattagcctagacttcagcagtaaggttgagaaacgctggggaacggagactggctacgagaaacaccttcgtattataattattgcaatttcttgtttgtactgcagatgtcatgccctcattagacagggattttgtgtatatgcatttgttttcatgttttcataagaaaaaccttcaccattcgttggagatcagacccgtggtttagaaggtgtgatgttctctccatgctatttcagtataatcaattagtgttatgttcatctctggtttcttgacattgattaggatggatttttatgatctttaagggttttcatctctctaaaaacatatatactttatttattagaattaattgcctctctgaattgcctgtgttgtcagttactttctataaaccttgactaacttaccttgaactctttgacgtctagtgtatttgactgacaagctcagctgtggagactactctaactatataatggaagtttatatgtgaacatataagctgttttcttttcaacagagttcacgatgagaaggagcaaaaataattattagtacaattaagtaagtagagtgtcatgcttttcttctgtaacacggattttaccagcctattcaggtggacacggtcaccaacatcacctcaaaaccaaactgtagatgagtgactttccttgtcctccaaccactttaatttaatttgttccatttacttttccaagctttccatcttcccaccattttaatactatcagagatggggtgctgcccatgacattcacacttgacattatcaaacacaaaaggcatcactcatgcacttgactgcattacaatggaaggaaaaaaatagatcccaaaggcttagaaattattgtctcgtaccttgaatgtagctggattttcttttctgtttcctccagcctgcctcatttgactgttttgccactgtgtgtttgcagagggttctaaaagccctgcaaaaatcagcactcacaaatccataacatacacatttttatattcactggagatatgtgtcttagtataataggaatttacaatcatatcattattgtctgttatttgttaggcaccaaccacattttgatgcagttccaaagttgcagcttgcaccagagctaccttctcatcattgacttcagttcttctgacggttcgacagtcgtagccaagcgttgtcctgactcacagatctgtggtcactgcagttcctttactattgctgggcaagccagagatttactgaaatccacagtagctctaatttttgtgtgtgtgagtgtggagaattcttaaagttagtataaatttctctgtacctcccttttcttcctattccgagcctgatggtcaaagacagtttacctctctgcccccatatataagacaacacttgtgacctgaataaatagcattagattgtggtgagtttcttcagtcatattacatcatgcatcacgatcgcgtgtgctgtaaagctttgtaaaacagccagctacatgatatcctgcaggtttaatatacttctgcagccttgtacttgggaaggatttctgtaattggagacaatctagtaaggagaactttttaagccatcggaggccaaaatacaagtttttgagaaatgtgcctttataggcttgaaactgaatggattacaaatttctcttaactggacagaatcataattgcctatagagtacggtcctgattatccagggtttgaatttccagcatggggattatccagatttcttccttgactcccctgtctttttcctaactacctgacgtgaaacatttctctaatcattggcacctctgctaatgctatgcaagggcaaatttgagcaggaaaatccgaactagcgaattatcattcagaagagggaattatgtagaaaaatctggtttttgtaactattcactaaagtcgactggataaatttaaatttggggggacatctttctatttacaaatgatgtttactgtagctgcatatatgctgttgagaacagcatatatgggtttcctacccaaaccccagttagttattctccaccattctcattttagtcattaactgggtgccaatcagtccttgataagttatttatttttaggatttgacccacacactgaaagcctcttagataccacaaggaggctgaaatggtgaaagaataggaagtggagctggccttgccagaaacgctgttactgcagaataggacaggagtcaccagaccaccttccaagtctgcagaacagggagcagatttctgtctactgaatattactacagaatcaaaacttgaggctgggctcagtggctcatgcctataatcccagcacttcgggaggccgaggtgggcggattgcttgaggccaggaattgagaccagcctggccaacatggtgaaatctcatctctacaacaaatacaaaaattagccgggcgtggtggcgcaagcttgtaataccaggtactcaggaggctgaggcaccagaattgcttgaacccaggaggcggacgttgtagtgagcggagatcgtgccgctgcactccagcctgggaaacagagcgaaaccttgtctcaaaaaatcaaaaaaacgggaaccaaaaaagaaaaccttgatttcctctcatattcacgtacatcagttgtggcttggacactttcataatcctgtggttatatctggcactttgtaccaatgtctctcatcaaatagtgtactcttctgtcatctctatttgacaaacatacttattaataatcggtagcagtttgaggtgcttaatacaaattcacaagctgtttctgtttctaaatgtataacataatataagcaataaaacatatgctatataatataattgacaaaatatgctaaaaggcaaaaagtggtgttgcctcagtggtactttaaaaaatatccttttatcactagattaaaactgagtctgttagaaagaaacatacttgaagttgttaaatgttcaggtgcagtcgatgatgtagtataatgaacaatagttttcaacccatattttaaatgagaatttaagcagtaatatagtacataaactgaaaatgtaaaacaactgttagaaaaatcattgacaaatctagtcacatgttctgtatgtagaggattcctcttagtattcgtatttgtgttacatttatatacatacatgtatgtacacacatgtattatagagaatatatgtatgtgcatatatctttatctatatctatttccagagtgagagagacagagagaataaaggggtgaattcctaataagatacagtatgagtacattcccgataaaatattgtggtttttccagctgacattattaatttcccacaatctgacgcacagtgtgctatgtaccaaggatgccaaaatgaaaaagacacaattcttaaggagtttatgatctaatctgaaattagatattattttcatgttgaattttcagttgtagatatatttagtaatcaaaaacattgagagagaaaaaaaaaaaatcaagcgttacaaagccattggagcccacactaggtatctctacattttacatgtcttgcctcatcaggaggagagttggaaaataaatataggcaggtatgatttggggaagaagattctcatataatataatcttgtcccaactaaacataaatctggctttatggaaaaaccaggctagggtttctgaattctctgttaccacttactgttgatgcaggccacagaccaaagataggattagtttgtctgattttcactcttctctgagttctatacagcattcaatcaagcaaagaatgtgagggaaagtgttgtcaacctgcttagtattaaacatgcacaaataatgttttgtttgaaaagatatgtaattgagcatatgtttttaaatgaaataggcttatgtgacaaaaatcattttattcttgatctatatggcatttatgatgtatatgttttatgtgtttataatcacctatcctatgtgatttatatacacacacatatagtctctagaggtcagtagaatataagaaatgggcaaaaattcatgtctagatgagacccagagatcctggagaccatttttcaaatggtgaaatgatgatagtcgactaatgacattaggaactgaaatcattaatcagtgttaacaaaaaagtcatgtcattcttgttcctgaaatgaatctaatctatttgttttaagcaaatttcagataaatgaacatttacatggcacgaacctttacagaaaccaagctgtaattactttattatagtttattataacaggctgtgattctccagaagcttttttgaggatttttttttaaatgttaccagaacaaaaaggtaatttgtttttaaacacttgactattacatccaaaacactatttctcttttagctgccaattcagtccccttgactcttagaaatgaatcatttcatgatttatacgttgtaattttatttgttcttatgaactaagtgtccctgatgttggaaaatgtattagaaaattgtgatttattttatatattaagctaaaattgttgacagtccagcacttgctgcacagttgagcatgtttgccaagtttttctctggaacattcatgcacaaaaagtgtaggaaatgacataatgtagccatgaactatttgatagtggagttgtccgtgactcttacacaccattttatgcaagaaaaaacagcacagcagggattcagatttcattcgaattcggggataaatgattatcttttaagtggagatcgcatgccttggcttagaacttaatatgccttgcacacattaatatcgctcacacttggaactaatctatcaataagctattcccatatttgtttacttacactagcgtggattgcattcttagttcagtttcctccaggataaatcctaaaccatgtattgcagcagaagtgcctaaaggtgaatagtcagaaataaaacaataggaggtgataggggcctgtggagctgtgaaaaggcattatgagtatatgtacacacacacacacacacacacacacacacacacacaccccaaacctatcttaaaacaaaacaaaacaaaaaacctactgaacatttttagagaataaccatatggagaatttagaagaactttaggtttatagtaccacaagattcccagtagatattccataaaaattaatggagcacttacaacgcataatctagcaattattaaatcaagaagatatgctgtgtttcctgtcctcaaggggttcacagtgttaactggatgctccccatacagcatctcccctgcctctgagcctctacctctgctctcccaatcttctacattttccattccatctctccaggattccttccagtctttcctgctttcctaactgtggctttgcagatgctcatcttttttgtctgctttaacactccagtttgtccctggctaaatactattcatctttaggccgaacattaaatgtcacctcctccaagaagtttttctcgactactcctccttaagtttaaattaggagctcccactctgtgatactgtaacaatgcactcaccttattgtaacagtgtcctcactatatataactgctggtttaattgttcatagtccacctgttactggcggagggtcctgactacaagtcattcatgttcttggcgttttaaacaaataattggataaaatgcacaaacaaagcagtgaaagaatgaagcaatgaaagcatagatttattgagacaaaagtgcactccatagagtgggagcaggctcaagcaagtggctcaagagcactggttccagaattttctgggatctaaatactctctagaggtttcccattggttacttggttacatcctatgtaaatgaagacttggccaacaaccagtctgattggttggaggaggtgaccagtcagatgctgaagtgaagttacaaagttacactctctgcaaatgaagacttggcccatgaccagtctgattggttgggggaggtaaccagtcagaagcattttccatttttcatctgtgaggcatggaaaggggagttgcaaagggagaagccggctgaggctgatccttttgttatctgggcatgaagaggtggggttttccttttcattcagttctaggaagtcagcatcaatcggccttagattccctacccctccagaccgtattctcccgcctcacacctaagctttctttacttttcttttttttttttttcagacggagtctcgctctgtcgcccaggctggagtgcagtggcacaatctcggctcactgcaagctctgcctcctgggttcacgccattctcctgtctcagcctcccaagtagctgggactacaggcgcccgccaccacgcccggctaatttttatatttttagtagatttggggctacacctaagcttttaaactcagtgaggacaggagccatgtgtgtctagcttatctgctgctgtatcactgatgcttagaaaaatatctggcagcataatgttaatttcatcaataactcttgaatgaatgtgcaaatatataaatactcacaatgtatggattaaaagaagatatccacctccaaaagaccacaaatcattaacctctgtgtttgttcccaagtcttagtctagggcagattcaaagtgtcctagggcatcatccttcttctctctctattttccaccctgaagtagatccggatccttaatccccagaatagaatcgttattttagttggaggaagatgtacactctttagatgttttcttcttagtctctgatcatgtaatttatgatgaaaagtacacttgtttggagggtagtctaaaagtggtgactacctctctccactctagtgatgtttacaagattttgaaccttggatatcagaactgtttaaatagaccatggactctgagcattgtgatcatgaatacagattgtctgttgaatatcaggcattttgctaggaactggagagtcagaaatgatgatgcagaataaatatatattgatttatttttaattaggcctatgggaccatgtcactttatgtgaggatattgtactcccaaatttctctgcttcttttccacacctctggtgaaattctaagaacttatcaatcaagatattttcctaaaaacattgtatttctatgttacacaaagacataaacaaccttagagtcatgctagaagttatttatataataatagaataaaaatgttaatcaaataataaaatttttattttaattatagtcagccctttgtatctttgagttctacctttatggattcaaccaaccatagattgacaatactgaaaataagaataataaaaaagcaggccaggcacggtggctcaccctgtaattccagcattttgggaggccaaggcgggtggatcacttgagtttaggggtttgagaccagcctgggcaacatggcgaaaccgcatctctacaaaaaataaagaaataagctgggcatggtgacatacacctgtagtcccagtactcgggaggctgaggtcacaagattgcttgagcccagaaggtcaaggttgcagtgagcaccactacactccagcctgggtgacagagcgagactgtctcaaacaaaacaaaacaaaaaaatacaaagtaagagtacgataataaaaataatacaaataaaaaaacaggtgatataacaactatttacatagcatttacattatattaggtattacaagtaatctagagatgatttaaagtatatgggaggaagtatgtaggttatacgcaaatactgcaccagtttatttgagggacttgagcatctgtggattttggcatctatgggggtcctggaaccaagccccacagatacggagggactactgtagtaataaacatgaaaggctggtcagttaactgttcctctgacaatatgcatgttaaatgatttcaatgtataactgtaatttctcttttaatttgggacatatcctccttcctttaatctttggttccctgaggatggtagcagactgttcatttctgtctcactctccctttccttctccagggtgtcctgttgaatccactcctatgtcttatgtgcaaactcataatacccaggatagtttattatatttattcttgaataagaaaatattttagggaaagaggtaatttaaaaaatggaacgtacttgccaatgagcaaatgtattctattagtagagaattataaccaccttataacaatcacagtatccctcatttccaaagcgttctggaatgagtaataatcaataccagagtaaagaaagaatttttcttcaatttagttagatgatttttattcacaaaaatatctaagttgttgaaaaaatagacctttgacttttaacttgggtttatttttcaatttggaaagtgcatgtaagtttgttaatgttaattagtaattgttgggctctgagggggtgcagcatcttcagtctgagcttattacagtgtaaaatatggattgcctttaccctaatggcctctgaatcctattaccatcccattagagagtgtgggattttagtaattctgttgttgtttccagtgggcagtgaatataatggggaagggcaggggttaatgcaattcatctcttttaatacttgtaactccaactcccttatcactcactgaggtttcattgggtttttcccctttctttctatatctttaaggcccaatatatttctctatgcttctcccagccagaatagtttggggagtatttcgatgattcttgggtttaaatagaattttcaatattagcctttcataaactgaagataaacaaataaggtagtatgtccgcttgttgtgaaacagcctgtcactcagaaaggttttcagtgactgtcattgtgccaagaatagtattgaaatggctcttcattcaagatcatttataaggccttttggaaggagaagcatgataccagtgggtcggatcaatgcacactagtgttctgggtataatgtttccatgtgttcctggagacagctgtgtcctgggtgctggtggtgctagagagaagaattggaaaagatttcaaagtgatagaaattagattcctttaaagagaagtttatgagcaatagttaattccctacatctccaacatgctcagtagatgttcatgtctgattatgtatccgtggttttattcatgaaatttgtttttagctaatacagcttttttcggaataaatacgaacatcagattacttctcagtatgtcaaaacaaattagtttcccacagtgatgcagtgaaaggtgtaactattttccctttttatatgtcagaaagcattactgggactgggaaattcctctttttccccccttagcccgtgagccatgtggtttgcaaaggtctgctttaattcacaagcatgttcacctagagctccagcacctccctctgctgccattagtgggaatcacatgctgagatccaaagaggcaaccacactcagaaaagactgggaatggcaggaggtgatcagaccatttcaatctgttgaaagtgagtgatattcccagggctcactgttcaccttctcagagaattaagtttccatatgtttcatcataaatgacatgaacgtgcaacataactgcaatatgcaaatgtccactggataacgtaatagaaaactggattggagaggaattctccttgtctccgtattcaaaatatcttgattgtccacctggttatggctaataggctaagcctggtgacagtgcttaggtctatatataatagtagtttgtgtatctgcattgaatattcgtgcatcacatttctccttaatttgaggtatcacttatatttctacacagactgtgagagcatttctttctctccatcaatgggtgtattgtgtgaaattcattttagaatgtaattatgtagtgaccaatacaattagctttcatccaaatgaattgatatgaataagcattgttaagggatattgttttcttttgatacttagttacttagttacagactactttttaaatccatttctgttcccacaatcacttgggaagctaaaacaaaacaacaacaaaagaaataaaatctactgtaagtatatactgaagtaataatcttttaaaaacagcacatatacaaaagaccattagcagaaaattactgaactcatggaaatgacatgtagatagaacctatgtagaattactggtttgcaaaggacaatatgagggattctggttactcaacaagtggaatgtggctttctgtttttcatttatgattggaacccatttaattcatcttgtctgtttattcttggaacttcccttcagatctccaagaaatataaaaatcagatgacaggccaggcatggtggctcacgcctataatcccagcattttgagaggctgaggtgggcggatcccttaaggtcaggagttcgagaccagcctgggcaacatggcaaaaccctgtgtctactaaaaatacgaaaaattagctgggtctattggcacacacctataatcccagctacttgggatgctgaggcatgagaatcacttgtacatgggaggtggaggttgcagtgaactgagattgtgccattgcatgccagcctgggcgacagagggaggctgtctcaaaaaaaaaaaaaaaattaatgatacttaggtttccattagagaatgatatatttaccattgtcacaaagccacacaacctttcatgtgttgtctctgttcagtgttcccttaatgcatgatacacaaattatttaacaatagttgaatattatcaaactagtagtaaagaaattggactctgcataacactaatagttttattttttaaacatgtgtcagaattcaaatataagtgtgaactgtgtagagcacacaggaatgctgagtgccacattttgtaccatattgcatccaatgcttttgtggaaatattccccaataagtttatgatagcaatagaaattagcatattttaaaaatatatattttaaactataaaagtagaattgctctttcagaaaatttggaaaatttagaaaaaaaattgaagagaataaaaattattcataatcccatccaagtttgtttgtttgtttgtttttaacccacttaaacaggtgaatatttaaaaaataaagattgtttcttgcattcattcttatacagtggaaattctcttatgcattaaatagcactcaaaaactttacattaatgttctatcaatgtgtatgccttacaaattccatgatacttaaaaataactttctttaacattttatttataaaactataataatatatttatttaaaagaatttggaaacaatatacaaacaaaagtaaaattattttgaaatgctaccgtgaaaaggtaaaagcttgaataatttgatgtatcattttaccatctttgtctatgtaataagtaataatagtaattactttgtttgatttatattttagttattctacagttttatgcttatctcttgatttacttaccactgaattctctgcttgattacatttttcttaaaaaagtcagattgcaatatttttaggatataagaaacttctgcttgttgtattcatagccaatattttttccaaatagtgttttttgtttttcatatgaaaatcagttttgttttcatatgaagatatttcaaatcttgatgtagtaaggtctaaggtcttcttctactatttcagatatcttgaattgtttctcagctttaaaaaaaatccccattataaggttcaataaatgcgtactatattttctcctagcaattaaaaaataatgttataatgacattaacttgctaagttactttagaaatgcatgtatgtatgtgtgtgtgtgacatgaggatctagtttcttaaatggttaatccattactagatatttgcactgttactatactgttttgttattgcaagtttatagtaagcttaatgtaatagaagaaccactcctttttattttttttctcccaggcatgtcttgcttaactttcatcttgattattcagttgtatctgtatgtgtatgtagaaaagcagaaaaatggtgccatgcctcagtagtatttttttcctctttaacttgagtctctttaatttggtaaggtatttttttagtctcatttttgtttctttgctctccaataaaacatgttttccattttgaatatgtgggttttgtgttttgacccacttctcttagatttgtcttaatcaggcatttcttcctggaattgtactttaaatacctatgtatttgcatacaatgatgtaagaaatttctcccacatctactttcttctcttcttgagaaaacaatgcatatctgttaacaaaatgttcatgatattcatctatcatgggccaagttcatcttttgaaatgtaactgcacaaagtacaatgctgatctaatatggttggtctttatacatttatgtcagtaataattgcactaagcaagcaagagagttctcattgctctagcttccccacgataaaattttgtaagatgtaacccatagaacaccagcctagtgcaaagctctgcaaagaaagggttccttggtggagtgaatttgagaattaattcatacaatagccatattttaccagtttagaataactgttatcatattaaaagctctgacaagttcaacaataaagacttgtttggtttgtttgaacccatcttctcccagatttaatgtatgacataaacatttgctattttttgaagacagagaatattatttggtttgatggtttgtattttattgaggggtaaatatataatctattactcaacctaggaacttacattgaatactcaaatcgggcaggctttcttccaattaatttcagtttccagtgagtcttgtttcttttcagtgtacaatggaagataactctaatcagatcttaagagacaattctcaaggcatgtcactcattggccatttatttgatgattagtagtggttgtagttgaagtaggcggcagtattatacaattatcatacatagtagctctataacatcttgcaaataaattaaactctttatatatcagtttttattttttgtaaaatgggaacagtatcctgcaggggcttgtgtaccacagaaaggatgcgtatataaagccctaaccctatttctgcatagaacagccactcacagaatgatagttggcattctcaataatcattgacaagaaaagttagcaggatatatcccctgctctgatccatctaaacaatggtgcaataagaagtaacaatttcataatgctttgcaatttacacatatttttatgtacgctgttgagagtgtaagcatcaaaataaaataggagaactggaaaatacagtgagggagctgagatcaagtgatacagcatttgccaggaggtgggtattccatgccacagtatacaccaatacagaatgaggacaagcgttcattccttctaatgaggactttacctaggttgggcaccaaaggctgtcacacagttggatggaactgaattaaaacgatatcaaagttcagttcctcagctccaagtgcttgctgagttcggcttcttctctggtaaccctcttatggaatgtgattttaaaagcatcccaaagttgtaagtacctttgtgtcgtgttgacatctgattcatcagtgggcaaacattctgctattgttactggagctctgttttatcctcctggaagagaagccccagctcagcaagagcggtgtggaaatgttggtaaacccctttattactttgagtctagactactgtaattctccatttgtgggccttctaaactgggttatttataggatgcaacttaagagaacaaggcagcccagagccttcctgacattttgtcccttcagcatatttaaaaccatcaactcaatccttatattggttacccataaaattttacattgattgtgaagttgttttacttacacaaatggtgcctccaagatgcgatttcattctgcctgtctcactgatttttcttttgcccaaccctggtcccttttaaagacttaaatttgaaagcttttggtattgtgctatgagcttgaggtgggcatattcaaagttatgtggactagttttaggtttcattgtatttttacagataagctcttatttacttaaataaaatacatattctttacccataagaaaaacatacatttgattttttgttttttttctgttatacacatcatatccaatgtgattccaatatagattccagtatttttctaggcatatcatataaaatgtttaatacaatgagatgtatatcatacttattatttagtagcctacttttaacattgatgttattgtggtctttttctttgttttaaaaactttattttaataattgcctaatattttctcttagaaactctgtgattcatttaattcatttggaaattattccttaagtaagatttatcaagtgctctcactttgcatggtcctgcccatagcttctgaaggtatagtaacagataaagatagatacagctcactttctgtggaattaattctgtaatgttggatattggctctcccttcactttagagtattattacaaaaaagatgactttgagttttaatcgaatcacgaagaatatttgatctgaccctctctgttcatttgtgctaagaaaacaattgtttttctaaaagggtaatcaccttggaaaagctttccatgttctgccctcttttgtagaccttcttcttctgatcatgtaccctggcttggtcattttcttatgaacataaattctgcctttccccttgttccatgtaaaataaaactttctttgaactgcatctggagaatttaggccctataaaccttggccctttgccaaattgcatttagccaccagcttagcccaagaccgcagaatctgtgtccattgctctaggcttctacctatccggtaagagaagttaggaattgagagctaaattaaagttgcaaatatttatccttatcttcactataagctctggatttgcctttcgatgataatgcaaatactccattctttgggtctgtccactgtgttaatagaaatactcctgaaattggaaagaatctctctggttacaagcacttcttcctggtgtcggagataaaccaccattgtggatctttgcatttcttttcacaagcattcctggcatgggtcctcataaagcaagagtgcttggtacttctccctcgcctcagtgaaatatccatgttgtgggcaaaacatgctagtaatatcatgcagctgtcattgggtgacaaccacatgtagatttagagatgactgaggtacctgtctttgctgaaatgtgatgttcctcatgcatacttagactcttttcatgaacattctttaagttgtatgttccctgcttgatggaaatgaacattgtataaaattgaagcaatttaaaaatatacagtatttaagaaaaactcaaattccttaaatatgtcagtggattggaaatctggcttgatgcacccactactaaaattaaactgtattaagatcatatgatacaatgccaggtgtcagctttctgttccttctgtctttagccatagaagttgtattccccattgatagataacatcagactttgcacctaaatgcaatatgtgagatgcaaatttgagaaagcacatggtattttattttaatctttaaaacatataatctacaaaaatataatgcttagtctaacccacatggcaatgtagtagctgaatatggctctagaaatgtgggttgtcatgaaacaaatctctcttctagatattggaaatcagattctatcaggacattcaatttagaaatagtgtttgcatccaactgtccttctgtacagatatgtaatttccatgttttgtttaatgtaaattacaatgtttttatttgttaaaaagagcaatctttaaagcctagaatcagaattgaatgtttgtaatgtaatcgcaattttgaggcattctttgtcatttatctttatagggtcagggattcagatagcaaaggagagaggattgtgcactttggtgtcttttcaaatagaaagaactaacctcaagcggggattgtctgtcttcgatcatatgttatcccagatgactaagaggaaaatctgatccgttcacttatgccacactatttttgatacaccaaagcccttgcaattttacttacaaacacagattaggaagtgaaaggttgattgtttctggcagtttgaaatgcattatgtttgtcctgaccccagctcaaatgaaaatagaatgtttccaaatcttctaatggtcctgcaactaaaattactcatttgaaactgccaggactgatcagtgcaaaatcaagcagccctttctgggttcttcatttggagaacatcagtttcaaggttttaagataatcatctcaccttattatcagataaatcttcttttacatgagcagctactgtctctcaagacagcctctcacttattaaaaagggaaaaggagggaaaagctaccagggaaagagacaatcagaagaaatgtcagtaaaatggaatcaaaagactataagatgtaaaattactttttacctttgttagtcatttagaaccacagaaactcttaaggtgccaagaaatatcgagcccaaagctggcttttgaaataagaggaaaccgaggcccagagaaagaaaatgacttactcagcaaattgggatgatggaggagatgaaactgactggattttgtcccatgatcaaggtttttgacatgaagtctaacctcagcaagattcacagcaaacagacctattctgaaacaaaagattaattttcaatccaattactttctcaaaaaatactagccctcaagtattcatgagatacgtcttgtattgctgttctcattgaggagaataaatagagagccatttggatttcgttagttgtttagtattcctttagcaatttcagacttatttgtgtctgaggaaggaagcctcttatatcaaaacatgacacacaaactaacagctggttttgacattgaacttcagatctagggttggtaagagtatttgcacttactgtttgtaatgtacaaatagatccttgtttaaatcctcagcaagaacagccttgtgtaaagctttatccaccgtgtttcccttccctctcctcccccataaaataaaggaagaaaaacttcattgcagtcactaagcatggggattactggaaagacagagtgactgtttggtttaaatgtaatttcagtgtgtaaatgttcacatctacctaaggatattgttaatggaagcaaaacctaaccccccttatttgattttgcccttcagacttgaatttttctcctaacgctattttgttcagcatgccccagtcctcttcatatgatggcaagttctatgttagatggttcaacaactattgggggtgcgacaggaatagcaacactgattagtgctaattaggtgtcagaccgtttactgtcattatctgaagtaaacatcaacaactctgaaaagtaaatattgtccctattttctagatgaaggaacagaggccccgaaagcctgaatactgtctacggtgccccacagtcggaagcaggaggcctggctttgactctgtctaaccctgttctctccatcctactggactgtcccccccaaggacctccctacaaaccctcagttccaagaatgtcttgagccaattcccattaatcacattgagctagtttctattgtttcatcagtgaattttctgtgttaatggtaaaaaataaaaaataaaaatgcaggccgggcgcggtggctcacgcctgtaatcccagcactttgggaggccgaggcaggcggatcacgaggttaggagatcaagaccatcctggctaacgtggtgaaacacccccgtctgtactaaaaacacaaaaaattagctgggcgtggtggcaggcgcctgtagtcccagctactcgggaggctgaggcaggagagtgctgtgaacccgggaggcggagcttgcagtgagccgagatcttgccactgcactccaacctgggcgacagagctagattctgcctcaaaaaaaaaaaaaaagaagaaaagaaaaaaatgcagaggcatcaagagataactcttcttccattaggacttctgcattcggtttggaagaaaggttttctccagcaatcagttcaccttcgggggacacaaaacgtggatagaactggaggtcccaagagcacctgtaggggacagttcagagcctggcttttctaaatccggctgcttatgcgaaaagttcatgagctcagtccttcagttttcagtcctcacacacatggagttatgatgatttctcctggcccaaatactgacactaggacaagagttgctggggcaaatttgccataaacacccatacatatttcttttcttttcttttcttttctttttttttttttttttgagacaaagtttttctcagttgcccaggctagagtgcagtggcacaatctgagctcactgcaatctccacctcctagtttcaagtgattctcctgcctcagcctcctgagtagctgggactacaaggcatgcacaaccacgcctggctcattttttgtatttttagtagagacagggtttcaccatgttggccaggctggtctcaaactctggacctcaggcaatccggcctcaagtgatctgcctgcctcagcctcccaaagggctgggattacaggcgtgagccaccatgccccatccccatatgtaactttcacgaagcttttgagaacatgtaaaattttccttggatactgggagtggttcactttaaacagaacagataaaataggcatttgacaccataaggagtcagggtggtggggagcaggtgagaggacagcagagagacaaatgataattccagtgctactaatatatatgtgtaattttatgttattacattataattaagatttgttttgtcacactttaatatctgaatgctatcttactttcaaacttatatatgcatgtcatatttccatattttcatagtattctgtacaaatctctcccaccacactaacctcattctctcataattacccatatacatacacacatgtgcatgcatgtgcacacatatatactgcttccactgggctgtgttattcacctatagttctttactgcctggcatattctgagtagacaggcaatgttgactgaaagaatgaatgaacaaacctgtgaataacagaatacaacaccatcacacccacattccatgagtttagctgcattaacccttcttggagtcagagagattggtccacgggagaccagtgaagcatgaaggagtgaggcaaatctggcacatggacatcatatgtgagccactgtctgttaactttccatttttactttacgtaccaggagagcagattgatattgcattttaattgtgtatattagaggaaggcatatggttacaacattctcttatttaccttctggaacatgaaatttgtcattttgttcccaaaataaaggattgaagggatagtgcctgctttttacacaagttcaattctccctcatgtgcaagtctcctgagatgtgtagcaagtcggtgccaacatgaggctggcaccattttcctattgccatggtgatctccagctctcctgaaatctcaagggggactatgatattttaaaagcaacttgaattttggtaattaaaaaggctgcaaagaataatctttctacattttgccagcttgggtaaatatggatagcaagtgatgtctagagaagaagggtattactgtgctttattacgtgggtgaccccgtgttggaaaatgaaaaccgtcatgaaagttatgtgtggagtatttatggcaattcagaaacctactgtgaaatttaaactacatctaatcacaaccttcctacaaacagctactctcttggagtcactagtattttaacttaaaggtatgatgatcagagtttgtttttgttttttttttaatgtcggaggcaatgagtaataatgtaaatgttggcagttatcaaagtaaaggggaaaaaagtgattctcttaaactggaaattaagttagacaagcataatttataccgcaggttaatcactccctccatcacgaaagttcttacattaagggttcttttgaacttcatttgagcaactgcgctctcctagcaaagcctcaaagattaaagggctttgtttcacttgagaagacagttgaaatttttttaggcattcttttgagctataaaatgaatgcttggagtagaggaacatggaagcagacattaaaaggcaaaacaatgtatgggagagaaacccaggctagtggaaagagagtgctttcttgtatctttgtgcatagctttgtatatagaatttatagcggaaaatgatcagcagtttaaggtagggcttgggaaattttttgggctgagtgtgtgttgtcttattaggtagggtatgaaatcttcaacgacagagaaagagaaagggtagaacaatcctcttaaattaggaacttcacaaacaaatgcagattcccaatttgcagatgggcattttaattgattttttttttacaaaaccacctacaacctaatgtttcagagttaaaaataaaccatataactctcaagtgctgtttcttccacataattcaaatctgattatatctgaacaaatcaccaactggaagtgaagaattttctatggatcagtttgattccattgggaaaatactgccagcaaaaatagtttggcggtccccgtggcaaaacttagaaacctgttttcttgttttgaatccctctgggtaagagcccttaccatgttgctcataatcttatttaatgccatttttagctggtatgacctgaagtggaatagccagatggttttgttgggtttttttatttgtttatttgattgattttgtgttgtgtttagcacagagatttggtgattttttagaaaattgttcactgctttttgattagtgaaatattctgtgatagctgacagatgacttgtggagtataaaagcacagtgaagtggctgagaatatcgttaaaggtttcatggctgggcgcggtggctcacacctgcagtctcccactttgggagattaaggtgggcagatcacttgatgtcaggagttcaagaccagtctggccaacatggtgaaaccccatctctactaaaaacacaaaaattagccagacgtggtggtgggtacctgtaatcccagctactcgagaggctgaggcgggagaattgcttgaacccaggaggcggagtttgcttcatttataggatacgtggaactcagaggagaaaaagtcttcccaaggctattttattgcaaaaatatgttaatgttcagactaggctgataactttttccttatatgttctccctaatggtatgttcctgtatttcctgttttattctatgcatttaactgaatattggatttttacattaaaaaaatatgtttatgaaattaaagaagattgatttgggcagcaaattagaacctttttttgttaatagagaaagcatttagtgtgatgtacttgctcttttctatataaaaaataatgtttttcttaattttaaggacagttctaaataaaatctatgctacttaaaagagagttttaacatcccccattgccttgtagtttttcttttcctgaaaatagatccacaaatgtcataaattagtctgcagattttaccttattatgcttcctccttcaaaaaatatgcaggaaagtgattatatgtggtgttcaactcaggactgatgagttggttataattatcaaggcagacataatgaaatgaaaacaactctttctctagggcctcagaggcattttcagtcactatcataaccctgtcacgctgggttaactgttttctgcccaagtagatgtcaacacaattaatttcacagtttcctcaactgatacagttagggttcatttgctcatctgggcaagaagatccacatatgttaagggtagaattgatttctgggtttttcctagacagatgagactgtggaaaatagacatttatctttatatataactaaacggcattttgtctctttttcattagtccttaaacatacttttgttcaaattatttggcatcgccatttgacattcatggcataatttattcactcatcaaatatttatcaagtgccagctttatgcaggaccttttgccaggctctgaggttacagcaagagcaaagcagaaaagccctgcccgtgtgaagttttcaatccatttgggcagtaattgcaccaatatacctaattaacagaaaaatgtaaaaccccactagataatttgcatgctactggtacttgttctttactcctggtataatagatgcttgcttgccattggagagtgttcaatagaacgtcctgtcgcacagtgacgaaaacattctaaactcacatttctaagacagtaggcactagccacatttagctattgagaactttaaatgtggtagtgtgactgaggacttgaatttataattttctttaatttcaactaatttaaactgccacaagtggcaagagggattaccatatgggacaatgctggtctacaatgtatcatcttattccttgcatatattttacacctgaaaacagcacttgggcagcataaaaacaggacagagtatacacaagtttaatttaacatttactccgtgagcttcaaggagcaagaagatccatgagagagtaactgtgtttttggatatctgctaagaaatgtgaaataatgtccttgattttagtgtgttcatagattacaaactaatctttaatttatgtctggaatactgtacctggttgggatattttaaaagtccaatttcttattcgttattgttaccctatgaatcactgagataatgtattaacttagttgattaatataatttattgctataaatcttccccttttgcttatgctagtgcttagtaaaaattgcaaacacattttccccggagttgtattcaatatcattccactgcaaccaatttctaattctcatttcctagagtacatctattgcttaataatgggaaaagaggaaaggaactggggatggtgaaggatggcaggaggaagagggaaggggaaaggaaggaaagggagagagaagaaaggggaagaagatagggtattattggatagaaaaaaaaaaaacacagagaaggtagcttttcttgccaggaaacgtgggaaggttttggccatgaatactgctatgatcattaaagttgctgtcgtatttctcttctctagcatttaaatctccggattcctttcccctgcaggtttgtagtactgagaataatagagcgttttcagaccctacattcctcagctgcttcttgtttgtttctcatctatttctcgccaaagaaggaaaaatgagccaaacaattttctgctccttcccctttccaattggtatcgaggaccttttaactcactgcctcatatgaaacccactgctggccatctgcaagacagaacgatgacgtgtgtgtgtcacctctccactcagggttcacgccttcatattgtctcatcatctgtatttttttattgatgaggacagagcaaagaaaaaatatttctctatcaatttctgctgaagattgagtgtttttggtcacggttaggtccagtaagcattgggggtttggtggttggagagtagatattgttgagactattttagaagacttgctcaagtccattgaaaaagaaactacttctttgtgaatgcatttaaactcacataaatccatctattctttcaattgatataaatgttatatagatgatgccttggtttttctagattctgatgatacagagaaagaaggagaaaaagacaaggaaacttcaataagtggaacttatattttgtcaggcagtggagcatggaaggagactgaaaataagtgcataaacaaggggcaaaagaaaatttcatagagataaaggctaaaaataaatacagagtagtatggtagtaagtggtcatgaggagggcttcctggaagagaatggtcatgaaagttctcttaaaaacaggagcatttgaacttactgtgggtaatggaagaagcctgccatgggaatagctttccaaggaacatcaagaataagaattgtaagatgggtatgattctgacactcagttagaaaaacacaaaagtaaccagttgaccagttggctgacatgacaagaagagaaaaagtggtgtgagagaaggttatagaaactgagccatcactagatcctcaagcacctggaatgtcatttgttcttgttaggggctagtaatcaattaacaggacactgggtttcctaaattccattagatatggtgagatttcattggtgaaactcaagccagaggtgtttccttgaattgtttaatgtcatctatttgggaggaaatccgtgttggcttccagatatcacagaccatttctgggagttaaaaatagtgtccaggttaagagatacttacaggatgtttaaaaatattcttggctgggcacagtggctcacacctgtaatcccagcatttcgaaaggccgaggtgggtgcatcatttgagctcaggagtttgagaccagcctgggcaacatagtgaaaccccgtctctacaaaacaataaaattagctgggtgtagtggcatacacctgtgggctcagctactcagaaggcaggggtgggaggattgcttgaacccaagagttccaggctgcagtgagttgtgattgtgccactgcattccagcctggctaacagagtcagaccttgtctcaaaaacaaaataaaataagagtagtctttaagatcatagaatcagtttgaggaatagcagtagagttgaactttctcatcagtgatgaagttgaggagacaggaagtacctgaatctcgaaaccctgctgagaacagagttcttgctggtaagacatagaaggaatgattacaacatagagtgaaaatgaaaaatgttgtaagtacctgatttttcattaagcacctcatttaattgatctggagtttcaggtagcatatgtctgtgttttggagtttattttagggataaggtacaaatttccccatttaataaacagctgcctgctgtagtggggcacatgtatctgggactcctgattggagtgaaataaaacaatatactagccttgtttctgattttcttaaaattaactaaatttaaaaagataaaaagaggtagatgagaggaaaagaaaaaaataaaaatacgaaacaacagtaagatctttcaatcttgtttactactaaaataatgtctggtacataggagataatcagaaatatttatcaagaagggtagaaggtgtaggtaggaaatgagtctgttctctgcaatgaaaactgcagcacgtaaaatagcataagccttcacttttagccttgaaactcaaattgaatagttaattagtgaattaccatttcattgatgaaacggggcagtggggcatttttttcaatctcttcatttgtattataaatctatgcagaagattgatgtgggtttggatcatcatcatgaggctttattttaagtagcttaatcaccgttaatcttttggggtaactttcttgtgatctaagtatctggtaggtctccttgtctataaataatttcttatgttggattagggtttctataagacttctcatttaaaaattccctactattttctctgtctgagaaagagtatgtttctgatacctggagcatcaggaggtcatcaggatagaaatgagacacatcaatgtgttccttcaaactgtcattggtgagcatgtgcagtgacccaggtcttttggcagatgccagggatataagcaaacctaggatcaggcatctggtggtttgcagactagtaggagggaaaaatgcagaactattaagtggtataaggtggtaaaggcaccatgaatggagtctgtcaacagtgcaaacagagatggaatgattgattctacttggacagattaagaaagatttcacacagccaaactttgaaagatattgtggaaacaaataggaagatgatatgctaggcaaacggacatggtttgatcaaagacttggaggcacgaggcaaggtgtgtttcttgaactgcaattaatgacaaggtcatcccttgtcagtgcagtgaaagatgaaatctaagatgctgtccaggccacatcacgcatatgctcctaaaacatactgagcattttccactttccccatgactgcaggccatggggagtcattaaagggctttaagcagaagaacgtacgattctatgttcatttttatttttaaggaccattttgataaaatagagcatggaaagagcagtagtcatttaaaaaattcttttttatatttatttattactgaatattaagaacctagtatgaatcagcctttgtctacatgcatggtataaggatatgaaccaggaataaacattcgatgttgagcacgctatgaccttcagacacatcagatgaaatatcaccttatccaaaaagggccagtgaataactgttcatcccaaagttctctgtttaaatatagtcttaggtccccagtgagaagtgttcccctggagtcactgctgctgagcatagttaggccacttgcatgcaaactggaggagtatgtgttatacaagtccttattttcatcaggtagagtagatatcacatggtggccagtttcgacatcaaatccagtgttactctgtaatgggaactcaattttgaactgcaggtatatatacatttagcccatgctgtaattacatctgatcgtgtaccaggtaaattgattggctgttttctcccctcactgtttctcatagattataggcactagagagtcctcatcatctcctgaagtggttctttcccgggaatgcacatcaggatcatgaaaggagcttttaaaaaatatgcatatttgggtgtcgcccagaagagtctggttcccaggttagggatagagccgagagaaatttgtagtgttaaaagcttccttagggggcttctcatgcatttaccctcttggaaaaccactaattctaatcagatatctcttacaacacaactaagacatagcttgttagagcccggactaaaactccagttccctgaggcccagcccagagcaatttctgttatattatctttacctgtgttcatccacgctgccctggaccttgagccaagacatctgtgtttgcactcctttcatctggatggtgatggcaggaggaaaactgcaatctaagtgcacttgtcagctccagctgctataacaaaagatcatagactgggtggttcaaacaacagacacttatatcacacagttctggagcctgaaagtctgagatcagggtgccagcatggtcaggtttttgatgcccttgattctcaaatggcaaggaagctgggggagaaggggacatggggagggaggagaggggcagaggggaaaaggagggatgggaagaggcaactctttctggtcccttcttacaaaggcactaatctcatcatcaggaccccactatcatgacctcatctaaacctgatcacctcagaaaaccacacctccaaatgccatcacattggagggctagggcttcaacatatgaatttggggaaagcaccagcatttagtccgtaatgctaagagggtagttcccaaccccgactacacattagagtcatttgggaacttttaataatatactgatgttctgggcctagcccacgagatttgcatttaatgcttgccaggcctaactcttcatcctgttagtgatgtaattttacttaaagcctaaattttttcgtcttcaaaatgggagtgatgttacaaactatgctgaagattacatgagattacagatatcaaaagggttgctcatctctaaagtattgtaaaaatatcattttcaccttaattaacccactttctttctttgatgagcagcttcaggtgaaatcagtatttcaagatttatatatcagcgctttaaagaccaggttttctggtagccttgaattggaactgctgctctcctgaatatatcaggaaggcaatccagcaagagggcatagcttaagggtcacaaatttaaatatctacagggcccaggcaggtcatataaatgaggaaagagagggctggctctagaaaaatcattcactgcttcattcggcactctgagtcacttctaattgcaatacagtagagagaaatgtctctctactattagagaagtaatagtgccaatatggtgacaaatggcagctggcatttgcctctcaggactgggaaaacagagactgaatgccccactgaaaggggcagctgtttacactcatcccagcgctgctcgatcattgagttttgttctcccagagaatccaaaatccaggcttttatgtaaaagctcctgatacttaagtgttagtagctaatataaacaaaacaaaaacaaaacagggagcatttcacaggctaacactgactggcataaataccacatatgtggagtttgaatgtttcctgtgtgccccatttggcctgcacactgtcagttgatgaccattacttcgggccttatactctacctcacccatcaactaaggcattgcttctcacatatattgtttatccacaaacaaaatacattgccgtgctggcacccagttggcaatttctggcgtggatccttatttccttttactgaattgtcttgcatttgtttctagggacgatagtcattcatgctatcaatatttactgagcagatactgtgctagataagaatgcaaaatgcaataagatagagtccctgccctgtgttgcttccagtctagtctaggcgatatgcccagtgtaataatgaggcctcaaagaatatcgtggaatacagaatgaagatagctaacccacccgcccctacatagcccattgcttttggttctttttattataacagaaaatgtacttctttttcttttacccagttttttttccctcttgttttagagcgcttggccaacgtattgagcctagtgtgtgaagaccacatcctagcatgtgacgccacatcctttggctcttttgatgtttaggaaatatttggtgcccagaaggtcatgctataaaactaaaagtcatatcacccaatgtcgcgctaatgcttaatattgtcaatattttacttataatgcataatatgaaaaagctactgtcagccagaaacaaagcccactgggtgcatttggttcaacatgaggccctagctttcatatttcttattctagtttttggtgctcagagatgccaagtggctcatcttggggactgtctcttgtagcaggcatctctccaggggagtgtctcccaaactttgagatggttatctgttaatcgaaggaaaaataagttgtgaaagtaggccatgtgcaccaccaataaacatgaaaatttcgttggcaagagccctcctttccttgccaaagtgaccttggttggcgcaaagatgacagagtgcttcccttcccaggtctgacagcattgctatcacagcacgtttgacaaatcgttcacattaaatcggggggcactttcggcagcgccgacatcccctctccatcactcctgattaccacacagacgtcaaccatggcaccaagcacatttgtcacagggagtaaaaagcagttgttagtaagagcgctacctgtcatactaatggactagagcttgttgcttcgtgtctcacaggagcctacagatttgcaaaaaaaacaaaacatgatttttttggagggttgtccagtgtttcctgaaaatgcttttgtgctttgatagagagaggtactgaaagcttgtcagatgggacacccaaacgccttctcttggaaggggaaacagattctaattttttaagtgattttgctttttagtgactgctgtcatttccttgtggccaaacaaggcaatagcaagtttttcagttgaggaaatccacaccctacacattttaattaaataatgtaaaaaaatgaatggagtgattgtttgctattcatgagtaagcatgctatcctcatgctgaaatcgtgtgaagtcatttgaagtaggtaaagaataggtttttttcttgctatcatcacttcctttagcatgtaggtgcctcatgtgtcattcatacactttgtttcatagtctggccataagaaccttcagagtgggccagtcacacactaccatacccattgtacagataacaaaactgagaatgagaaaggttgttgcccaggattacacaagtagagtcgcatttcttgcctatgcctgttgactcaagtccacaatatcaattgtacttggatatccaatcaaaagtatacaacttgtttaaatgtggcctgtgtgggccacgcatggctgcttcataactctgtttccaagccattcttctcttctccttaagttcctttaccagtcagtatgaatttgatttctgccttttttctttgcctgatgatgcaaaaaaaaaaaaaaaaaaaaaaaacaaaaccttacctagaaggttttttagaaattagagaaagaaaagaagagtactgggtttggaacttccaacagactgccctttataaggtcaagtgaagactaaatcatggtttgagggagtgaacttccggtagggcacacgaaggggattgttgcgttagaatttgaggatccttgctatactttattctatcttttgtaggcccatgagaagccactttggctctttgatgagataggaaaaaaacaaactgtttttcctactctcacatgttcaacacggaatacttaacttctggtcaccaaaatgtgtggagatttctccctaccagcaaccaatcaattctccagcagaccccagctgggagttctataattcaattccaatgctatctacatggagatagtgttagatcccacaggttaagggctcagtcccacaagactgtccccacttcagatgccaatcacaagccccaggttgtgacgtacacttttgatcggctataaatcaggatttctacaagcccctctcttaaattcaattaatttgctagagtgactcacagaactcatggaaacactttaattacatttacccatttattgtaaagggtattacaaaggatacagacaaacagccaggcagaagagaagcataggacaaggtattggcaaggtataggaggaaaggggtgtggagctttcatgccttccccagaagcaccaccctccaggaacccccgtgtgtacatctatctagaaactccttgaacctagtccttctgagttttgttggaggcttcattatgtaggcgtgattgattacatcattggccattgttgaccgactcaaccttcagcccttctcctctctccaggggttgggggtgaggctaaaagtctcaaccctctaatcatgatctttctggtgaacagtccccatcctgaaacaatctaggggccccctattcatctcattagcaaacaaaagaccctcatcactccagagattctaaaggttttaggagctgtgtgccaggaaccaagaacagaaagcaaatatatattacttcttatatcatatcacaggcttcttttgaattcactcttccaagtactataataagctagagtgataagcttgagatgggctaggttgaataaaaaacttgttaaatgtttgattcctttcttgttttattacagaagtcttagataaatgtttctggatgatcaggctggttcatttccatgggatattttagttaacatcaattttcttttcaggggaaaatatatgatctgtgattggctcttcattacattcttctcagattcataagccaggaagcctcaatgtattaagccctctgattcaaaaggagacagtcccttataagtgcattcattcgtcaaattttattacatactttctctgtgtccagcactagactaagccctgggaaaaccaaaggaaatctgtatctcctgctgttttaatgtagattatcttacaggtagaaatggtcatctactttgggcatgcccactatagtagctgtaggccttcccaaaatattcaccttcataataaccttctgactattccccaggggttcacttttcggattctactttttcccattcttattctcaataaactaccacttatagtgtacccttttcagatcagactagcatttgacattatcaatatctctacttttttttctttaataccaggtttcctttcatgctgcaatatataaaacagatcaaagaggagcaaccatgggtgaaacagaggtgtgaggtgcccagtgcccacaggctctggtcccctgggaacctccctagaatatacagtcctgctagaaggtggggaaaaccttggtctaggttgcatccaggaggtgccacagaaggaggctgcatccctccgtggaccccaaccctctctgcttggacacacctacttgagcaaggtggggttgagatgttcatgccagcaggaagggagagtttttcaagaaagttcagatagggaagtagttagaggatatttaacaggtggattaaatgatggcttagtctgttttggctgctataacacaatgccataaactaagtagtttataaacaacagatgtttgtttttcacatttctggaggttggaaagtccaaaatcaggttggagttggtatctggtgagggtctgctttctggttcatagatggcgcctcctcattgtgtcttacatggtgaaaggggcaaagcagttctctggggcctcttctataacggcactaattccattcatgagggcttctccctcatgacctaatcccacctcccgaaaccatcacatttgggactaggttttaacatatgaattttggcgagacacattcagaccatagcaaatgataacaagtcacattttatatcatgttccaaatactctgaagtgatttcatatatatttgactcctttgatccgtatttccaccctacaagtctgtctcgctgttcattttagtttacataaaaaatgaattcacaaagtcatgtgcaaggtaagaatttagcgagttactatttgagccaggattcgaatcggagttccagtgtctgactctgttctcgtcttttgcccaccacaacccccagctcacaacagcacaatgtgtcctaaatagagctgatccttgccatccattgctttctgctcccaccccttcattactaaccttatagaagcacatatctacctgtagcgaggacagtttccatcaagacacgcatttccatggaaacgaactcacccaacccccaaagataagttaatgtggcatttatttaattttcgtaagttacattgccttattttctttacatctaggcatactgcatgatttttttaaaaaaaaggctcaggaatgtgaccctgtgttaatttccatggctacatacccaatcatccaacagtggcttggtggcatatgatatattcaatatatttgaaacactgctgcatttaaaaataactttaaaaggttgtaaatgtcaaattgagatttgaaatatgtcagatagctgtcatttttacacccttcattaatttcaattggactcagtgaattggatttgacaaactgttatcatacattgactacaagcatgctacatttatgtagcaaggacctgacgtacgggatgttttgagggaaactttaatatatgacttctctttgacctcctagatgacatgagaccatcaaatgacaaatgtggcagcattcaactctaagattttccaaatggtggcatttggaaaatcttcaagaggcttattcagaaatggatgtgtccactggagagtttccagtaacaaaaatagacatatttgctttaggtacaaaactgcacaatttggattccagctaaggaaacagggttgtgaataaaaatttcctgttggcagatctcagcaggtaaagacacgcatggaagagtcagatctgactataaaaatgctatcattattcaaattaatagcaactaccaactatcaagtgctatatgaagagcatgatccatagaacataatgcttaaaaacccatgttctggtgtcagatcgtgtgggttcagacactggctccaccacttactctgtaacactgggcaagtcacttaacatctagatgtcttaattttctaatgtgtaaaatcacgataataaaattacttacctcatggggttactatgaggataatctgcattcaataaatctgttatcatcacaaaccagggctgtactaggtgctctgtacatactcatttaattctccaactatgctgtgagatgtatattaccagtatcttgctcgtttaccagtgaagaaatgaagactccaaaggttattgtgtccagaattaaccacctggtaagaggtagaggctgggatccaggtaactgaggacatcttgtaggtcagtttgttcatctgtaaaggttggtaattgaacgtaaaggtcccctgatatcaaccattactagatgcaatgacactaggaaccagcccagtgtcacccactgagaaagatgagctacataaatccaagccccaggtcacagaaagccaagtttatgctcgaccaggacaggacagttggtttttaaaacatatacatcctcctgtttgctcccttttcaagaaaataagtcaggctttatgtgtgtgtatgagtgttagtgtcatattttaacacagctataaagaaaataccaataggtaaataacctgctaagtatgtttttaaaatgcaacggtggaagaaattttatgtagaaatgactaattttaaaatcttatatttctctaagttaaaaaaattattcatgtttattgcttgttttctttttcttggctttagtatatagaaaggtatttgaaaatcaaccagatttttataataaatcagaattttaaattttaggaatctttagaaatcatagcatccagagtgttcttgcattcctagcttgtccaaatttacttgcttttgtctggatgaataaattacataactggacctagctggagggtacacgccgctactcaactgattatacctgagggtatgccaatcttctgatttaaaacatagtacctgacttttatgagaaatttcctatcttttgaatgtctttaattcaaaaaatgtatgaacacggtaacggaataaacaatatctgtctgcaagccatttttggcccctagtggattattttgtcaccctaagtctcatccctttccctacgttttgcataggatcctctccttcacccagcgagaaggccaaggtcaacttttggctcctttggggtcattcagtgaggtggtagtaatatacgaagacagccccaggccccaggcttctgtgccttggttagtttcactacattattctgctactttcacttcttataagacaagtgtaaagtagtgtggtctgttaactagagcaagagaggaaattttttttctttgcttttatatttgggaagtagaaaacgcttttagggtaccttcataggctaaggactgtgtgaaataaaaggaaggctttccagcctgtgtttttctggttgcatgaggaagagagaagcacatcaaaatgagcaagaatgtgtggcctaccccaagggatgggtaaataaacaaggagaaatggggattgctgggagaatcaaggcaagtcacttccagcttcatgcgatctctgtcccctggcagttagtttcttaaatcacatcaatcccgcatccccttttcctcccattcttccacaaggcaagcaggaaaccctcctagagtgtgagagagggtgatctcccctatctgtgcacttcatcgtcactgacggctctgactggaagcaaatgctgcctttactttatctcactgtgggggtttggcattcttcatataagttatgtttatgtaaacgaggactctaagggtgaaattataatttatgagaactgcatggagctcctgacaatattcataaacattccaaacaactttatctcgattcagaacaaaacatacatttttgtcacctaataaggatttttattataacaatatttctattctggactgtcctgttaccgtgaataatatggggtggggtgaattttttttctatatgtttagaaatatttgttcatgatgattcttccttaagaagtggtgggcagtaaatattacccttattaagtcttgctgatggggaaattgactgttgatgtcttttagaatgcaggtgttatttctgttgttggttggttgtttttatttcattttgtgtttaacaaagtaattagcaagtcgtagatccttgaacctgagattgacactccttgactcatttgccctttgttagttgttatttattgtattttttacctctgcaaaaatacacagtaagtgagatatctttagttgtgttgtaatttcagaatatgataaatgctctagctggcattgcacagatttcaggtggggcattcagagggggacttagacctctgacatggcagacagattttttttgaacctttagtaccatcattcaataaacagtcagaatatcttagttataattaagagagacaaccaacagcccattttgctccagagtcactcatcacttaagaaaaaaaagaaaggcaagcaatcaccaattagtttgaatgttaatattccttttgctggtggtggaaatagagaccaaaaccagctcctctttacctctgttaatccatttctacttttgatagaaaaaaaatccaccttttttcctcctaagaaatatttgaacaaaaggccattagatagaattttagcttccagatttaaatgctcattcaagaataaccatgtaatcagctgagcttgcgaagaatacacaatcataaaatcatttaattaaattccatcaatgctgtttgttttggtgcccatttgggtattaataacaccgttgctgtttttaatgccggaggtttaccacttaattattatctttgcttattggagatgttagcatcaatttgtagggttccataatcacaccctagttgttgcttcaccagatatgatgcactttccagaactagaagtcctatagcctgtgcttgatctaaagatgaagtggtggaaatcaaatgaaaacatttgttaaactgtaaaaatgtaacaggaaataagagcagttattcagactgtgagtaaatttgatggggtgtgaactgatcactttattgcactttgtttatagcattcttgccatttgtagagatggcagtccaatcctcttcattgtcttaattagattaggaatggattaaaggagccaaatctattattaaaaaggcaattctgctgtgttcctgaaaaccctcttttggtttttaatttcttaaattccactgatgcaaaatagcaaatgccttacttgtaattatgagcatgtatgcattcatttaaaaggctgtaagggtattagggaaatcaaatcttcaatattcttcagaattatttctgaagaaataagggaagggaggaagagagagaaggagagagggaggggatggtgggctgcattgcttttggctgtgatgaatgtgaggaaacaaacagtgtaattgtgtaattgttttcttcttcttttgatttactcaaacataaaaagggcaatgcatgtttatatgaggcaataatttttccagttacatttgttttttttaattcacttccacagctaaagtatttgaaaatgtaggtgtctcttacatctgacttagattgagcatttgttctgtagggaggccttccatgatgattatctggttttgcattttgcatgtctacctctctcccttgtgcctatacacatgcaactttcagtttaaagctttgtgatataatctgctgtaaacattacacaagtattgctcagaactccagttggagcagagcttctgtgttggaaactatggtgctttattttttccagtgggtgccctagttttaagagttgctttttcccttctttaaattgtgtcatcttgagatgtaactttttaatgtattttctctgcattttaaaatgactgtatagtcattcatagtgctacacatctgaacacacacatgcatacacaaatgtgtgcatgtaaaaactggtgaaattccagtaaagtctgtggtttagttaatagtgttacaccagtgacaatgttctgggtttgataacgtactatagttacgtaaaatgatcttggagaaaactgaaggaaggctacatgagaactctctgtttttgcaacctcttgtgtatcttaaattacttcaaaacaaaaagtcaaaaaattcaatgtattgttttagtccattaactactaaactgctaccagaaaatattgatctctatttgatctacattaaattaattctgttttagtaactgacattcagatgtcaccagccttttgcagactcatattctgtcgttctacctctgtgtattttgcaagcatttcctacccactcaactctaatatcccctagtagaggcttcgtgtttgaacagtctttgtagccagcgagcctaatgctatgctttaaacattgtcttcacgggcatttaactggtgaatattcaaatggaaagaaaagtcatggacgaatggttaagtaaaaaaagaatcactgtgctagcacaatgcttgctacacagtaaactctctgcctatattcagaatgaaggaataagttaattaattaattttgctcacatatgaattttgtaccttagcaagatgggacccagtgatggctgagccatctgttcttttaagtactttgtgatggacttggattctgaaattgctcattaattgtcattgcttcagtatggtgccgtgcttgggattggaggtcttgaagtgatacctaatttcggaggactgtgacaaaatttatcactaattacctgcccctcaaatgggaatcaaagccatcagcaacatacgatggtgataataatggttatcatttatcgagtgattagtattctaagcactttgcaggtattccctcgctttaattttactccattgctagcttagagttgagcagaaccacttgtccagggtcactcatagttggcttgtgggtgggtggcagagctgaagctgaacccaggaagcctgactccagaggatatgctcttaccaccccctgtaagctctcccctcccattcaggcttgtgcccttattctgttaaatggtgagtagttatcaacaccggagatgcattagaatcaaatcctctgggggcttcttcctggacctgcttccatatacacttattcattttgtcttcaccggacatgttaaacttccagagtgactctaatgtgcagacatggtgaacatcattcgcttagctgcatgtcagcgctcactcaatgtctgtgaacagtgaaagctacttattctacttataagttcattaagtctgtgtataactattgcaaagcagaatagttgtcccagccacctgtgtttggggagatgaagctgggaggccatcaaccttctttgcaataaatttcctcacgttttgtcaagcaacctgttttttgtattctcagctagaggctttccatctctatcccccaccatctgtcaccgatgttcatttgagtaccattttacctgtataaatgtgtcttattttctccactccctctccccgcaaaaagagtttctatactaggagtcctaaaaatttacctagttagggagtttaggcagttcaggtaaatgagtgaagaagacaggtctttgagtagtgagtacccccttttagaaagacaattggggtggttgtcactgaggcaaactggggagtgtatatttcatttctaggagcactcactactcaaagcccatgacatagccacgtggaaacactgcccagtgttctagatcttccagtttttctggagactacagaaatataattttccatttcttttgcttggtttttgttttggttttctattgtgaactggcttgcaagatagttccatttgttttctcatcactgtataggtcaatattgtgtcatcagtaacaatgtgaaaagacatgtataactgaaaggaagtagcagctttattctgctaccttttcacatttttaaataaagagttgatctttctttactaactaccaagtgcaccaggttccagtctttgtcagagattggcattctgactctaaacaaggcataaaatttggtggatgctgtttcctcatctgtgaaattgaacctagaggagggcattatggaattacagggcacattaaagtcatggtctctggagtaagactggtgtggatgggatcctcttgctactacttaccagctctgttcttttaagaaagttatttagcatcccctacattccctcatctgtaaaatggggacctgagacattgactctcacagttgtcttgaggattaaaataaattgtgcattaaagtgcttagacctagtaaaagcactggccctcctgctaataaaagatatacttaatgcatgcaatgtttttaatagactgcagtcaggcaaaccattgcctatgactttgtcctgtggctcttgttagccttaagcattgggtaaacttgctcactctgactttgctacttctttcattggcatttcaagacctctctctgttcctcccccttttaaaaaaattaataggactgacagcttcatggtaggtggacaaaaattcaagttgcataactcgtttctaccaccactaatgtggtccatactgatctggaggttatgctgtagaaccagagaaaatctctttgggatgattagaagcaaagtgtgattaataatgaatatatgtatgtattttaagagtagggttgtgttaaatgtgaagagtcaataaatgcctgttaaccttctgagaggtcaatagtcggccgtgtggttagttatgcagggcagcctgagcatctgcagtctaattcagacctgcccttagatctgacaatggtacatgcaattaggaaaatgtctccctaataatggtaatcggtgtaaaccaagaggacagggcacagctgcggggagcacttggagggggaaatcagaacaattgatacattcccaagaagcaagcctcaagctatcccttttcagtagaagtctgcagtacctttcaatttgctcttgatcataatttactgaaaagcattttaaaaataagtgcatgactcttaaagactgttcttggctcctttttatttttaacttgtgaataggttgggattatatgtcttcctttttaataaggctattgtggatttaaatatctaacttaaaccctgttggctaaaactttgctttttggcttttttttttttttttttttttcaagaactgagctcaaaatgtgctatacaaaagctgtcttttgagaacatatatcaattcagctttgcctcacttgaaatgttgatatttgtaaatgacagagctcccactctagacttacaatcctctcctctttcaatgctccagagaagcaatcttgggaggagaaatgttttgactcatctttgattttgaaagaggtttagagctctggtctcctttcatgtctcaggttattttttggtcttccccatccccgattttcccaaacccctaaataacaaacccagttccttggtttctctcctttaaaaagataatgtttcaatttacaaccagctctgaataattaatgatggtaatgatgtgagaatattttgcatttatggctgctttagattttcaagtcccttttacatccattttcttgcagatcccaatatcaacactaagaagtaaggagagagacaggatggaaaatactttgaacatttatttatcctttgatttacttatccattcagcaagtatttaataagtgatgatgtgggccagatattatactcggagcaaagtctacaacatgaaaaagaaagacaaggtctccatgcattttgttggaaggaccaggcattaattacctaaatgaatgaataagaacatttcagataatgataacttgctgtgaagaacataaaacaagataatgtctttgcagagaatctactgttgttacttcagatagagttgtcagagaaagctgtacaggggtagggacatttgagctgaaatctaaatgaccttacagaggccatagtgtggtctggggagagcctgtcaaattcaaagacgctaagatgagaagaccgtggagagggaagagtagcaggatccagggaaaggtagggaggggccaggtcatttaggaccttctatgctgtggtaaagataattcagaaccattacttcactgcctgcactatttctaaggggataagaacttccccctgattgggtgtaggaatggagaaaggccatatagacacaagtagactcatgcaactaccactgcactgtgagctcaggaagacactacctcattcattatcacatccctgaacccctaggatacctaacataggtaagcaattaacaagtatattggataaactgagctgggttgtgtcaaagtgtggccatggcccacctgcatcacagtcatttagggacaattatttaaaatggagattccaaggcttcacttgcaggcttatgaatttggaatttctgagagtagagttgttaacatgcattttcaacaaattctaagacacaggaaatttgagacttggcctcatttttacttctcacaagaagttcgtactacattataaaaatcttaaaggcaaacatgtttaggctaatatgtgtgtatattcatgagagactcctgctgacagctgcatgtgtttacactattttatatactggatcttaataagattacataagtgtttcaattttttacatacttgcaatttatctttattaatgcaagcaaagtgagtgaaattaggaaattaattatattttgacttttgttctatttggtttatttgattttattatcaaaaagtaaacagcagcttggctgagggagacatgatgagaagcacccctctgggctattcataccatcaaacctctgaaatccaagagctgaggactgaaaattttgcataaaagcgtagcaatataaagcatgccatgctttaaaagctcatgttgcccgcataaaccaacttttttaaaagaagaagcctcagatgaaacaatgaattgagattcagggtaaactacttctggccaagttatttccaaatactggcaaaggtatagattcctcactcactgattcaaattttagaaagaagaaagaatacatagaatattaaatgagccttgggacccatccttagacccaccattatttcttccataatatagagcagaggaaaagaatcaacattaagccattccacaaggttcaggggtgagtattattccagctccaggtacattgtgtttttgaaaatccatcatacactgtagacatgacaattgctttaagtagcatttccagggatgaaaatgacaaacacgcagccagaaagagggataagtcttgagagctattttgctgtgtgcatattggaattcaaacatccaaagaggagaccaggagggtggggattccttcatctcacctttagagtttttgttttgtttgcttctttctgataattccttcttccacggtcttgtcaaagctgcattgtgttattatcagtttgttcttgctgctgcttgacctgtttcctaacaatgtatagttgtctgtacttgtggcagggaaaagagaaaaggcacttttgttgttttaagcatttctttaaaacatctcttaaaatcttgttccctcacccccaaataaaatgttgcagtaagacattgtataagatagcaaaagagtgatatttgctttttaggctcttagctcaagaaatagggctgctattttttgtttcaaggccaactgctttgaatgtagatcattgaataagtccccctcctctgaaataaaaaggagactgcatttgttttattttctaatactaggttctatctattattatttccgttgtcctgttctgttcagcaacatgattttgacagagaattaccagggaagaccgaattctcttttcccaatttgttgtgtttctctttattatttcaaaaaacacataataattttttttaccttctttcagattccccactcccagtcgatttatccagtgcaatttcactttcttttttaagcttaccaccaaaccagtcattcttacaatcttgctgtctgaatgctacatcgcagccaacaggattttgtttagcctgcacagtgattttttattactgaatttgaatggttttagatgagcaagctccccactatgtacaactacctcacacctggctgcttcacattgttctcggaaggaatcctggcagtaagaaggaatctagcaagaacaactcttgtattgatcttttttgttgttgttctgtttgcacaactgcaaaagagagtgtgtggaatactagtggagatgctgattgttttggttttgtttcctttttaaatttttttcccattatagtaaaatgaaatctatcccttttgggagatttgaacaatgtatttaaaagttaggtgtttttccatggtaagataccatctcacaccagtcagaatggctattattaaaaagtcaaaaaataccagatgatgatggggctgtggagaaaagagaactcttatacgctgttggtgagcatgtaaattagtttatccactgtggaaagcaatttggggatttctcaaagaactaaaaatagaactactatttgactcacctgtaaacattactaagtttatacccataggaaaataaatcattctaccaataagaatacctgcactcatatatttattgcagtaatacaatagcaaacacatggaatcagcctaggttcccatcaatggcggattgggtaaagaaactgtggaacatatataccatggaatagtacacagccatgaaaaagaacaaaattatgccttttgcagcaacgtggatgcagctgcagatcattattctaagtgaactaatgcagaaatagaaaaccaaatattgcatgttcttattgataattgagagctaaacattggctagtcatggacataaagatgagaacaatagacacttagggctacaagagtagggagggaggaagccttgaaaaactacctattggatattatgctcacaacatgggtgacccattccattataccccatatctcagcatcacacagtatacccttataacaaacctgcacacgtacctgaatcaaaaacaaaagttgaaaagaaagttaggtggttttcatgttttatttgccaatatttaccatctaacttatgtactacatcttatcctcccaaagacaaaaatcctgacatataacaagtttctcatccacttaaaagctgtgttctgagctcttgatattttggctctgccagttataacttcaggattcaagaacttttccttaacaagaactaattttgttcttttaacttaaggcttcataacaagaagagttgttgggaatgacaaaatataatctataatatgtttagtaaacacttaggtgaagtgtttatctgtagatatgtaatatagagagctataaacaaggtactagttgcattgatacccattctgtttcattaagaaactattcaccctcttaactaagtccacttcctcttctttaatcacctagttctgagttattggctgattttcagtattccattccttgaggcctcatttagcaaatcacttccttaaatcatggctgttttacccccaagcagagagctgtcacttcaccttttcacagggagacatgtttagactttgagggctcatcatcatcagatatattctcatcgtagcaactcctcttctgaatttgctctttgaacaatgtttgcaaagctagactaagatgactttttgcatactgcctacaacagctatctggtattaccaatacgtttaattttatgtgtgatcgtgtggcattgtaaaatataagaagaccattccctggctacagtctctcccctactattcagattttttttcagttcatgtttaccttaattattttattatcacataccacctcactgaagccatccaaaatgttattattaataaaccattacttatcaagatttttagggactttatttaaaacaatgcttataaattatgaaatatttgctgaagtgtatgtgtgatcattttttatgtgtctgtatatcccagataaggaataaacaaaggtagaggtaaaaaccactataagttagataaggaaagtctgctcagatgtatcagttatctattgttctgtaacaaattaccccaaaacttcatggtttaaaacaataaacatttaataattctgacagtcctgtgggtcagaaatttgggagtgcattaatggggcagatctggctcagggcctttcatgaggtggcagtcaagacatctgccccagctgaggtcatctgaaggcttgactgtggcagggagaatcatttttctgggtagcttaattaaaatgactggcaagttgatgttggctgttggcaggcagcttaaggttttccctgctggagtccctccatgggttgtttgaatgtccttatgacatagcttgcatccaccaaagcagcggagtcaagagaaaagaagaagacatctcttctatgacccaaccttgggacccatccttagacccaccaatatttcttccacattctgctctttaaaagtgattcactaagcccagcccacattaaagcagagaaagattaggctctgcctttggaaggaggaagtgccaaagaatttgtgagcatatttaaaaactactacaccatatttctgtaatggctaagttttatgatatccatatcttccacaaattgaggtggattgtcaatgtttgtctttaccattctcaaaatgtgatcagaaggccaccgagagaggcaaggttcctcagttacataaaatggtctcaggttggacgatattatctggattttcatgctgtgtgtttctgtcctagcttcccaaattggctgttatacttaatagaactaaaaccattgattgattggtgtcatacataaaacaattccagtcttccttattcatttgggtaagtggtcgtttttaaaaagaaagcagaaacatgactaggtcagtagcttataaacatgaattttgcatatgactcacctggagcttttttaaaaacaaacatttctgggcactagcccagatgtactcaatcatgagttctagggaatggatccctgggaattgtgtgcttttttaagttcggggtgattctgatatagccagttagaaaagttggaacaactgctatacacaacgaaatctaaaaagcactcgaaaaggacaacaccaagcaaaagggaaatcattggcactctcatgataatcaacattattttgctttcagaaaaggctgggtctgggtttctaggcactttcccacaccagccccaactgacaaggacagtctggttctgtagctgcatccccaaaggcagtaacaccggggccgccacagtggtaagctcactggcccagaaatgcatttgttcacgctttcccgaagacaatgactctctttctgattagagttgtcctcccttttacccagaggctttccatgcaaccaagggagcataacaatgacatgagggcttggaaaggaaatgtcttcattgatttttatttcatgaattggagcctctataaaaatggcaaagacatgttttacagtgtcaatttgtggaatggaggggaggactgttaaaacccatccattttccaaaagtttaaaccactctaatgaattaatccatagataatggattgaattcagtgcaattaccctagtaagtaaggcttgttaaaaagagataaggcaacacactaaagaaaacagcaatttcagctattaactggatttcatctgggctctgataattcagtatatgagttccctttgaaaagagagaatgtgaggtcctattatcaatgtagctaccagatactagagttcacctgctgatattaaactgcagaaaaagaccataagatgataattctgacaaccattttcccaataacctcaagatatctaggatgtatatttgatacaccccagtaagtctttataaatacaaggctttgattccttaagacaggaagctcatttttgttttgactctacttctttttttttttttgaaacggggtctcactctgtcacccaggctggagtgcagtggtgcaatctcggttcactgcaacctccacctcccaggttcaagtgattctcctgcctcagtctcccaagtagctgggactataggtgcccaccgccatgccaggctaatttttgtattttaatagagatggggtttcatcatgttggccaggctgggctcgaactcctggcctccagtcatccacctgcctcagcctcccaatgtgttgggattacaggcgtgagccaccacgcctggtccgactctacttcttatgaatttaaattatcctagttacatacagagagatccacattattttgaataaactgctaaaaggaaagcctcaatgggtattacataaagtaaggataatcacaagtatattttgtgtttgtaaagaactttacggtagaacggcagtgtctttccggattatgcttcacatagcaaatctctgtgtccaggcatcagaaggagtttaacaccaagccttagtcctcagaaggttgctgtcaccaacttgaaacctgagttctaagagctcatgtgcatttatcttccagttcttactcctggcactgtattcaggtcttcagccctcttctgtcgtcgttgcttttttcttcctaaagctggtcagtgacgtctctgttttgcacgttcctgttatgtggatcattccaaagacattgtggtcatattctccctgccctattcaaaaatctccagttatttcaattcctgataggtgtgacccagaggccacagcataacgttgaaggtcctctgttgtctagttttcctcacattttcaacattcggttccattctcttccctcgtggtattatgctttgtatgttgactcctccttcttcatgatcagggatttctcttactgtgatagtgttctacctcctaaaactatattacaggcccctgtcagtacctcttcctttctctcctgtcatagccactgattccctccacctctgagttcctatggtagtggaaatcaggatgacacagtacaaggtggtatagagaatgtgggacttaggatgagctggcctgatccaaatcctgcctgtaatacttgataattttatacttttggacaaataacctctctgtcttccgtttcatttgtaagcataaggtaatacctgccttttaagaataccttgcagttgaggataaagaaagactttagcacagtgttactattgctaatattctgcagttgaccattcattcttactttctttattactcattgactttttagctgtgtattgcttgcattgttttccgaatacattggcaaccacctaaaagaagcttgtccctttggccacagtcaaatctggaatagagccttacataaattaatgataattatcataatttattaagtgcttactgtaagtcaggtactaagctatattaacccccaaacaatctttgaagtgaattctgttatcatcaccattttccacattagaaaagttgggcttagaaatccaaggtttcatagcatatgtgtggtagaacaagacgttgaaccaggtcaaaaggtttagtgttaacattttgacttctagaagaaaaagagagacctaggttcaaatcctggtttactactttctagatctgtgacattaggtgaatttcttaatgtctacatgcctcggttttcttttctgtaaaatgaggctattaatagtgcttacttcctagggtttttctgaagattaaatgagataatccatgataaactacttggcatgtttgaaaggctctgtaaatgctattcattaatacttatttattatgtctataaaacttgtacacttaaatctcatgcacaatgccatgttggtacatattttccaattgattatttttatatcactgtctctctggaccaaaacagttgaaataattcatagaaaatccaggactgagcaggtacatgaattgacttcacactagaacataaagcaagatagtgttttcaaactctgaacactttcaaggcttactgatggagtgataataacattccatactcaccttgtagtgtccagtaaatacatatgtttggttttctcagtgttatagagagagtcaactacattaaagtaatacacctccctgggatttgaggaaattattgcacttcttgtgccttatgacaccacccagagtgtgttataatcacccagaaaggcactgcttgttgtatcttgttgcgtgattcattatctagtagaaagaaggagaaggaggaggaggaggggggaaagaggaggaagaggaggagaaagaggaagaggggaaatggaacaatgctgtgggaaatccaagtagagcagtcctcccttaccctcaggaaatacgtttcaagacttccagtgggtgcgggaaatggacagtaccaaaccctatatgtacaatgcacatatttcttttttcttcttcataattttatggatagaattattcttaccttacgtcttagcagcctcagcatccttttttttttttccgttattaagtggagcacttttacttttttacttagaagaaacactttatggcttcttttggcatatccgaattaccagcatcacaactcttgtgctttggggccattatcaggtagaatagggttacctgaacacaagcactgtgacaccctacagtggatctggtaactgagatggctactacctgacagatgggtggaaagcattagcagcttggatatgctggatgaagggatgacccacctctgcagtgggatgaggcaggacagcatgggattttatcacaggattcataataatgttacacaatttaaagcttataaactgcttatttttcgaatttttcatttagtattttcagaccactattgagcacaggtaactgaaactgcacgaagtgaaattgccgcaaataaggggggagttatatacactcctttgagggattttgagggtctgggcaatatatggtgatttttatgactgttgatctcaaaaaagtctccagtggaactcccatatttctcaaagcatttattctttaaaatgcaataaccatttataatatatttaaagccaaactggatcagtaatctaggaatataacatctaagagtgtcactactcagaagggaaattaacacaggagagatacttggagctatatctgtgcatagcttttctctcctgggaaagccccagagtgggaaattgtcacctgaggcaaaattatacagaagattgatttattttcagtccacctaggaaagagctccccagtatcctcatgtacccaaccgggttttggaccactggcagagattgttcctctattgtaggatatatggttgttatatatatccattcattcatttggcagttatacattgagtgtctaccgtgtgcgatatgcttgtgcctttgggcctgccacagctgaatctggaatcgaactcgtggcagtttaagatttaagaaagatgagatccctgccctcttgtcgcttgcattacagttgagaaaaaaaaagtcagtaagcttggcgataagtaaacacaattacttcagctagtgatttgagctgtgataaaaaaagataatgaaataataaaacgaagagaggcaggcaaatggggctatttcacggcagatggtctgggtacagcacactcactgagagtgtgacatttgagccaaggcttgaacttggtgccagccatataaagacctggagtgttctcggcagagaaaatagctacaatgaaggtcttagtatagaacctgttgggcgtgtccagaaatagaagttggatgtggctgaagcatagggagtaaggagcagtgggtagagtagctggtgcaggcaggggccagcttatgtaagtcgtgcaggccttagcatggaatgtgagcgaactcatgactgctcctccaatgtggagttcttaaaagcacagaaatgagctgtcgctgagcatgtaccatattcctactactgttccacacaagactcacctcacttcctctaagcatgctctcactagacctcacccccctgggctttgcctattctatttattttgcaaatgttgctttaaacttcacttccttagaaaagccctccctgacccctcgactccccaccctcaggcaaggctaggacacctgccacacactctcataaatactttaccctttttaatcatagcccagattgtggattatgattatgtctttgattatttatttgcccctctctcttgattgtgagcactgtgaggtcaggaattgggtcagttttggtcgctgttattctctcagcccctgccatgatgcctggcacctagaacctagtcagcaaataccaaacttcttgatcctggtggtatgttcactgccccaagaaagtgaatgtcagtgggtctgattctgccatctcacatctgcagcaatcctgtgggggttttaaacagtccctgtagatgttgctttttacccagcctctcagcgacccagtagggcccacctgagagggctgtagaggcttcctgttgagttgggcttgacatggaaagtctgtcccataagtattacaagttatcatgggccatgatagtgtctatggagcaaagcatcttggatccaaatatatcaggttacccctcaagaaaaaggaagttcttagagaaaattgttctacatgccttgggaataaattagtctattacaaaatatgtgaatacatataaatataataaaatgccaaagtgacactggaaaaatcaataattctactcagcactacatattaaatcagctctttaatacatatttctaaggcagccattgccgccatatttaaatctacccagttgagagacataagtcaattgtgaatcccacagcgattaagttttttacccgttaatttcaaagcagtttgtttattttgttgctttactttggacttcatttggagcacaccagtataggtgactggtatacacactaggaaaattcacgcacacacaccatgcacatacatggaacatgtgtgtgtgtgaggtagctttagtacccagcacagtacctggcacaaagtaggcactatgtagctatttttattcaacatatcttaaaaaaaatactccatgaaaggaaatgccctgctctcgatcacactgccaaaaataaaacacaaacaaacaaacataagtttagatgacttggcaaacatgttttattgctttaaagtgtggtttctctgtcatgatttcgtatcattttctgaagtaaaatgaacagagttgatatgttatgagtaaggagtagcagagggagaaattgagaacacttgcaagactcctagattttgtactaaacaacatcagtgaaagagcaaatctatgagaaagtttaattttggatgttttgagtttgaagtattgctgatatatctatatggagatgtctgggaggcagtggcttaagttagaagatagagttaaatatttgagatccaggagttggtagtaaatacagccacagcgaagctaacaatgcagaacctgaggaggttcgctaagtaactcagaggcacatagatttatcagacatggcccctctgttcaaggagtttacattcctttcaggttgacaagatatacttgtcaacacttgcaagttcaaagttttgagaagaataaatgattaaggttagaatagttgccacaggcttccagaaaaaaaaaattaagacttgaattagcccttgaaaacggagtggaatttggagaggaaaattttcagaagacattcagggataattggagcaaatcagtcaaaatattcttgaaaacacatggcaaatgctggatttaatccaagctaattttacttcataatatcaggtagagtttcatctaaagctctccaagtgttagcttaagggatctttctaaagcagaactgaattggtggaagcaatcaacctaacagattagttgtagccctcttttcccttcctccctttctccctcttttctttttttccttccatctttataataatattgactaatcaccttatgtgacccaggcactataccctcctatataggtgcaattctacaaaagaaattaatcaatagaaaactgtgcctggaaatatatcttaaagaatgtagcagattactttgcagtccctatgtgaagggcagtattttttattaccaacagccattttgctttggttcattggttcaaacccaagagagaaatttccttctgttatcaggaatggttgggcgtttcctgagcaactggtttgtttctgtattatgaataccatgggtgttgtaactgtgtgtgcttcctctttaaattagttgtggaaaacttgggcttgggaacaaatttgcggctaagatgtactgaatcataaactgcagggttgggacaagggattcaaaaaatctcaacaagtgatgctcatgattcaatgaacttaaaaaccatggcttttgtttctgtttttaagaaacagttttgtaatgactgtttggccagtgactgcattccaatatagccccaggaagcatgtccagtttgcaatcacaagcaaggaattcttctgatatttggcatagaatttgcaagtaagttcaattgtaaaattccataaggttagagaagagttctagaaagttaggaattctctatttgtagttttagggtgtacttaaaagaattgcagttatttacgttagtatttcttgttatatcaagcacaaagaaggtgctccataaatatctgaagaacttaactgattttttttttttttttgagagagagactcagaaaagttaaatgactcaatcaaggtcattcaactacttagatgcagaaaccactgctggtgctaggactcacatttttgattcatagtccaatgttctctctgcagtaccagctccataaagaaaattgatggctctgtaaataaagcttcttttttttttttaaccacgtacttaagcttaagcaatcccatctgaatccccttagttccctagcttactcagccagggtgaaactgttaaacaaaccttcagtctacccagagcagtcattcatttgtcctcaaaaaccttttctttactttttttatggctacaatcatagagatgagtggaattggagaggaaaggttttagaggacattcagggataatttcatgaaaataagtattcatgaacataactaaaaatttaagcattgattttcagttgatgggtccatggttaagtttttggtagatcatcagaacgttatgagatcctagcatgttgaagtctcaactgggtacccctacaggcttaaatattgactttgccattatctagagcagtggttctcaaatgtggtgcaggaaggagctattgaacttttcatttatcacatccttgtaaaatgttgtgtacttttaatagcacatgcaataataatatgtgtatataatctatatacagagatatataatttacaaataagtatacagataatgtgggtttgtgcctttacaaatggatatgaatacatataagtttcagactactgatagagttctgaaaactaatttttctattgtatctacgtaagactactgagagtagcaaaccacagtttgttttttccttctctccctgtctctctcctgcccacctttcttttttctttttctttcttttcttttttattcttcctgagaatgttttccaggggtgtatctgcattttcaataaactaaactcagaaaggtaccacttacaaagttaaaccaatcaccagtcacaatagtaaataagcatttcagccattagccaaactcaatagctgtattgccactttgtctcaaaacattctctgaaatatcatcctaatttccctaaatacaaggaatctggctatgatcagtacagtctttttttttttttttttttttttttttttgagacggagtctcgctctgtcgcccaggatggagtgcaatggcgctatctcggctcactgcaagctccgcctcccgggttcacgccattctcctgcctcagcctccctagtagctgggactacaggcgcctgccaccacgcccagctaattttttgtatttttagtagagacggggtttcaccgttttagccaggatggtctcgatctcctgacctcgtgatccacccgcctcggcctcccaaagcactgggattacaggcgtgagtcacagcgcccggcccagtcttttcttaagatcacacacttaactttatatacttggcaagaaacacataaggaggaagtttttgttgttgttcttttgtttttgtttttatttgttcattgaccagttattttaatatgtttctagcctacttaaaaataaaagtcaaaaagtctacttaattatttttaaaatgtttagttcaccttctcacgagaggattttcacatatttaaaagcattttttctataaagaaataataaatcttttagctgattatggaacattctaagtattaataattagatttaagaggattcttttggagatgcaatttaaaaattctaaatgcatgatacacacttctgtgaaaagcataataatcacctatacaattagctaaatgattctcttgagttcaagaatataaattggtgagtggctatctgcattaatcagataatttccatgttttacttcgggatgtagacttttaaaaatattgccttgcgagttttattttaaataataactcattgaaatggaagtggaaaagtagatttaatccatgcttaatatttgtctgatttttgaaggatttagcactgttcctcagagaaccatggaggaaaggtaaaagagcccatctagaagcttcttggattagtttgctcattcatttcatccattcatttacttaacatttattgaatgcttattttgcaccacagtcatgtatgtcagctgtagactcatgcataacagttgtgattgctgacttacagggtatcaacttcaaatgatagactgacatttgataagaataccaatgatatcctattacattgattaatcattacttataatttgttttaaaataattgtattgtacatactaataaaataaccacaacttctagagctatgtttgaggccctatgctagtccctttagattttctctcatgcttttaagtaccctgcaagttgacattgtgtcacagtgtgggagctaagaaacgggctggactcagaacccagaaaatgtggctcggctctcttagaatctgagttatctgagtgacctagaacaaattatttgatctttcattgcctctgttgctcatgcacgatatgggggaaacaaaatcatctatgatttaaatacggctactgtaaatgttaaatgaactgataatatgcaaagaacttagaacagcacttgacactaagaacgatgtgtttgctatcactatgattgttgctgttgctatctgtattttaattgacaagaaataatatgctagtattaaaaagagaattatttacatattaactttgcttgggatgaagtaaagcaagcctgtttatcgaaaaaaatatgatttggtccttgaaggttgggtaggatttcaattcaagtaagaaaatgcattccagggaggaggaatgaaatgggtataggcatggatatatgataatgcaaagtaagtataaaaaaattagaatttagaccatttgacccagcaatcccattattggtatatacccaaaggattataaattattctgctataaagacacatgcacacatatgtttattgcagcacaatttgcaatagcaaagacttggaaccaaccccaatgcccatcaatgatagactgcataaagaaaatgtggcacatatacaccatggaatactatgcagccataaaaagaatgagttcatgtcctttgcagggacatggatgaagctggaaaccatcagcaaattaacacaggaacagaaaaccaaacactgcatgttctcactcataagtgggagctgaacaatgagaacacatagacacagggaggggaacatcacacaccggggcctattgtgggttgggggaaaggggagggaaagcattaggacaaatacctaatgcatgaggagcttaaaacctagatgacggtttaataggtgcagcaaaccaccatagcacatgtatacctacataacaaacctgcattttcagcacatgtatcccagaacttaaagtaaaaaaaaaaaaatattagaatttgggagtctggcatgtagggtatatggcaataagaatacaaaggccagattataaagttctatggtttggactataaagacagaacagggcaggtgtgtgtgtgtgtgtgtgtgtgtgtgtgtgtgtgtgtgtgtgtgtgtgtgtgtcagggggcatgcatacacaagtgcacatgcattcattcacactggaaaattcattgaccaggataacagtttgactctcaagttattattttctttctttaattgtccacatataatcttagcacttaccaaaagctgatctgaaaaggagctttaggaacaaaggacatcacctaggcacaaataatcacttaatttatgttaatagcaccccaagtctggacagcagctatcagttaaatagaccaaaaattagactgagatcaaaattactagcccaagcacagtattaattttctgattgatggtgagtaagagaaaactactgggctgagcttcagctgtatttcagggaacctgtacatttcttctaatttataaagtataataaatgaattaccaagaaggattagaagacagagtgtgaaggatgaagcattcctgtattcccctgatgtcagttgatctattaaattaacaagcatatagatagattatttaaagatcaatttagccacgaattgctttcaaatgaatacatcaggcatcaagccttttctctgagatcgttttgtaattggaatacatattacacacaacttctcatcacaggactcaagcagtttcaatcaggaggctttgctctttctgcaaagtgtgtgaaaatcaaaaatgagcagatccacttcattatgtataatgaggagatctgtagttactctaagtaatcgctgaaaagaattgctagaaaaatactccttgctcacatcactggcactgggctaacacttgtctctcagaaaatcttttcagcatgaaagttttggaattaagttcctaataaacttagaaagtccaacagctgtgagtaattatgatacaagcatatcaatccatgtgcaaacagatttattcggtaagctccaatcctcttgctaacccttcactgcaataattaagcacactctaatgagtttgttagtaatttccatatgattttcctcctaattattatttgagttgcccatgtttataatacttagtaatatccttaaagtatcaatggtgaagacacaattttggctggtgtattaatttgtatttccttattcatatgctaaataaaccaggagaaaacattcatttaaaggtcaaaatttttggaataggattttatgtgtgtgtatgctcatttcttatacacttattcaatacccatgaagcaaatgagtcatcttagcctaaatcaggtcatgtcattccctgcttaaagaactccgagttcttatcatggctttcaaataccattctgactttgtctcttaccacttgctacacaattggcttcagaatactgaccttcttcctgcttcacaaaaaggccaagctggtttatatcatagggtctttgaacttaggacagttatgcctggaatatccttttcccatcattttatgtagatggctcccttttatcatcaaaaaggggtccactcagatatcacttcatcagggaaaaccttgacttttagctgcaatagagctttagccagccattctctatcatctcacccaatcttattgttttaaaaaaaacccatcactctcttaaatgagctagttggtttattcactcctctttcttacacctagactctaagcttcactgttttcctaaaacagtgcctggtacatggtaaattcttaatgaatatttttacaatgaatgatttgttgaatggatagctggagcaggaaggaatgtcagctgtctgatctaccactcagtttatagatgagtaaactgacatatatttgcatctatgatttgtcaccaaaatgacacagcctgatagtgcagttctaggaaattatgtcccaagcttcctgactcctggtccaatgcactggtcatcctgctgcctgccttcactttttttcaatctgtctggttgtggttgttgagatatatgtttacacacaatatgtacttgggcactatttaaagattttgagaatcaaaaccctaccaacttcaattctttctagctatatggacaagtcacgtaacctccccggactttggttatctcgtttctaatatggatagtagtcatatactagctgtgccccaccaggcaagtgattgtgagaacgaagtaacaaaacaaattgcagatttgcttggtatggccgggcgcggtggttcatgcctgtaatcccagcactttgggaggccgaggcaggtggatcacctgaggtcaggagttcaagaccagcctggccaacatggcaaaaccctgcctctaactaaaaatacaaaattagccaggtgtggtggcacatgcctgtaattccagctactcgggaggctgaggcaggagaattgcttaaacccatgacgtggaggttgcagtgagccgagatcataccactgcacttcagcctgggtaaacgagagcgaaactccatctcaaaaaaaaaaaaaaaaattatttggtaaactggaaatatataccttgcaatgataataattaagacccggataccacttagtaacacagtataaagcagaaattaattcttgttacgtacacttttaaatagattctgacactgaaattccatagatatcacataaggcagtgttacctatagagaaatagaaacaaaaatagaaatagaaatatatatatccatatatatatatatatccatatatatatatatatatatatatatatatatatatatatatatatctttctcttaagcttagtggttctcaaagagtggtcctcacatcagcatatcaccaccacctgaaaacttgtcaaaaatgcaaaaatcctgaccgacctcagacctgctgaagtggaaaccctaggagtcagctaaacaatccgtgttttatcaagccctccagggaattctgatgcccactcaagtttgagaacttttgccttatatgattgaataaggcaaacaaaataacttttgtaattaatgaagccttactgtgtccatgcatgtttatagaagttcattgcaaaacctaaaagttaatactgcctcaaaatctaaaaaattaaaattgcatcaatacgtgtcgcctacttattttcatggcagaaggctcgcagaaccaaataaaccacggggagtagttatctataatgagatgggagaccaataatttatcacctatatatcatggctgattgcagaaggaggtcattataattacaaagacactccttctaattaggcagttcagtgaggaagtaaggaacttatcaagatggttcaggaaaaacaacagcaaaaaccacatttggtttttgtgaaaagatggtcactggtgttttctcccagaattcttgttgcatttctcaaacaatccttctggaattgacaagggaacagaatgtacggctgtaatggcttactaaatcttacaaagacagtaaaagttactgagcatcaaaatcaattttaatcatgaaacaaataggtattagagtcaaatctgtccacttcacttagaactcactgaacctgggctagttagttaactttctctgagcttcagcttcctcgtcagtaaaaagggaattataaaacctgcttcagagaattgttgcaaagactaaataaaaatgcatctaaaggacccactaacataccaccatgcctggcacaaaaataacactcacggcagagcgtggtggctcatgcctgtaatcctagcactttgggatgccgaggtgggcgaatcatgaggtcaggagttcgagaccagcctgaccaacatggtgaaaccccgtttctactaaaaatacaaaaattagccaggcatggtggtgcgtgcctgtaatcctagctactctggaggctgaggcaggagattcgcttgaacccaggaggcggaggttgcagtgagccaagatcatgccactgcactccagcctgggcaacagagtgagacgctgtctcaaaaaaaaaaaaaaaatatgtatatatatatataaacactcacttactggtggcttcccattttcatcctcctttaggtaaaaagcagcaaatagttctctttaaggctttttctctttgcttactctccatttttctgaaatatcaggtattcagggaatgagaaggagacaatgaatgtgagaagagagacatgatctcaacatatagcaacttaagtgtcagcatagatggtatttacaaaatgagccctgttctgctgagacaacagaacacagttgacagaaagtcttaagtagctatcccaaagatatatgtgacacacaagtagactccttttcactcctcctcctcatcttcctacacacaaacatatacatttgtttttttatacacacacacactcatgcgcactaaactgaatctattgtgagcctttattacctatacgatgtgaagccattgtttcttatcattcttgtgaagtataatacaagcatcatagcagagcttaaaagacttaagagagaaagaaaaagtgtagtagaattgtaaaaggattggacatacagaattcttcagtggaggaaatgcaatgcttggcttaactcagtgaactcagagaagaaattaaggactaatcttgatatcatttgcatgtgcatgctaagtttctgcatagacaccaagccccccttagcatgtttgtgtggatatagtatgtgagaaaggggaacagtgcagggatcatgtcttctttggacgagggtgttggaaattgcccctacatgtaaatcacaggacacagcaatgccacagtgctcagcggatgttcccaccgctcactgcaaaggggatgtgactttgtaatgacaccacagcagaaagcttctctcaaacagcctgccctggaattattgttaaatcatctatgtattaattacagctcctgggttttctaacagttttatagaggtatattttgtatgtcataaaattgtccatctgagggtagaattcaatgatttttggtaactttactgaaatgccataaccacaaatcagttttagaacatttttgtccccccagtaagatccttcatgaccatttatagttaatcttcattcccacaccccgccctaggcaatgactaatctgtttcctgtctctataaatttgccgtttctggaatttgccgtttctggatatttcctaccagtggaatcatgcagtatgcggtcgcttgtgtctagattatttcacttggtgtaatcttttttgtggtttaaacatgatgtagcctgcgtcagtggttcattttttttccactgctgaataatattccaactgcttctgttaaaaataaaaaaggctataaataaatgaatatttatttatacctctataaaaactgaagggtaacacatttccagtgaagactaagatccagattcagagtcaagttttgttctctggatcacacaggaacacttgcctgattacactttctttctcattcatttgttcatcttgtgaagaaaacaagtcaatgttggcttccctacatcacttagaaataataatttcacaatagattattcgaaccctaaatggtggaaatataaaagcaatttctggccaactgtggttaaaaaacaaagttctaggcattcatttggagggtgctatgatgcaaatacgtgttaagtaatgcaattgagttaaaaattatcatagtattgagatgagtcataggaatctgaaaataagtaggagcttcattacttttaatatttggaagtaaattaattcagtatcgcatagttttgctgatttcatttttttcatattctaatattgtatcagaaggattgctgcaatatttacatattgtctttgctgcatgcaatatagttaccctctcaaattatccacctggatccatttattttcataatgggcttctttggaagttgagttgtggaatgtcataaatgttcagggaaagcatgccactgtggactcagaaattacattaaaaaagcttccagtacacatgttgaataaaaatgggtcctataaagtttattaactaagcaaattaaacaaacttggtaataggtgtttcacatgaaattcctgaagcagcataaatgtgctttgcaacctgagtcccttgttattctcacataacatgtggctttttctcttttcccaatttctcttctaagtgtagcaaatgtttctttctttccctgggatgagagaagtccttccaaggatggtgtggatttcaagactcaagcaattccagagtgttgaaaaagagtcagtaggtggatttgtaatgacaaaacaataatagtaaaggtggtgacatgcactcagtaaatggtagctactattttgtatcaggcactctgctacagacattacgaggctggaataagataaacgcctcatgacatagcttctaccattgttcccatatggcagatgaacaaactgaggctcaaagaggtcaagtaacttgtccaaaatcacaaaactgagtgtcagagccaggacttaagtctagctctgtgtaatcttacagcccaggttcttaacaatcatactaaactgtctttcaaaatgacaggcacaagacctgtccctttcactcctgctggtactcagtgacgtacagtcatgcatctttcaacatcaagaatatgttctgagaaatgtgtcatttggtgatttcatcattgtgggaatatgcgagtgtacttacatgtatccagctggtatagcctactacacacctaggctgtatgggatagcctaggctgcacacctgtacagcatgttattatgttattgtactgaatactggaggcaattgaaacacaatgggaagtatttctgtatctgaacacagaaaaggtacagtaaaaatatagtattataatttcatgggattactgtcatacatggggtctgaagttgactgaagcattattatgtggtgcatgactgtacactaacaagtcaagtgacctcttaggacttagtctattaatctaaaggatgagaagtacattctaacatcaggtgtcttttctcgagcacaatcaaattttcattttcccaatctcttataatgactcatgaccgggtgaaggaggaatcagtgcaaattgcttgttgggatggaaacaggtgctagaagtgaggaaaaagcaatgttcaaacgcaaaggaagggtggaggaggaaaggtgtggagttgccacagggactcatagcaagcaaaaataaaatccagtttggaaatccaccagaaaatccccctcaatctcggaggcttctttcgtgttctttacaggaaacacttgtgtgttcctttccctttgtcagggacatataatttagaaagcagagaatttgttctttctagtttttccttttttttttttttcagtaaacatgaaggattaaagggaaatagacaacagcacttttaaaggatgctttttcgtaagactttcagtggatgttatccagtaaataagagtttcacagtatgctatcaatgttagtttggagaaggaaaggtcaaaaagtcaaaccttgatatctttatcttttcacaaaggttatttctgaaggagctatatgtaaaaggaaaaacaaaaggcaaatatatacacacacctatatatgtatatgtaatgcatatattacaacatagttcttccaatcctaattatatgcctaatgctgggcttgagtgtctattactttttaaactacacttgtgctattatttttcttataataaaatgagaataaatatggaattctctccaggtccccagattgctgtcacagccagcttagttcactttatattacccacctagctccagtacacacctgaatttgtgtctcttgctccaacacaacatatatatatacacacacacatatatatgtgcatatatatgtttttatatatatatgttgttttcatatatatatatgttgttttcatatatatatatatgttgttttcatatatatatatatatatatatatatatatgttgttttcttatatatatgaaaaacaacaaaaatcctttcctgtgtcactccaggtaatgggtttcactgtgtaactattcttttctgcaaaaggtttgtgttattatccttgggtattattttctgatggtatcagtgaaatgggtcattattgaagcactggcttacttatgaaagatgttattaaatactgtggaaatacggttatttccattaaaataccaaaaggaaagagaaatataaaaatataagaggtagttctgaggaaaccaagctgaacctcggaatatgagacaattggtactaaaaggtgttgttgggactaattttttcttggtggcgatcctgctttgcttcagttggacaaacgctacggggcaagagacacaaattcagctaggcaggtaatatcaatgcgtgaaccagactggctgtgatagcaacccggggacatagggagaattccatatgtccccccatcttatcaaatgaaaaataatagcacaagtacagttttaaaagtcatagacattcaaccccagcattaggcgtataattgggagtggaaagactacggcaagccagatggctcatgaaaaggacgcagctataattcaactcaagccaattgctccttccatcttttctgaaagtttgggtcaaattctaaagcaggataacagttgttcgcagttgaaaggagagaacgcagcaattgaaaagccattaaatacccggataggttttggagatgtgggacaattcctctaccttgtttatttcttgtaggtaatttggaactctcatgggttccaggagttgaggcgtgataataccaaagatgggactttaaatgactctgatgatgctatgtaaggtggcttggaataaggaaaccagtcctaagacattacggtagaagtagactgcagaagagacataaatataggtattagcacaatagcattggaaacgaccagacagagggaaggctggtggagttgatggatccacggtggggttaaagatccaagaaaatagccattgacagagactgttgagaacgatgactccactgacaaagcaggaccataagaaaacgaggatggccgggcgcagtggctcaagcctgtaaatcccagaactttgggaggctgaggcaggtgcatcacctgaggtcgggagttcgagataagcctgaccaacatggtgaaaccccgtctctactaaaaatacaaaaattagccgggcgtggtggtgagtgcctgtagtcccacctactcgagaggctgaggcaggagaatcacttgaacccgggaggcagaggttgcagtgagccgagatcgcgccattgctctccagcccgggcaacagagagagacttagtctcaaaaaaaaagaaaaggaggatgttgcgaagggaaggtgctgaattcattcagcatttactgaattatttcacaaggggcaaacattctcaaggaacagggaaattaataatgcacgactgccctggaggtgccccatgatctgacccccatctgtaggaggtgcttgtaagttcagttttagatagtttgagctcaagacactggcagaacccttcccaatttagaaactttggccttgtcttgactttccctctcacttatctcctacgttcaatctttcggtacagtttcactgcaagtcgccctgaagttttgtttcaaagagtgcctggggcacaagctctgtaaaagctttgggtacagattttctctgtccaaaaagcaatcctcaggacttgctacgatgtatccctatgtgcaaatacctttgttgaaaaacacggaagccaagcagtggtatagatgaaagcatggtgagccgaactaatcaagtgcatttttgaatgtcatattaaaatgccttagtaagagcatcatgggaaatgacccattctgcacagagactgaccagctttgtcaggcttatgcccagcacctggcttagacaaaggcttcgacaaatacacatgggtgtttatcattatgcaaagccagtgtgtaatgctttttctttttatattacaaaaagtatacacacagaaaacatatttttaaaaatataataattaggaattctactatttgttgatatgcaaaagaagggaattatcttttgctcactatatgtcaggcactgctcagtttttctttaccacagtgaccctgtttggggatctgttccagtgatggggacaacaggactgaatattagaaacctagatcatcctagaaaatctggaccatatggtcacgtacccgtaccttcctcattttctcctaacagggcctggaaactccagcaagttatttggaagtctgtttgatgtcagtctccagggagaagcgatgcgactgttctcttgctgcagtcggatggatgtctgtctgagaaagagggcggagggtggaagaggtgcagggggacccttcaccacaggctttgatctcccttgactcctcctgggatatctcaccttttgatgttgggaatcagttaattactagtcaaaattggtttgagggactaggaaacagtttgaaggctctgttctcaaaatgcctgtactttgttctgaggaactttcaggcaactttctgaagcatctcaggcaaatgagaagggctcggtctgtggcccctccctagtagcggcccagattttgatcctcttgtgctaccatggtaccatcctgatgcagcagacttcttttctcttcagagctctgtggtttcattggtagtgaaatgatgacttttaggattagattgttaaaacatctgtcacaccacaaagagtatgtagcttaataattccctctttaggtcttaatttgaaaccaccacctctcttttctgagcaacacctgattaatgctaccatgaactttttctgagcaacacctgagtagtgctaccatctcttgcaacacaaccttgatttgtaaggcactatattaaattagtgggctagaagtcaaatctcctgccttgcctttgctggtgcaagttaacatcctccaagttgaccttaaaggctgcaaaatgcttcaggagtttgatgggcaggtggtgctggagaactcagcattcttttctcttccaaacaaggctacacacctgacaccttgcctagtaatggaattctcctaatgaacacgttcccctagtctaaggcgcttgcactgtgaccataccacagggctgacaaagagataattttcagtgctcagaaaaagaaaaacacacacacacacagaagtcttttgagactgtctttttttcttatgtcatggcctattatggcattttcattttaattgcacatgaaacccatttaaagcggtgctgtaatgggactgttcccttggaaaacacagacaggagtgatatggatgtgtttttgaggagtccattagttactcagactgtcatcattgtgtgccttgagggtgctaacaatgtattaggtatctaagcaaatgtgatatatttgatcctcttatatgtgaatcccctgtcctcctcctataagtagtagattcatatcaaagtctctggcaacagagtactgctcagtatttcaaagataaaatatgcattcttatgcatgtatgttttctagtttttcaaatggaaattgagccatatagataaagcatgcaaacattgagactctggaattacttattgaaaagaatgattgataaagtggttattgtggttgcttcactcttcccacctccactttggaagatagacagcctgtacctcaaagagttttagaacttcctgaccttctgtaagtaaaaatgtcagttcccaaggccagagaaataaagccacagggtctttttccataaaataagctgcattccctgggtctcaatatctttagtcttctataggaaactgaaagaatttccactttgctttgactttccctgctgtggtcccttcctcatttagcatactttgttctttatgcataattggaaattaattttctaattaggttcttcacatttatgaagttgtttgatggggtgtcggttcttataacatggcctaaaggctaaaggagaggtaataattctttttttctggctttgcccctaattcagctaaggttcttaggaaatatatttaacttttatgagatccccgtaatacatctttaatgctgatctacctttgaaaggttgttagaagagtgctaactagggctttaagactcattatgatacagttgattttatttgtaatagttgctgaaacaaaatgaagtcatttctttggcaacatgaagggtatttagataactacaagtaacaacaactgcagaaaatacaatcagatgatactgggagacaaaataacattgaactgatacttgagaagcagaagtgaccctgaagattaaaaggcgagtatttttactgtgaatatacaagtagaactaaatcaggtatgagctgtatgagtccgtcacctggatgttctgtgacttgttatatagaacttgagtctatggttcaacactctctgatctgtgaaggcaagccagtataaaccaatgcatgtaaacagtctgtttcttgatttcagtataaaagttgaaagataaagctaaccattagacttggaagtaaaaactaaattctggagtcacaacttctacatatgtctcggatcatgttacttattactacaggtacaaaatagcgtgcatgtgaggagaacaggaaccaatattgcacattggtaaaagaacatcctcattttataggaaatcatgtcatcctacttgaagtgtggctgaagaaaaacaattagatgaatactcctcagcagtctccaaataagaactaccttgcacactaatttccattgtgcatcaatatccttatttgaatttgccattcatgtatatgtcacggctaggcaaaaactgtaagaacaaagtgtaaggctgaatatatgatgattaaaggtaagtgatactcaacctcagaaaaaatatttgtctgactcttgactcactctttaagttactttctaggttctgcacaatggaaattagtgtgcaaggtatttcttatttggaggctgctgaggagtatccatctcattttttttttcttgagccacacttcaagtaggatgacatgatttcctacaaaatgaggatgttcttttgtcaatgtgcattattggtgccgattctcctcacatgcatgctattttgtacctgtagtaataagtaacatgacccgagacatatgtagaagttgtgactccacaatttagtttttacttccaagtctaatggttaacttaagatcttgttaagtatcagcatagaaagaggctacatggtagaatgggaatatcactctgccctgtgggactcaggaggcctggtctgtgtgtccagctctaactctaagtgcttttgtgaccttggacaaattatctaatctctttggtccaatataggtcaaagaggttctttctgttctgaacacacgtagcttccaagttcttacctatcacatgcaataccccaagaaattctggtcactgcaacttcttgaacaagatatactgaacccaccagaagagagtatagcacagtcattaagagcacagaatgcagatggcatatttggttttcagcattgccacctctctcccactacttaattgtcttagccttaatttctacagctgtgacatggactaacgatcttatttcactaacctttttctctttcccttgctatcttatgctcttcttttcagttcttaatggtagggttttcttttgttgtaaaggtctagacagaagaccttgataaactagactatgccaagagcgaggaatcatggattatggattcatctttgggactggaaattacttgaccttaaatgcactttctctatggcatccaaagtcatcttttaaaaatgcaaatcaaatcacattatgcctttgtttaaaaactatcaatagtttctcactgtactatatttagcataaaatccaatctcattaccacatttaacaataattttgggcttattccttgctttttcttcttctttattatttttatcctcttctataacttcagtctcctcctcctcttctgccttcaggaggagaaatctatagctccaaatatgtgctcagtcccttcttgcatttgcaacagtgaggggaacacatcccccttgaatcatcccccttgaatatctggtcagtatgtcaaagctggaattcatcctatccttcccccaaaccaccaagcaactagcttctgacttctgttagtagtattcctattattccaggtaaccagcctcacagtctcattccatttgactcctctccatgtctctctttccttaattgctatcctttctatgtatgcctttatttgtacttccctttgcatttctactgccacagtcgtcactcacatcaggtctttcggacctgaaatagtgaaataatattcctctgagtcatctaacttctccctctttcgcttttattacaggttaaaaagctacaagattaattttctggagtacaactctgatcatttgatgtctgggctcccaacattagctatgtgataaagtctcaactctttggcttgactttcagagtctaatgcaacctgaccctgattacttttctaggctagcttactgcttttcatatattattctattgagtcatctctttatttttttcagcaaaaaatgattgaggaccaacagtatacaacatcctagtggtatgctaacaatacaaacgtgaaacttcgcaaaatagaagagagaccaaacacgcacccagacagacacacacacacactcacacacaagtattaagtggaataatagaagcaaagaatgtgatggaaaatagagtaacagggaagtaattttatatatttatttctttttctttttcttagagatggggtctcctttatttcacaggctggaatgcaagggtgaaatcacagctcactgcagcattgaagtcccgggcttaagacaatcctcccaccttggcttccagagcagctggaattacaggcacaagttaccatgcctagctatctctatatatttaagtaactcttaaaatattcttgaacttgaccttagttggatagcttactaattctaaatactatctcatatttcccactttttttttcttttgcttatatttcttcttttcagaatgtgctggtttttaatattcagtatctggtccgtatttaaaggcatacttattgaacttttatttttgcatccccagtgtctactttccttggctccatctcttccaagccttcagccaaagcagtttgagtgaggattgagcccttttccagaggtgggtcatgtgacctagggctaaaccaatcaatacgctacatttctctggccatagggattggttctggggtggcatgtgacaagctaggcaaacagctaatctgagggcttttgaagaaaccactgggaagaagtctttattcctgttgaacttgcagctgaaaggttggaaggtctggggttgccacatccactttgtctgttggagaatggagccaatctaaaaggagatagagaaaaaagaaatcaattcttgacactgtctctcctccaaatcaagtcacactatgcctctggaatttttagttacataagtcaatattgtttttttcttacatcagtctgagtcatgttttctgagagagaaaacaaatacagccatccaatttcaaatagtagtacttttactaactttttttttttactacctttatgggtactgccagttcaatgcggtttttctctaccattttgtgtctctcagttatggcatgtatgctgttcaacctcattttagagttattggtaaacttgcctcctaccagatttgaatggacaaaaatttctctttaaagctcttcattggcccagtaaatagggcctgaacaaaagtgagacaagtgaggtgcacaggggtccacgatgaagaagcactcacttccaggtgccaagtctgcacttagcagtctggagagcgagtgcctccttatcatttgctccctgggcacctcacttgctttatctatttctgatcctggtagtggagtaactactcaatacgtgttaggcgaactcgaaagaatttcacattttgcatggggatggagatgatccagaattgcattttctttgctattatactcatctgacatatctcattcacttttttttttttttacatttacttcattttggagtcatctagcattatgcagtgattgcagggagggtttgtgatggtattactctaaaaacctctaaatcccatttcccagcaagaagacaaactaatagctctgctaagcaatgcatccagaaataacatggaatatggggtagtgaatttcattttcactcatttacttatattttcatagctcagtgtctgttgtggagcctgaattatacaactcattatctaggtcaatctagtgagctatcctgtcagcacagatgtgctacttttgcaatagaattctcagtggtaaagttgcttccaagctggcacctattattagtaaaagtattaaataaataaattatagaaacagttgaagcaatgaagcctacacgataagtgcaataggttataaacattatgtcttcattatataagcaattgtgttagttatttaagattacagacgatcgatagccacatcttgtttgcgctagtgttggttcactggttgtaagcaacagaaactgacttcaaatagagaaaaggttttacaaagaaatatcagaatcaaatcaatgaacaggttcaaaagaaaaacactagaacagacaggaagcaagacagctccagtgaactaggtagcaggaatatatgttgaagtaataaggcataaataaaatgaatctacaccaacaatttttccatatatgattccactaaatttttgtcattgcattactctagtcaagaccaaatcctaggacaataggttcattcctggttataatcatatggccacctcttgaccaaggaaaagcaggccaccttgattgaaagtcctaccaacactgtatacaaacaacagatgtccattactttagttcagttagaatctgaaaggcttcaactgtgctacttacacatattctgggccaattgccaacttgtgttgaacatgcacaaaatcattttatcatgacactttgctgtatcagtcacatcacatttgttcaaatttgggaagcatgaagcttcaaaaatattcatagatgtgtaggtgaatttggtaggaaataatatttggtctttctgtatgttaattcaactatttggctaatcaaagtatatgatggtgtcatctatcagcaaacaaattggactgatcttactgtgagttttgttgaaacgtttttgacagtagatatggagaatgtctaagacacaagttttaaacacaaaatactatcctaaactagctcttttccgcctgccagggccaccttttgaatctgtgacctgtgcagttgtctgtgctcagaacacttaggttaacatccttctgtcctctcttgactctcttgaagctgttaataatttgttaacaaaagacctgcagtttcatattgcgccgggccttgtatattatacagctaatcctgaaagacacagaaccagtggaagccagaattacttgctagtgggaatactcaggccataaagtgctgcaactttgagactctttaaataaatgccatcttttaacactctaacaaggtacaaaaatcccagaatttgcacactccatattcaatgctctttcttcattggaagggcagcagaggtaagggatgggccataatggtagagaagaaccatagaagaaccagtggatgccactgacttagcatgtctcctgagcacatgtgaatgttacataaatactcattgaatctttaaaaagatgaaagcatgagcacgcatggcctgtttgcaggtccctgaggtgtgaacaatcgtggcatgtttgaggaccagaaagaaggccagtatgcctgggacagtgagcaaaggcatggtggaagaaggaaagaatgaagtttatgagggacccaggaaccgtgtcaagtaagggctactaggccagggtaggaaagtaaacatcatgggaagatgacttacttattataacatcatagtattttggtacattaagtctgaagcataaaactttttttttgaattttatcttattttcattttattgtacttattaaatatatgcgtttttaaaacaagttgtgtgaaggaaaacatattttatatttactctgttacaggttccaaattaaagaaatcccagttaacttggttacattatatatcaacagccctttcctttaatatcaaaaggcttttcttgccttttaaaagctttatttttaatgaacacataatgttatacatatttatagggtacatagtgatattttgacacatgtaatgtatagtgatcaaatcagagcaattcacgtatctatcttctcaaagatttatcttttttttttttttgcattggaaacattcaaaatcttccttctagctatttgaagctatatactatattattgtttactgtagtcctaccagtggtacaaaacacttgaacgtatttcttcctatatagctgttattttgtgtcctttaacaaattctgcctatccccttcttcccctatgtttcccagcctctggtattctctcttctacttttaatctctatgagatcatgtttttgtttgcttttgttttttatctttcacatgagtgagaacatggaatgcgacgtttaactttctgttcctggcttatttcactcaagataatatccttcagttccacccatgttgccatgaatggcaggatttcattctttttttgaggctgaatactactctattgtgtgtatgcaccacattttctttatccattcatctgttggtggacacctatgttgattccctatcttggctattgcaaacagtgctgcaataagcattcggggttcaaatgtctcttccatacactagtttcctttcctttggataaatgcccagtagtgggattgctggatcatatggtagttttatttgtagtttttttagtaatctccatactgtccttcacagtggctattgaagcataaagcttaatacaatgtcatttagagcagaggtgggccaacgttttctgtaaagaataataaatattttagcctttgctaactgtatagtctctcttataacttcttacaactactaaactctctcactgggctgagtaaacataggctatactttgggtgaaagtagacatagataatcttaaatagaggttgctgtgtttcaacaaatcttagaaaaaatagatagtaggccaaatgtggcccattagccacagtttgccagtccctgatctagcagagcatggagccacatgcatctatattagctgcaatgcacattaaaaatgcagatgtttgtgtcctcttccagatgcactgaacctaactttctgggtttgaagtctgaaagtctgtgcttaataagttgccatagaaagtgttattgcatgcttgtcttagtctgttagtgctgttatgacagaattcctgagactgagtaatttataaagaacagaaatttatttcacttctggaggctgggatgttcaatatcaaagcaacagcatttgaggtctgatgaggaccttcttgctgtgtcctcacatggcagatggcagaaaggccaaatgctgtgcgaagccttttttttttttttttaagaccgagtttcactcttgtcgcccaggctggagtgtaatgcacaatcttgggtcactgcaacctccacctccagggtttaagctattctcctgcctcggcctcccaagtagctggcgttacaggcatgtgccaccgtgcccagctaattttgtatttttagtagagatggggtttcataatgttggtcaggctggtttcgaacttatgatctcaggtgatcttcccacctcggcctcccaaagtggtgaagcctcttttatcaagatcttaatcccattcatggcagttctgcccttatgacttaatcacctcctaaaggcccccacctcttaatgctatcacagtgaagaataagtttcaacccatgacttttggaggatattcagaccacagcaatgccaaaattgagaaagttgagaaccactggtctagaagccagtctatccacttaggtccctttctaaggtattaaaaattgtaactgattgacctaggatagcacatggggtaatttctcagggtagaaggactaatgtttggaatggcctgtattcaaattcagaatggattgttccaggagactgtaagaaagatcatgtagcaagaataatagcaaggagagaaagctctgctagataaggctgtgcagatcaatcctccctttgagttccctggttttaattattgatgctaaatatacatttcccttaattgttttgtgaaaataagttaaataaagaataaagccattctatacatgcacaggcaaacattacactcttttcaaataaacactgggatgattcctcggagtgttcctattcaaatttggttgcaaaataacacccacagaatgtatttccaaccacaaaatactgtgacagtaagcagccagcacaagagagcctgttatggtttatagattgcaatgattatattgcgggagcagttgatgcatttgttggtgttcattctatttcacatttgcatttaaattcctgtggaacaaagataagataaagaggaaaacaaatgatgcttatttgttgttgtattgaactcctattataagtattgttttaaaggagagtgaagctttgcaaggaagcattccacatgtcctttacaaaacatgaaatacactttcaattgtcaactagaaatatgcaggaaaacatatccctgggctttcataaaatcataaatcaataaggaataactgaaaatgtggttgaatacaaggaagcaaatgaaatactcagtactttcctttatacatttatccacattttattgatacataagaaatgtagaactgcaatgagttttgaaacactattcgttttatttcaggcattcctttaaagcaatgcttgatatgtttcctctttcaaataatctgtgcatccacagcatcgtcctttgatgaatttatgcagatcagttctacatccagggtaatgttttctgctcctctaagctattttgctgggatcacagggaaaaaaaaatctttttgtagagttcgattgtaccttctagttactgactgggtataaggttcctctactcatacaaaaagcacatctgcctccccatatgatgtgtttgccataattaatttcagaagaagaatgagataatgttacctcttcctctcaaattagtaagttgcatatcagtgcctagaacttatttaaatcatttttaaaacatcacactcatttctgtaaatacacctgaaataaggtaaaaattaacaattaaatgacaacagttaattatatgatgtatctgaactcataagcaaaaatttctctgactttaccatgctttacggtgcttttctcaaaggaagcattagtcaggtccttttctggatgctggcagtgacagcctggaagcattccttaaagggagggctgtagaatgtccttaataagagatgttggactgggcgtggtggctcaagcctgtaatctcagcactttgggaggtcgaggctggcagatcacgaggtcaggagatcgagaccatcctggctaacacggtgaaaccccgtctctactaaaaatacaaaaaaaaattagccaggagtggtggcaggcgcctgtagtcccagctactcgtgaggctgaggcaggagaatggcgtgaacccgggaggtggagcttgcagtgagccgagattgtgccactgcactccagcctgggcgacagagcaaggctgtgtctcaaaaaaaaaaaaaaaaaaaaaaaaaaaagatattacaccaaaattaaatgtggtggtcaaattagaataattatgtctaaaaacctctgcttcctttttgtcccttcttggatattgataatgtatactgacatattaaaggctctaagaagtcagaaaaaaaaatgtctttagctttattttttcaaactttttgctgacagtaacttatcattttttaaagtctaacaccttgcattggcacttgtatttctggaaatgcatgttccgaagttctgacctaagtagtaactagtatctaaaggaaagtacattctcctgtctgtattacatattttatgttccttaacatattatatgtatcagccatatttattcattcatcatttattcagcaagtatttgaagaacttctctgtgccagtagcttgtgggtgctggggactcatctttttaagagcatatttttattctattttcaaaatgtatgaaaaacttagttgttagtataaataacaagttatatgaaaaataaaagtatcacagtgcatagactcagcattttaagtcaagcattcagaagaaatgcaaaatggtagatatttttccttagatgccattagggcacgttgcactgagcatgtaccttatttactgttgtgactgtccctggaatactaacaatgatgcatttaaatagcttatagttatgagttttagaatcagaagcaaataaatttgaaagcattaattccagcctcctgctttagctgaatttctattatctaaaccagccccttcaaatgttttgaaaatcagatcatatacaacattttataagcttcctatcttggaacgtgaatttagaattcacactctggctcatttttccaactgtaaagtgagtgagttgggttaagaaaatctatttttagaagaagtagtaagcattgaaaaagttcacagcaatttcaagccatagatttgaatattagcacctggaaaatagtaattctaattctcattcttacttagctggtgccacttgagtgatgtccctggagctgaaagggattgccaagttaatttggtcaagtggttttcacaaactatacatcttattaattattcctttgatgggctggtctaaacccagttcaaactgacttaagtaaataaggacaacagaaataagaattaataaataaatactaaaaagtgatttagaagatattgtttcacttcacctccgagcgcaggggtataattagcttcaggcttgcctagagtcagtggtgcaaaccatgtcactgatagcttaggcatgtttgtctgtctccctctggcttagatggatctcaaacaggccgtctactcactggttcccagaagctgcaggcttgcataatccttacaactagaaattcaatagaaaaagcattcaccttcttagttatcctcaggattgactctccttgggctgccctggtcttatgcttatgctgcaaccaatcattgtggtcatgggaatagaagggcctgattggccaggtttggaagatgtttctatctatggagtaggcagagactgatgataaaggatatagagtggggtggggtggttttccgcaaaggaaattaaggtgcagccaccaaaagaagctgatgcttggcagacaaaatcaacaggtgcccattgtatttattttttaaacgagcatccacacagaaccatgaggtacaaggtaaacaaaaagaggagattcttgctagattgggtatggggagttggggtggagagagactcagagatctgctcattcagccacatctcacagctcttgagagaagctgaccccttcctcgtttgcctggcatgatcttggtttatgtgtgttgttcattttaattactgataacaccccgttttactctcaaaagtggcgtggtttgcttaatagattttatggttactggatcgtggggattctttaagctttattagttaattcaccccaaacacttgtaaaactcttgatctacatccaccaaggcatccacttccataaatcagacttctgtgtttcatctgaataatatgaaaccttggaagagtttaactcatcatctcctctcattttacttgtttcccatgaaaatgaaacttattatcatttgatgcaattaatatttgtttttatttacccacatttaacaaatgttttgttcaccattgtttcttgaatatcaatcttttccctgggataaatttttacctttctgaaccgttcctttgggagtttgctactcaaagtgtggtctatggacgaacaccaccatcagcatcacctgagagcttatcagaaatgcagaacctgaggctcactaagtcagagcccatagatcaacaagattcccaggagttcagtagacacagtcaagtttgagaagcccattttagaacagtgaacttaacacaagatgttttcattttctattccattttgtctctgattctctcatattttaacctctgtgtctctgtcttcaatattatggataaattatatcttatctttcattgctgtctgctcactgtagtctcctaggtggcttaaaaactaagtaccagtatacacatttttagagatagagagacagagagaatggggatggggagagagagagagagagagagagagagagagagagagagagagagaaagagagagaatgaatgcctgggctcctcctcagaccatctaaattaaaatctgggtaaggaccactacaccaagagctcctttagttaggatttattggtgacatgctctcatttttctgtttgtctaaaaaatacttatgattcattattgcataatagccagttatacaattctaggttgctatttatttttcctcagtgtttcagagattgaaaagagtgtctttaatttttgttgctatctgttgagaataaactctttttctctgtaggcaatctgagttttaaatttctgctcagtactaagattcttattgtcttcaatgttatgcagctttactccattgtgactagatttgtatttcttatttcttattgtatctaggattttttgcagtttctaaatctgaggattcagattactgtcccatcttctatacattctttgctatctagaatgttaattggatttgcacaagatattttcattttctattccattttgtctcttattctctcatattttaatctctgtgtctctgtcttcagtattatggataaattatatctttcaattctaatcatttagtgaacatatatgcgtcaaatttttctatttcatgattttattttttcacttgaatgtccatttagaacatatcacttctagaagttcattttataatcagactggtttttccttgagagtgtcttgctccttgctcaatttgaaaattctttaaaaaatattcaaatatagttataggctgaatctcataatttcactatctaatgttattttctgttgtttctgctcaatactgctcatgaacacctgtctcttgttcatgttgcaatttgagcggagagtgaagttatgttatctggaattgatctgtggatattttgtgaggcctgagttgagggtgcattccatccttgtagagaaatttgtgttgacctctgccaggctctgtaaagtacaactgagtcaagaccactttgatttcttgtcttggggtttcctgaaatatgctggttatgtaaatttcaaagccccttggcctgaggataggcctgcgattatgtatttttcagaagagatgttttctccttctagaattcagcattagataaacaaaatccccttgcctaggtcttagttgactgtcaaaacttttttcagtacaatctttccctgaggggaaatgcccagctgtcaattattcattttgttaatgaggaaagtgaggctcagagttcaacttgctgggagtcacactcagcccctgaaagcagaaatgaaaagagggcccagatcttctcatcgtccagttgttttctcctccgacaaaacaagctacagaaatagcatcaccttcttctaataagaatggcttcacctttgcctccagttggacaagtaacagcaagattcagttattcctcatggttaagtttgatgaattatagaaataggttacttagatatattttaagaatcataagaacataaaaaagtcatatgagctaagacttatagtccccactattcagtattttgtcttttatagtagtaccaagggacattggtgtgacatgatgatagttgccctttgtgatattgtcctcaaagggggcatccctaactgggaaagatctatcatccaagaatttctctaaagccttcttgaactctcattacatttttggtttgtacaaccttaaggcactgctttacaaggaattgatcttatactagtcaggacatgggctaaataaccctgaagtccttttaaaatatgatttcaagtatcataaatcttgttggataatcacactctgcaaatggagggaatacagtagagtgatactgagctctgaagtcaaacagcctatgtccaaatacaggctttatccctatgtcctaactgtgtgaccttgggcagaatcttttactcttctgaatctctgtttcttctcctggacaagggcagtgactgtaggattatcataaggttactgggaaaaatgaatacaataatatacataaaattacttagcacaaggcttggcatacagtaaacaaatgaaagtattctcagtattaccattagtgatattgtcattagtgtcggtagatgtcattagtgtcatcctggtcacagacctcaccaaaaaagtggctgcgatcccatttcatatgttttaaaacatctggaggctgagggcagaagaggatataagagaccaaaaaaaaaatgaattattatactgtgaaagaattttaaattttatggattccagtatgtactaaataaatcacaaacttttcaggaaacaattgttaaaatatctttggatgtgctgttgtgggagtgcttcatattgaaaaagagagatataaactaaccaagtaaataaggttacttgcggttccattctgtattttacccttacataaattgactctgatatttggtcgctgggtttcctcaattattttatttttgccaaaaaacaaaacaaaaataatgtggcgtgtaatagctctaatgttaataaaattgaatgtttatttttccccctggaaagtggcctctccactctttcttaaatgtcccattctgcctcgacatttactttgcactagtaacaacactcaattttcattgacattatcttctaaatacaatcagatcaaaaatcgccaacatcattctcattcctctcctgcaagcagataatacaagacagggtctagctgataacttccacttcagtaacctctgattccactacttgaaatgctttgtgtggttttctactagaccagaggcagaggtatttgtgtaaaacaggcgattcccgtcagcaaagatgcaagatgtggcatttgcctttaatttccttttgctgggtacagggactctgtgaatgggcaggtccctgagggtgacttgtaccaactggagcctgtgccagcacggaccttcccaggcacacacttaacatttttccccaggggcttgtgcttaaatctgcaggttgaaaggaactgaagtgaaacttctaagaaatggtggtgagcatttaggatgttctaactcagttcacataagtgttgatgtgttctgtgacagtctcaaccccaaacgaagtgcactcatgtttactggcaaaattgggaatagtttttcaaaaatttaccatacgagtaaacttcccagtttacttaagctctccaagcctcagttgcttcatctgcagaatggaaacaaacattaattatgatattgaataaaaacattacattattacatgtgctaagttaaaaaatctcaaaattactaatattaaatattaatatttttagaattatttgagagttggctgagatcactcaaggacagtacttagagggcctggcatatttacatgtactcttcatatattactagcttttcatagtagtaatcctaatgtaagcctatgctaggtttcttttcacaaatggtctgaaatattcattcttctgtatctggaaagcaaagtggcctactgaagacattatataaattcagtccaaatgctatttgcacttgatatgcccagatgtttgaggtggaaaaaacatattgaattatctggatacttccttaatttgggggagaataaatttcctatgttggatttttgaatacatttaaggtgctcaaccatccaggtttgcctgagactgaaaggggtttctgggatatggcacttctcagcaatataactaggacaatcctaggcaaactttatgagttaccttatacattatagctccctgtaaataatgtaagacactcaaatatgatgaacttttaaaaatacacaggtcttttgtcaatgcaaaaaaattctttggtggagaaggagagagctgtatccttacatctgctttcagttgcaaaaatagctcaatactgaactaaaactggcttaagaataaggcccttgagtctggaggtggatagtttctggcttggttcaatagttcacaatgcctttgaggactaaagaatctctgtattggtgttggccgtatttgcccttgaagtttcattaggcttcatcttcaagcacctctctctgccacagtgacacccaaaccaggaaaggcaagtcaggggagaatctacctccagcatctctcttttttcatcagggactaaaattattctaagaatcactcaaatttctctcatgctttattagacaaagccgagtcatcagtccacccatcagtcaatcaaccaagtgcatggaattattagatatttagacaaaccataggtcatcctctggtctaagagagggacacagcttctctgagcacctgttaatatgaacaaaaatgagatttggccaggaaagaaggagggaggttggagaaacaactgctgtctactgagcagacaaacagtatctgccatgggcagtggagaggagacagtcgtctcactaatgtccactcctgttctttaggcagccatgtatgtcgctgataagagggcttcttgctgttgatttcccaggtgcctgggtataatgggaatagggcagatgtgccaccttctattgaatggcgtgtgttgtgaaggccagggaattcacatgaaacttctacatatctcagtttctctgtctgagcacttaagatatggccagcagcctcctaaaccagaagaggcatctaaccaaggaaaacacagtaaagaactcttcattttgaagtttgtttcttgcctgcaaatcaaataagatattgatctttcatctcaggagaaagtctttcattggcccttgatggcacaattctcataacaaagtccccaacaaagaaaatataatctggtgttctcacctttgaaaatctcctccactccccaagttgctccctctaagtgagctgaatgtgtatactctaccctctttcctggggctgcttcgtttatttaaggatgagagttcaaggtcactgaagaaaatctttctcagctccaccaagagtccccttatgaagaaacagaaatctagctcttgtgtaaatgatcaaatccttgtttaacagagacttaccttgtgatatcaaggtttgttgtctgatttatactgcttatgactcctgtgagggtgttatgaggtttcatgaactaatgattatggagtttaatattttttaaaaacgttccacaaatgttaaatgctattactccttgggtcactccctgtttgcatttaatataacttcctgcatcattcatacgctgtaatggagaagcagattccagggacattccctggctacttaggaatcaacagataccagtgcagcataaggtttaattttcctttttgcttttaaatgattcctaaaaccgttctgagagaccatgaatgagaatgatgtggaaatttctgatagtaaaggcttattgtaagcacagtggctcaaaactgtaatcccagaactttgggaggccaaggcgggcagatcgcttgagtttaggagttctaaaccagcctgggcaacatggtgaaacctcatctctataaaaatacaaaaattagctgggtgtggtggtgcacccctgtagtcccagctacttgtaaggctgaggccggagaatcacttgaacccaggaggcagaggttgcagtgagccgagatcccccactgaacttcagcctgagtgacgggagtgaaaccttgtctcaaaaataaataaataaataaaatatttgaacagaagtcgaagaataaattaactgcagaaggtgcgccattttaactgagcacacacttggcataacaataagctgattcttttatttggaatttccaaaacgaactttaaaaataaaagaggaggagcatttctaaggaatgcagtatgactttggtgggctcacggttctcagtgtttacatgcatccttgaatgtgctgctttatacatttctctagcagtttgtggtttgtgtttgtgttcagatgtgcaaggataatagatatgggaaaaagagtgatgcattttaaaattataccgtttgtagattgtggagaaagttcttaataagaagtaaaaaattagaaaatgttcatttaattgatttggtgtatatagttttgttcaaaataaatgtgtgaacatgtcttgctcaagaaaagcagcatttaagagggaaactcatcagactgatggttctatccgttgaagacagttaagatggaggaagcgtaaagaaaaagaaaaacacaaattagtatgagcacaaagaatgagcttaaacaaagctatgattctctcattcacaaatattatatattgtgcttttttttttctgatatcccccccttggctcctgcttctcattcctgtaaacagcagtgacacatcacacctgctgaactttttcacctccaactccaaattagaggaaagttggcttcatactgattgtactttactggggacagacggcagggtggcagatgggggagggagtgcctgtaattaagcaaaacggtttaaagtgtagctttcttagacaaaccgtggttgtaagttatagctgctctttacttgctaataattgcaaaatctattgctgccacttttgaggtttttttttttaaataaaagactattaaaatggaataaaagcttaataagtagattagttagaacaatagtcctcatgagaatgttttgattctgagtatagctgctaaagataaccctaaatgcaatcaggtttagctccctgcatgtgtgaaaggaaggtaataccctcagagattttgccaacagatgacattattttttaagtatctctttctacatttaaattagtctttcctctgggcacctgcaacaaaacctttgttaagaatcaccagagaaacagagctctgaataaatgctcagtggaaaattatttttgagaatttggttttagatgtttcacatcaaaaagatggatggcaatgcatccaagagggagcgctttgtgatccttctctgtcctctttgaaattttaaggatcaaaactcccaaggtgtccagagataagtacaaagggagccctgcaattttactaaacatatacacattataaagcgcaatgtgatccaatgtcaatgaaagtgtgtccatatcctgtcctttttgttttattttattaatttcattcctttggccagatatttattctctctctgtctctctctctaattctctccccctctctctcatcacatttttttttctgtgcactgaaagacctgtatgagactcaggaaacaatcattcacagacttgatcattcaaattgcaatgaacgttactactcaagagtgttcttcagacaggatggcacagacgatactgagagtcttcattacctcctgggacatgcacgttcacagtgagcctgacttccacttcctgtctctatccttccacttttttccttggaaggtattttcttttagattttcctatgtcagtgccctctagattacacatgctgttttcaacagcctgctgggcaaatctatcaggttccaaagaagtagtctgttttgcattcctccttgccatttttccttccccattcagttcatccttgcttcttttttgcatcccaagccattgcatttactcagctctgtaggagagactgggaaaccctggcactatcccaagtatgtagtttatgaagtcccctgtcaccaaattaattaaagggactctttcatttgcctgtctacacccacccaaatatgacaataaatgtgtaatcttgtgacttgtttcttttttccccaccatttgaattcagccttagactcatagttgttgaagtatagaggatatagaagaaaggcatcattaatatgatttggtctgacacacacctaccccaccccatagttccgtagcagtgctttatgaggataatgtgaattaaaatgaagtttatgttgagactattttgctgttgtataatagccctgacataaatggagaagcatttgagagtcccatcagccaaggagtaagctcatatttatttagcatagtcataaaacaggttaggtatcagtcactcacactattattttgaacagtagaattttataacctgatgttttaacatttttctcgggcatagctgaagtcagagtcatctggagactttattgaactacacagactgggccccactgcaagactcatcgacagcttgagtaaggcccaagctggtagatatttttagtttcccaagtgatttgacatcgagttaggcataagaaccatgaaaccagacttatacaaataaatattgtattttatagtgatctattatgtatgtctttatgaataagtgtgtgtctattataaatatccatttatcaccatgtcatgttaatccctttagaacacctataatataggtatattctacgtaaataaaatctttagctacagatatatatatatttatagctacagattatatatatatattatatatttatatatctccagaaatatagaataggcacagatattttcctaacaattatacacaattcctgaatgatacattctgcttgtaatatggaagttatgaattctctgggctataaacatttcaatagtcatagtaatgatcttttatggaactcattctatgtgcactgtgctgggataaatgtttttcctgcattatctcacttaatcctcacaacaaacctgtgaaactagtgcttgcatttctgctctaatgtaatatatgcattctttaaaaatcttgcaatgtgcaaaattatgcagtgaaaacaaaccaagatgatttatagtaaatctgtgttagagcagaccattcaaaacctatacaaactggtaactagggcatcaacaaaacaaaagacaatttcataaaataacaaaagacaattttataaaataacacactgacagagtatcataaatgtctgattcatttgtgtttgtgtgtatatgtatatatacacacacatatatatacacacatatatatacctttattttataaatatatgtacctttaataaaaaagatagattgattagaacctgatttaatatataacattaatgaaataaagataaattgattagaacctgatttaatatagattcactccccttgacataaaactgagatccatgcctgtggccttctggtgatctaacctcaagtactagaggggtgaatggatcacatacataccccacaggcaagtttcctaacccatcattcctcttaggctttcagtagaagcttagaatcaaataatcttatgtgatactctctgaagaaggtttggcattgcaatatattccactggttatttaaaatagatctgtgcgatctgaaaatcaaactgggtgttaacgcggtggattcctaaatgaaagtttactttaaaagatgtaagttcaggtgttcacgcaggcacctatttctctcagaagaggacttttgacaaaagattgacccaaggacaaaagaacaagagtggtgtgacaaatcattccaacagaaaaactttgctaaggatagctaatgaaaagtaagccaaaaattagttctactcttctaccctctctgtcaggcaaagcaaaaaaaaaaaaaaaagatgatttctcgaactcttaatagctcataagaggagccatgccagtttctctggagataccagcccaacctaccctccaacccccaaaacacacccagaattccaaaagattccaatatctttaaggctttgtataaaaagcattaaacaatcatgtctgttatggctgatagcagtgctaccaatgtgtagatgccacttattatatggccatttctatacacgtacctgtaggtaagactccataaagtaatttaaattatattttattatttaaaatctttcaggtttggggcgatggaaaatgtctgctgtgtattgttcagtattgtttcaatttttgcaatgtgtatatactgtttcaataatcataacaataataaaatgattctaattttagcataaaagatggttcccattaacaccgttttgacctgacccctatgccaaaataagtttgctcagtactcagtgagaaggatgctggtcctcttagttgtccaatggggaagttctctgaaacatcatttgtctctactaaagcccttgacatttgttccttcaactaagatgcatagaacatccactatgtaaactatatgtcaagtacttgagaatgtgatggccaggttcagtatttagcataccaaatgcttgtagtagcataggaggataatagtctgtgattgaaaagaaaatccaaatcactgctcaaatactcactttcaggctggtggtctcagaaaagggggtcaagtttagagaccccaattgaatctacagcttctattaaatttgaaccctagggacaccttttctccaataccttatttttttttttgagtgtagaacaattcatattatatacacccttctattgacctgtctatttgaaccctgcaggcacttgacaactaatgaataaaataatattgtgtgctcttggggctactgcagactcttttgtgtctataacggctcttatttttccagcaactgggagaggatacaacatggtgagaggctgtgtagaataactgagatagcatgggctaaaccccaggggcactaatgacattgtatccacagagcaaaatttgaatgttctgtaatgatgtcattaaactcctgaaaaagctaacttattgctgactagaatttctccattacattctctttaaaagaggaataaactccagggtgtgtagctatgcatgggtgttgacgttgaatagctgcctccagtcactctgctgaaactggctgaccttcttgcgtgcagtttagtcaactcagctgccctttcaatgaagacaaatgaatttccaggattatgcaggtcaggtcaccttaggtcaaaaactgattatacagtcatgccatcacctttgttctacctgggtatctttgaacgtttattctttaggtgctcacctttgatttggtgcccccaaaatgtttattcctgtaaaagtacatatgcaagtcaaatacagaaacccataactgatgcctctaacaaattcacattttttcccatggaggcagatatgcaaaactgacagtcaaaagcatttatttgaaaggcagaattgcagtaaaggaaaataataataatttttaacagacattaaaaattcgagaccaagtttctactgcttataacttgccttggacaagttatatcatctccgtgtgtctcaatttcctcacctgtcaagtgggggcattaatagcacccccctcttggggtggatcaagtgagataaagatttaaagtacttagtaagtattcagaatgtggatcgtgcaagagtaactgtacgtgaacttttatcagaggagcattagttaacagaaatgttatctttctaaagccagaatttaggttgtgtttctatactagctggtcacattgtcagcattgaagcttttataaatgtcttctagcaaatcaccacaatttttacattgttgggctctgctgagctctagccccagacaactccaaatttgcatttctcacttttgccttcttcatttcactgtctcaaaaaacaaatgcaagaaagtaaatcttcaacttagaacacccattctgtcaaactgatgtgctgtctgatgaatggtgagaaaaaaagaaacacatcaccccaggaatatgtaagctctccaaaaatatcaagtaagcccaatgccaatataatataatgagagtttgtaagtgcttatagtctaatgaaattggcatggtttattaatgggctgtgcctcctttgaatttggaagacaaaatgtcttgtttcctgtgatttggtgtgatacacaaagacttttgatatctgctgatatttaaatgaacccaaggatgtagaattcgatagtaaattgtcacttgaaattctcaagaagagaatctattttcagataacagtgatcctctgcttccattaataatcttgggctctctaaaattatatgaacccacagtacatttttgtaccatgtggctgatgcacaccttgaaaggctatgtctgagtgttcaacgacttgttattgctatgttcacgtgtcaccaggactgcctggctttaatcaaagcatccctggggtcatttgaaaacaactatttacagaaactttggacattttcttgaccacatgatttaatgactttatatgggaggtagtcttgcacagtggataaggaggttagaatcccagctctgctacttaaaatttggtggctttatttcagggtctgtatctttctatcaacatagtgggaaaaataatagtacctagctcaaagggagtaaatgagatctggtacacgtccagaatgaaaacagaagcaattgttatgttaagtcagagagtcgcattttcatgtagacagtaccacaaaaatattgttagatccaaataataacacagtaaatttatcttccctccattttcccatgttatcccagttactgtacactgctcaggttgcttgggtagtacatgaatgtcaaagatcagtctgactttcaaaaccttaggaaaatttacctaccccatgaagcctgacaatgacctagaacagacaacatgaactctcaagcccattcaaggagccatattatctaagccctggatcactgtaacaactccttatttacacagcacattcattccacacatggtcaaattttccagaatatggatgtcataggtgtcattgttttagaggcaggtccatgctattaatctttgattattagtatatttttctacctctgctattttcaacttatactgcagcctgtttctttacacagattttttttgctttgaaattaactacctttatctcactcattagtccccttctttactcattcttcttcatccatcgctaaacaattatcccataaaccagctgtcaaaacgcaagatgtggttcccggtttaattgggaacatacagtctgggtgaaaagggaaaactcaatgcacctgctctttattcttatttctaatgtctggtactcaagagtactttgacaaatcagaaaatgaacttgaaaatgtgtacaaagcaatatggcaagtataaagctatcctgtcacacatagaatatatacatttgtgtctgccccagagaagagtgatcacggttaaggggtttcattcacagaaagaagacttcctggagaaagagtgtgtgtgtctgtttcagaagctgaaaaggctgctttgggatgatagtttttatgcaaagtgactgctacctgctgctttattctgcattcatctcttataaataatatgtttttaataagccactgtatcttttgttggaacaatgcttcctagaattaaacacacatttccctcactttcaaaacgcccttgaaaacgttgtgattatactgggtctttctttgtgactcttatgtgttttgtcatcaagaaaaagtcaagctaattgaactatatgaggacagtgcacctgaaaatgacctcctgaagtcagctgctgtctataggtaattctctcaactaaatgtatgcatgttggacaataagggcacaaggtggtcagtggcctttccctctgcgctccatgcagactattccatctgcctttccacatgtggaggacaaaggaatgtcatcaagtctctttctcagttcctagtctaacagcgaacccttgtttaataatatcccagtgtttctagttaccccaagagaataatataacctgaaatgattccctaaacacagcttattttaattattcctaatgataagcaaaattttaccaaacgattctttaaagcaaagaatcacatttgctttgaatatgttattatgcatattgcttgtcacaccacacataaagatcttctttacaaagatctgcaaggaaacatttcttatgacagtactggaatagatgaggtagagaacaactgctttttttttttctttttaagacattataatttgttagaactttttggtttctcttggttggtaggcaaatcagagcaaaaggtttgctgtgattgctgtcttccatcaaaatctgtcagaatacattatggcatgtattctgtgtactaaccttacctatttttttatttttcaacttttattcaccacccaaaaagcatcatcattttgtaaaatcttgctttcaacatagatttctataggaagtatcaagtggttttggcgaccatttagttccaaaatatggtttatatattttaatgatatttatatatgataattatatgtttatatacttattatatatttatatatgataattacagaaaatactataaacctatttattaaaataccagagattctaagataagtttgaatagaatgtggttcaaattattaatttctcttccccaaatttaacagatccaagctactatactatttataatgtagaagaactagaaatagtctaaaagttaatcaataggcaattggttaaatattgatatgttgatgtaataaaataatatgtgactgctaaaatcatgatatagaataatacttaaagacatggaattatatttgtggtatattgtaatttaaaatgacaggtcacagagtagtctatgactgtttctgttatgcacaagaatagattttaatacatatgcaaacacatgcagaaaagattaaaaatatctgccataaaattatgactgtctctagataatggaattacaggtgatttttctatttattttatttttgtgatttttattttgtatttcctaattctctacgattaacatatgttatatttgtaatcagggaaaagtaaatgtctgaaaaagcaagatacgaaacacttcttgttatcacgtataacagattagttcttccttttaaaataagccattaaaaaggattcttatatactcaatgcagggcgttttttacttcagtggcaatggtatatagtgcctgaagattggtaaaaatagctaataagcagattctgtgcacagatttatccttttcttccctctgtcctcccaccggagtctgtgtttctgtcacagcacttgttacttaaaagtccagttatttgcttattatcctttgattccagccccagccacccattagactgcatctcatttgagggcaaagatgaatcacatttttttaggcattccataaatgtttgtggagtgagtgagtgtgtggctgagtgaaagtaaaaaaagaagaaacccttggtgccaatcaggccagaatagcagcagacaagacgccttctctcacagccaattttcttggctgactttgtcagtataattgcttcaaatccgtattttctctacctatctagctccagcctaaatgttgaatattgtattttccctcaaagaatgtcaataaagattttatttttttcaattactgttgcagagaatgtttccctttaggaaaactaaaatttaataacttttcttcggcaaagttgacgatctctttattctcgccatgatgactgtagtcaatcaggagtcagttggaagccaagctgaacataaagtaattaaaagaaaacccaaacacaaatgcaccctcttgaaaacctaatcacattatgagctctaagcatgagttatgaggtagctgtggctggctgggttttgatgaagtacccataatttcatatcagctgccacaggactttctgacttctctataactttaaaatgtgatttaccctgttatcatctacttatacagtcttcaagatctacctaggaataaatagtactaataacattctaagctgtattgctgtaagattcttatttttccatattcatatggtaaaattcaaatgataaaaataaagtaggtaattcattagatttcaaagctctggctgttaaaataaaagcatttcctcaattcagaaatcctggcatgaattcatatgttatcagctagtactatagatgaacttcttttgaaaatatgtacattatttttattcactttagattaggagtaatttgatttatttaaagttaagcgggtatgcggtagtgattaatttcaacataatatattcataattccactcttaccagttttctctcttggtactgcatgcaaatctttatttttaaaaaggtaatttaataggaaaacctttgaaactaatttcttaggcagttttcctgaaacatgttattagaaattgatactttggcattataagcagtgtagatttctattgtggaccagtattttgcagaaagagttacattttattgatgaaaaatctaaagtatagtcagtgtccctacatgtaaaaaaaggaaggctgaaccttcttgcaatgttcacctggaataggctgggagcttttctagaatgaatgaagcatttatggcttatggtccatcatggtggtaatgcttttttaagtcagctcttttcattggccaagataacctttatttttaagtgaacacactttttataaccatctggttaagtgtcatcagtctgtctctgcattaccttctcttttccttgttaactccttaccctgtgtctttaagacacaggctttggagaaagtatttcccagcctgtagtggactttccttctcagtgctcccataggctttgcagctgaactatttaattcatcgctccatcttccaaccaatattgagcccatttaatgccagttatagtacttggcactgggcatggtgataaaaaatcatgcctgtctttatacgattatggactttcagaaaaaaaatagccacaagtagggacttttgggaaaaattatgccctaacatagaataagttaaaaaaaaaaaaatccctaagaaagagttgggggaaaggtttccaggtaaaaaggcattataaagactgggggcaaatgaaggagtggtggttcacaaatcagaagttacaggtcagagggtgaaggctagaaatgaagtggggagattgaaaagggtgagatattgggaagtcctctaagttacagttaggatgttaccttaaagaccgagaaatatcttaagcacggagtgacacgaggagatgcacagtttagaaagcttagtttggccaaggtgtggaaaataaatagacaggacctagttgagaagctgtagatgctgtaaaccagatgagagacgacggtggcccagattagcagaagagtgtggagatgcaaagtactggactgaacccaataatgcttaggaaatggcaggactttgagataaaaacatctatctaccacgcatcctcgtcattccaaattacaattgtttattttgctagatcccctgtgtaactgagttttttataggcattttttataaatctggagcctaactcactgcttaacacattttaagtgcttggtgcacattaaggaataaaccttgattgatgctgtgtcataaacttgaatgatgttgtttttagtgtatccgtgcctctagaaaacagttctactgaaactgtaagagaaatgaagttgtgatttgagttgctaactacaaaatggttttcaaatttaattttctgttttcacattttaaaacaattacgaagtcaaccttcaaaatgggaatttttactctataattatatatgcttataaattgttttaatatgctccctaaaccccatagttcaaaccacattttcaatattattgtttcaattatttcagaatttttctagcatctatatgcacacggacacacacattgtttttcttcttttcttcttttttaatagaaaaggaattatacactacatatagttgtgctccttgctttttcctaatagcatatcatggctatctttccattttagacatatagcctagctcattgaacagctgcagctaatttcagagatggaagtacaatgattttattattcccctactaataggcatttatgttatacctattttatgtgatgtcataagcaatgatggaatgaataactttgtatatatacttaatttctactggacagatacctaaaattaggcttgctgaatgacaggatatatgcatattaagagtatgtgtgcttgtgtgtgtatgtatatgtgtatatatacatccatattctagctatgtatttgtttatatatatatgcccatgttctaattatgtatatatgtatgcatatcatatacataatacatacaaatatatgtacacatgcccaaattgccctccaaaaagattgtaccaatttgttatcccaccattagtgtaggagtacccagttttccatatcctcatcaaaactggccaaggtaggaaaaacatttttatctctttcaattttatatgtctgggtgacttctagatgttacttccaaatcacctattttctctttaactatgttcattctgccattctattatccagtcctactcttaggcatgtgtgtgtgtgtgcgtgtttgtgtgcgtgcatgtgtgcacatgcattctgtgttccttgagaaaaaaagcacacacacaaagagagaatgcccttccttccttcctttctccttccctttcttccttccttccttctttccttccttccttccttcctccatccctccctccctccctccctccctccctccctgcctgcctgcctgcctgcgttccttccttccttccttcctcccttccttctttttttctttcttttgctctgttgcccaggctggagtgcggtggcatgatctcggctcactgcaacctccatctcccaggttcaagcgattcttgtgtctcagcctcccgagtagctgggattacaggcacacatcaccaagcccagctaatttttgtatttttaatagagatggggtttcactatgttggccaggctagtcttgaactcctgaccttaggcaacctgcccgcctcagcctcccaaactgttgggattacaggcatgagccaccgtgcctggatgagaatgccttttcatagaaacttattgttatggatgcaatactctcttgcatttctttcttgataaaatgattatcaataattttgaaaaattattcttcttggattctggcaaactcctctgggataggtgtttcccttctttcatagtattggtgttccttttatatggagattctttgttaaccgttcgtatttatatgtacaggcagagctcaggctgtaatgctcgctcacctgccattcacctcctgctgcgtggcttggttcccaacagacggcctggggattagagactcccaactttagatggtataggcacagaactgtcaggcaaactggggaccctggctgtaacagcaagacttatggtattagatgcttgataaaatgtaatcagactttctcatagtttacattacacagaataattatactcaggctttgtcctttgttgttttattggtgaggagacaaataattaacaaagaggaaacacagtaatgacacctttctttccccaggaaaaactttcaaattacctataataagacttgatttaaaaatatatatctcaagacattactgcttttaaagcacatgacatctgtttaatgtattggacatgtctgttaccatagtctcctgcactaatggataataataatagcaactacacttatttctttcacagcaattataatctgtattaattgtgtacatttgtttgagttagagatttattgcctgtatcctctaatatctctgtgacatgaaggaccatgtctttttttttttccccccctgggcatcagaaataaaaagtcaagaaagtagatatggccctggctgccatttttatattagtttgtcctagttgctgaaaagaaagatggctcctatgatgtcatccttcccccggttgcacaaatgtcactaacctcttaagagaagaatactgtccatgcaaaatagaataatgtccactgcgcttatcgttaaaaactagagtgtggttttgttgttgttatataaatacctggttgaatgtaatataatcccaaaagctactgataattgggtttatgtgggagaataaacataggcagcgttagaaataacattgccattttctccatgccccaaatagcatggtttcttgagatagggaaaaccatatttgtcagacctgaaatttatgtttctctgaaaggggcacctgacattataatgaaactcacaaaagcatggaaagaggtttggaagaaaacgaaatgttccaaagtgtagaaataattgatggaatcataataatgctaattttaataacaatcgatctatgaatggcctgccagcttcactctccaacacattgtactcttatttatgatgactgtaatgtaattggaagtatttttcagttaaaaatgcgtgtagtacttgcataaaaggaatgcatcttaggtggctgggtggccattttgcttgcctatggctccccaagctttcaaaaagaagacattgcacactccatgtggatgtggcagtggggaaaccagaaggtctcctcctgcagctggcgaaagaaccaccagtgccagcttctcttctccagtcgtcattcaataaaaggacgcagaccaacactaaaatttattttgacgaggaaaaacaggaagtacatacccaggcctctgtgatgaggtctctaatacccactgggtgcttttgcatgagacagatggtctcagccttgcctacccatcccaactggttggtggtctttccaaatgatgccacctggctcttggttcttatgtgggtgagcacaggggtagcctttgtctcacataagcacaaagcaggaggcttttgcattctggagactctcagttcattctctgtgccttcagcatgaaaaatgcaccactttctgtatctacctgatcgagattgagggcacacgctgacattttatccatggtgtaaatgagtaagtacgtggggagaatgagtcatgcaacaaataaagaaatcttgtgctctcagatagagcttgggtaatatgtaaagaaagattttaagtctaaatcccttgtctgtttttccacattgctagatgggaaacaaagagataatttagttaaaacattttgttgagaggataaagtatgctataggctattttaagggtactaaattatttccttccatcgccagaagtctttttcccattactaatacgaacagtcgtatttgttgtaatgttataactgtcctaataagaatactcatctttactgagcacctactatattgagccatcttcacatgcactatctcagttgatctatgaatattttgttaataaatatccagggtctattaatgccactatatcatagatgagagaaaactgcaacatacagagctgaagccgtgagcctaaaggtacattgcttgtaagtggaaaagctaaattggaactcacataagatcttatggaatctagaccaccagctctcaattggtactcagtgctgccttggtggctcctatcctagggtcacattttagaaacagactctgaggacctcatgtggaattgttagtcatcaatattgctaagcctttcttctcattactgtcgaccttttcagaaggcaacttaaaaagagaatggtggaatgtttgtatcattgaatataagtgctatttttgaaaagtgactcaaatgtatagtttaagggagaaaatgaaatcatctgtgaacattaaaagttatctcttccttttagttatctcttccttttatttttacatggcacatgtctgccatgccaaaataagctctgccctcctgttttcaggccccaagcctgtgaaactctgggtcttcataagccatcttgaatcaatcagttaagcgatatccttttatccttttcatcaccttcctcagccttcctcggccttctttttccttctgtactcaattgtactctttcctaaagaatccccgatgtgatctttcacatgctgtgggaggaaatgtattttcaatatctcagtggttgatactgctggttcattgatatatcagtagtttttagagaatgtttactcctgtcttgcacttaggagtgtctacctgttcccaatgtgtgtagaagtgcaaaatctttttataagagtttaccctgaacatcatcaaaagaatcatgtagttgcaattcatgataaataggttatctgtaatgatatatgatagtctgtggtaggtggtaaaaaaaacacactgtgttcctgttgctaactatagggcacatttgcctttgcaaaaatgattgaagggtatagagggcgtgcagcaccaaggctgggtgagaggcctcatacgctttttcaacagtgtatggttgagtaccagcttgtagaagcaggtagttatcagcatgtggagcaaaataccctgagtttaaatctagcactacccctagtggtggtgttaccttgagcaagtcacttccacatcctcgtcagtaaaatggaaataataaaagtatgtttctcataagattgacataaagatgaaataaaataattcattgaagagcttaggctagtgtctgacacataataagacagcgtgtattgatcacttactattattttccaagatccaccatacttgtcccgtggcaaagaacatctttgtaaggatacatttgagaaggataggctatttccttcctaaatgcttaaagcaatgcagattcatgcttaatgaccaaaaagaccatttgtgtggagcctatgacttttcctatccttaatgttttagattagagatggaaaagtctgctgtcttaggtgaataatgatgcatgtctttatgacttaaaatgttcaaaggagctgtagagcattttttaagagtcatttcttctcaggcattgtattctgcaacccaaacgttgcttgctgtgtagttacttggggacctattttctttaggtagtgtctgcatagtagtcactctggttcaccgagggctttaaaaatggaaacgtttacaaaatagaaaggcaggtagggctccgcacaagtgaggcctgatgtgtttctatggtaaccccattccatatcacaagggtcaatctcatggaatgagatgatgttcagagatatgttctggaattttcttggctgtcaacctaactatttgggatttgaaaaaccaaaaaggatgggtagaccacttgaggtttgctgggatgcctggagccattagagatgacttagatgaatatggaacctcaagaaatgaggcttctgacacctcaggggttccctcagcttaggagccccatttctattaggttgatgcaaaagtaattatgtttcttgccattgaaggtaaaattggtgaaataattcaccgagcacatgttgaaatccaggaggagagagggaggagcatcgtccaaaacagccccagcttcatccccagagtccccacctgttgaaagggctattctcaaatctttaaaaacacattgccaaatacttgtaattaacaaaagggaatctagagtatgggggaagttatatctctgccttaatttgatcatctggtgttttgttactgaccttgtgtgatgtgttctccggttacctcggggaaaattgactcaggctgtactatagggcaccaagaaatggtttaagtttgatttctttaagtcaaagattttaaatcaaaatggtaccaatgtcacattacatttgatttatttgcatatctagagaatatatacgtatatgatctaagtattcagtgtaattgtcaatatgtattttttaaaatatgcatatgcacaaaggttatggagacccttattttctgaaggaaaaaaatagctggctgaattttcatcatcaagtagagaaaggtgaaatggaagcattgggagagggaacacatacatgtccaacttagttatctgggaaaaactatttatgtgggaaaaactatttctctacctacttaatgttttcattttgttccaggctcacgttgatggatatgcaagtttgctcacttactgtgctagcattgacgttgagagttcacagatgtttcagttgagatatttaaaaagaaattctaaatgatcaaggtactttgagtttaaaacttaaaaaaaaaatctactttatccagccaacttcacactatttatagtagcagaatttggtacagcaaaaggaagtgagaattgttctttcttcctctctgtctctctcctttccctttttctttttaaatggtacatttttgtatgtgtgagaaaacattagaataaacaaataagccaagaaaaaaaagcacttgaaaatagactgcagtcttgccatttagcaagaatcactatcaacattgtgagaaatatgcttccaggactttctctagaatgatatttaatgttgtaataaaatttacaacaataatagcggtatttattaacagttactctgtgccaggcactttgaaaggcactttacatttaatcctttatgaactatgtgcattgtttttatcattcttgatttatggagaaactgagggagggatcagtcaagtgatttcagcaacgttataaaggtagtcagagtaaatggcagaccccagtttgttctcaggaagactggttcaagattaccttctcttacccctctgtcatactgcttctcactgtgtgtattttgaaacagcaatggcgtggcgttttactattgctttatagtcttttttctcttactgtattgtgaactttccccccatgtttttatgtattcttctgtggcatcattttttatgattctccttgtgattccatctaaaagagcatgtgatcacatccttaaatgatcccctattgttgggcatgtagactgcaccacaatggagaggttgtttaattgagaatttccgtcatcatcctcaaaacactagtgttccaactaactcatgtaccaactttgtttgaaaaacaaaacagattgcatgttgcaagacagagctgctggcaaaatactccatcgtgtcagatttatacaaacccatctcctgtgtattgcaccatgtcctagaaaactgaaaaccatgaaaacaagtgctcatattttaaggaactcaatgacagctgataaaatattgcattttctgtagcagtttttacataaagcttccaccttaaagaaatggatttgatgggactaggtggtaattttttaacacaagcagtgacaaaataaacaccatctgttagtattgacttattccacagcattctcaggctgggtgattttatttcacttttttcagaaatggttaatgacacatctggtagtcagtgaaggtacactctgggtgattaaatgtggtcataagtttacactaaatgctgacagaacatttttttttcttttccattataagcaacggggcacatcggagtgcctggctggctactcattttaaaccttgtgtaggattaactgtttggcggtcgttgaacttccggaaaaacgttgttattttgagtcttctgagaagcagataccaagacaggattaggtatgcaagaaatttattgagggaaacacctgtgaaaactaaagcagaggtgcaggagaaggcgagaacagccttcagatggcaatgtgagtctggcaccagtgaagggagagtgggaaggaaagaggagtgggcaggaagagccccaggcagcagcacattctaaaacagtgtcagccaggacgctggggggtcctggagccccagttgcccatccgagcttttctgcatcctgcataaatgggcatgaattagtttcttcactgtgtccagtcattggcagagaacagacctaggaacctcagtacacacacagtagtggatctgaaggggatagccagtatggccctccatcaactctgttcccacagccagagatccgaggagtgcattttcatggtcaccaaaaatctcaacacaaaaaaatgaaatgatcaccgaattcatttatctctgcatgtctttttaaagaagaaaatacaatatttaaaatggccttttctcccctaatgtctccattggtctagcaggcatggcttgcactgcagaagactagcgtagctggaatagtaggtcccgtttatgctaaattctatcagtgaagggaaaggggagagtcctgaacactgttcttacctcttcatctgttcttttttttctttttttctttttttgagatggagtctcgctctgtctcccaggctggagtgcaatggagcaattttggctcctacaatctccacctcttgggttcaagcgattctcctgcctcagcctcctgagtagctgggattacaggcgtgagccaccatgcccaggctcttcatctcctcttaaactctcagagactctgctgctgctgttaattttgctttcagtgtgaagggttcttttggtttgccataattttgggcccatgacccgggaacttcacctcctatttgaaaagaaaatcatctgggaatggaagaggcgaaatttaggaaaaaaacacacttttttttttttttttttttttttttagtaattcaaaccccaaaacatattttgaggggcagaaggaaaaataattaatgctgtatatgatcacttcctacatgtcaagccattatattgttatcatccttaattcttaaactcttttgagacaagtaaagttatatttttatttacttttatgtatttttttttaagtttaacagaagaggaaagtgaggttcagaaagatctggtgactttttattggcacacaatgagaaagaacagattggggttttttccctgtttttcttgagttggtatacagagtagatttgccaaagagctcctcagttatgccagttactttacttatttgggaaggacttctcatatttatacagatatctttcttcacatcctgaaaagggcactgaacagagagagctgcatgctattaccattttttgcgactaaatacttgtgtggctgtgaattagttatccaggccttggttttttcatctgtaaagaaaggagattgggttagataacatttatcaaacttcagccattttccattttctatcaccttgatttctgtcccatctttaatgccacctataatatattgcttgatattttatttaaaataattcctccttgcaacttaagtgtctttaaaataaaaacattttgtcaccgcttaaaaggaaataccagtataaacaagtaaaattacacacacgcaatcacacacacatatatgtttgtatatatgtatgtacgtatatattcgtatatatgtatatatttgtatatatatccgtatatgcgagtatgtgtgtgtgtgtgtgtgtgtgtgtgtgtgtgtgtgtgtgtgtgtgtagagagagagaggaatataagcaatgaaatgctaggaacaaactgagactttctccttaatataaccagaaactttgaagacaaattgaaaacaaagtatttctaatgaaaatgttctggagacccaaagttgtttgacactttgtcacacttagtatcattttctgggcaaccaatgtcttatactgtgtcagacactggaaaaacatgacttatatattctgtctcacacacttgtgattttcctccctgccccaccccaaccttcatttacctttggcctcattttgcctcatccttccaattgcaaaatttgtaaggaccatctctcctctgactgcagaaatactctctgcatcttggctcatgagtagaaaaaaataagacctggaacaaataagaacaatttcttcctgttcttctgggaagtttcaagggaaggaagtagacagagctcgatagtctgggtaaagcctgaggcaagtcacactgtgtcttccaccagcaggtgtttacccagttaagatcagtttaaattgaatagtgtgcaaatgaagatggagttttcccttatatcccatttctccaatcttattgtgccagtctgccttccccgcttctgtccctcagcaatcaccaccagaaaattgtccttcactacatattccttgatggtattttagaaagagtagggtcattgcgctcaaacagaacttggttcaaatcccaactctccctgacttcagggaagagacgctgtggctcctggtggttaggagaactgggagttctccaggagagtcttcaggaaattgatggacaagggggatctcgctggcaggggaaagagaagtcagaggaagagaggttgggggcatagccctggtcccaaaccagttggcttttgcagagggtaagtgatacacaaaaaactatcttaagtagtttggacctgagatctgaagttgcccgtgtggttaaagtctcacctattttttagcaccatttgcgggagaggagtacctccttcttgaccctctgccttgctaccaaaccctctgccttcctgaataattgcttgatagccttctctttcttcctgccctctttgccaccccggaataccactacctgaaatgatctcatttctgcctatgtctacttgcttagtgctggtctcccctcactataatgtaaagttcataggacagaccttatctgccctgttcacaagttgttctcagggtctagaacagtgctggcaaatagtattaggtcaataattattaaaaaggtcaaatgaattggccgaaggcaattgcccccattcactctaacttagtaaattagttcctaattctggctgtgcactactgtcacctgaggctttattggaaacacagtttccagatcatcacccctggacagtctgattccatttgtttggggtgaacctgaggaatctgtatttttaattaacatctcaggcattttggacacagccagtgcctggactgataggtgggaattactcccacaggaaatgttactgaaaacagaactttattatcagcatcacctaaaccacatttcttatgttacagactataaattaaatatatatgcatgactttaaaaatatatacctccaagccacttccagtttgtgtatgtgcttctggcagaagcaattgtatttattcataccctgtatccaataaggtagggagacccagctgttcaagcaggtgcctccttcccaagaaaaagatagatcgattagattaacaattaagtggtgaactgttgagaggttgcccaaatggcctttgggctttcttctagaatggcatcaatgcacagtagaattgtggcagatggacgatagtgttgcatatgcactcatgctgggaatgaggccattttgagctcctccactggtccctcaaagggctgcctggtcggcttgatggcttgagttggcagtagggagtaacaactgagagcccgagctttagagacaaacagccctgggtctgaatcacagaatggccactgattaaagggcattttacatagcctttgcgagagcctcgtatgtttcatctgtaattaggaatgctgttctctaattcattggtttgtgctgagctattagtagagtgtggctggcattctgtatatacgatgctcaataaatgcaaatatcataacctctgggaagactgacttataccattccactgccgcaattgccgtaccaaatctccaaagactaagaaatctgcccctattggtcaatagaggggctaggcaaaagtgtttggttggtcatggaaaattgaggataatggaactttaatatgttaaaaaaattccttctccaaatttcatttgacacttgctatatgaatagttaggatttaatgaatacctttttatagagttacataattttcctgtaagatgcattgggtttccagaagaatgttgaacttgattcaattttagcttgattcgggctattcaaaatttatttcctgaggaatagtctcattggataaacttaggagttgttactggaagactgggtaactgtcataatgccaaacatcggtgctcctctccctcactgttacctaaattttaagaaatttctaggcaaaaaaaaaaaaaaaaaccacttgattaaggcagaggttattaagtatgggcaagagtgaagggcctggagttgatagtggaaaaaatatagcttagggaatttcatacccagaagcaaaaccaatatgtacatagatcttaatgctgtgtttcacttacagttcagagtccactgccttgcctagcatgttcaagatgttgtagtgccaccatcactgtatatgaaggctaattacttggaatattccttactgggtataagtgttccccaaagatttagcttaaggatggaactcaagagcccagcacaatcattccttttaactatttaaaatatattttggatgcacaacagactaattgattgaatgcacttttcacaattccacttatctaagatttttagaaaggcaccagaaatctcaagttgagattttagtattatcagaaatgtacaaaaatcatcagcctcctaaatcgacatcttgcttgagttcctctattcactctacctcctctgcacttatccagctcaatttctcatcccaagtgagcccatttaacatcttgtggctatcaacttacaaggtaagacagtaagagagggctggttctcaattatggccttatgttggaagcacctggggatctctacaaaactgggatcctgattgaattggtcagggtgtggcctggaactcaggctgttaagagcttcccaggtgattctcatccacagcccaggttctgaaccaatatttaaaatagcagagcatcccttaaaatagcagagcatccctttccccaggactagaggtgactcagctgtattttctgtgcctgtgtttgacgaattagttgcaaattatattcctgcttttacatagtaattaaaacagtcatgttttcatgggaggttccttcatgctgagcctatccactctgtcatttctttgcttccttagtatgttgtcttttaaatgagcttagtggaaaaagtctggttggtgcattctgagcctgctaatcatttctttcctttcccatccttttgagaatcgggccccagctcttaatctcttggtgtgcatgaatagttctcattagttgtggtaagtgcgttaagtgaaactaactatagaagctcactgaaactggaccgtgtaatcacattgttcatcagaagggattttaatgtttacatgcagaaaaaaaaattgtcatcacaagtagataaatagcccattattttacacttgagttggtacagcaggagcaaacagccaccaaactacttctgttgacattccagttgagctgcacataagagacatgtggatgtatcctgtatattctcagacaacattcatctactcttgcttctgatgtcatttcccaatggggtaaatatgtctctgaagctttattcctcctttgtgggaatcggatccccagtttttagccatgcttattcacagagcagaattttccagagtatgggagctacacataccataggcacagcacctgcagtggcattaaataagttgggtcacataatgaggggtaggcaaactttatctgtaaaggaccagatagtaagtatcttaggctttgcaggccatgaggtctctgttgctactactcagttcagccattttagcactaaagcagctgtaggtaaaacgtaaagaatgggtgtggcaccaaaaaaacttttatgcacactgaaattggaatttcatataattttacatgtgaaatgttattcttcttttgatatttttagccattaaaaaaatataaaactccttcttaactctagtttgtataaaaacaatccttgggccagtttgcagactcctgccattggaggagtctcagtgggatgctagactttaatgcctctctaaaacatatgaattttacattttaacagagggaaagggttcaggtttgtctctgaatcagacaaaaatagttagctggaaataaagcatattgtgttgaactttttacattttattttaaacattttattttaccctctatctgtggctactaagtgaatttctacttagaatggtgatttaaaaaaaaaaaaaacaaaacagaattggctgggtgcggtggctcacgcctgtaatcccagcactttgggaggccgaggtgggcggatcacgaggtcaggagatcgagaccatcctggctaacatgatgaaaccccgtctctgctaaaaatacaaaaaattagccaggtgttgtggcggacacctgtagtcccagctactggggaggctgaggcaggagaatgatgtgaacctgggaggtggagcttgcagtgagccgagattgcaccactgcactccagcctgggcgacagagcaagactccgtcaaaaaaaaacaaaaaaacaaaaaaaaaacaacaacaacaattgatttacaaacaaaaatattaagtaaagaagaggccaggtgatacatggctatgatgaaaatcatgaggtgatatttatgatatttgaagggttggtatttgggaatctgctgtccaggtttgattacctgtgagtgttttttccttgggaggaatatctgtagttctgaaaaaagtagcttattattttttcactacaacttatgatattataaaaatttaaaaagagcccctgatgaaacatacacatttcctctgatactttcatcaaagccagccaaggtataaaaaccaaggtaaagtaaggttaaaacttgtgatgagtcctgaaatgcatagaacaatagtagttccattgtctcccttcacagtctgtggatttcatgtagttctctgccacactttttatctcaacacttcacatgtttttactgaaggatcaggagctcacttatttatcgttctctaaaatggtgagcctcccttttctttgtatgaaaatactcaatatatgtttaaacaaatcaacagaaataggaaaaacagatggtgaaaggattatgaggcattctttgaaaagagagtgtgctgtattttctacacgggaatgaccagttgctctttgatctcaaatgtctccgttagcgcgaaggccctgcttgcactcaaaaccacactttgtcggagagactcgtgctacagcctcctgaggatctcccagctgctcctcttgcacctccctggaaccattccttacttcccacctcctcctcttccattctcacccagcagccagtaagaccttaaaaagtgaatcaaccagttaacagtcttgcttaaaaacctcaagaagctcatcacctaacttgggaaaacaagcgtctacactctctatctgaggccgtcaaccaggccctgcacagtttagccctgccattccatggcctctgcgcatgcttcctcttccttccagcccttaccctcctccagtttctcacacttgcctggttcttgcctgtctttagatgccaatagcaccacagtcatccctgttgtgacaaccaaaaatgcctctggatggtgctgaatgacctctcaagggtaaaacccctgtctgcctgagaaaggctgctccatctggaacactgtcccccatgacacccgctccttgtttgaagctcagcaggcacttcccttccatagaaggccctccttggctcccacttttagaaatagttcctccgatttgaacctttcattctatatttcacttttccttataaggacttatttcgaattgtaatcacgtatgcatcctgtgttcattagtttaatatctgttgactagattataagctccctgaagccatgctaatttgttcactgctttattttcagcatttatcacagtgcctggcacattgcagtggattaatccatatattttgaatgaaagagttatcaatttttttttgagatatagtttagctcttgttgcctggagtgcagtggcaccatctcggctcactgcaacctctgcccccaggttcaagcgattctcctgcctcagcctccctactagctgggattacaggcacccgccaccatgtccagctaatttttgtatttttagtagagacagggtttcaccatgttgggcaggctggtctcgaactcctgacctcaggtgatctgcccgcctcaacttcccaaagtgcttggattacaggtgtgagccactgcacccagccaagagttatcaattttaagtcaaatttatatttcataatcttgtggacctactattctatcaccatccctagctgttatgcttaggttatttaacaaagaaaaataagtcatcgggaacttgaaatataatcgcctgacaaggtatccctctaagtgattaaatttctgttttattagggttcaaacaagtgctcggtatttgcctttattttccaagaaaataaatctatctccaaatgccacagagagaaatttatcttttcctttactcattgtatgcactgatcttgtgttcagatctgattacccttaacaggcagcctctatgtgcagtaacttgagctcttttccttagtttctcctttaccagtaactccctggttgtttttaccttcgtaactacctttccggtcaaagtactgcatctctttctgtaagatgatggcttcagatcaccttctcatttttctcacgtttattttcaaatgtgtctccacacaagcccagcctgtcatagaccatgttttactgttctgagtgacttgacattccctgaccagaccatgctgtctgtctctccatcaggctccacactgttccctgtgctagaacactgtcatccataatggtctcctaaaaacagccccttaatccccaagattaactggatgtctccccgacccacctacccaggtcctggtctcctgggtggccactgcacagatatactgtactgcagttgcctgtttatttggttttcccttccattgcttgaaaatgcatagtgggaagaacagagaatggcttccataaatagtttttctgtgtgtgtgtgtgttttgttttgttttttgttttttttttttttttttttttgagacataatctcgctcttttgccccggctagagtgcagtggtgcgatctctgctcactgccagctcctcctcccggattcacgcctttctcctgcctcagcctcctgagtagctgggactacaggtgcccgccaccacgcccagctaatttttgtatttttagtagaggcgggatttcaccgtgttagccaggatggtcttgatctcctgaccttgtgatctgcctgcctcggcctccctgattgctgggattacaggcgtgagccaccctgcccggccccataagtacttttaaaagaaataatgaagttccttttaaagtgtaaaccccttagaactgagaattaattctacagttagctagttataaaagtctagagaaaatggaacataagacagccatatcttttggctttgattagtaaaaagaaatatatatgactgtcacagaagatagtcctaaatgtgtaagatgcttcacaaaacagagataaagagtatgtcctgtccttaaaattaaaatttggaaggattaatagtggctcaacacactagaatgctgcgttaagtagtatgtgaagtctcatccaagcccaataaaatgaataatttgatccatcagcaaagtgtgctatgaatatcaagcagggaaggccagaggtttagtgtctaaaactaaaggggtaagtaaagatgtaaaaggaacacccaaacgaaatctcggcttattttaccttatttttaagtcagagaattgtgtacttgaaaagacctctttccacatccccaagtcttactttacagatgaatcaccttactttcagctgaagcagctaaggttctcagaataagtatgctgagcatgtctctgctgtagccagatagaactagaacaatgccctgccctgctgattatctttgtaagaattctgaaccctgctgagtttatggggcaacattcctatggcctgacttgcagcttaagtggcttctgaatcgaacatccctcctccagtggttgagagacacagactggcacttagtaacaatgcagcaatgatatatttagtatcaaccatgagccaggcttttgctgaacagtttactatgcagtaggttccccacaagccccaacaatcctatgtagtagaaagtattagtttccctaatatgcaaatgagaaacctgaggctttaaagatgaactgacttggaaaaatcacatagctagaaatggagagagctggactttgacccaatcagtctggctctgaattcacttctgtaaatgcaataatatattggggttcagggaaaatttttacatagcacttttgaggacatcttgagttcttcagacctcttcacagacatgccatatcatagaaacagaaaaaaatttgcaaagacacttagtgtctctgaaaagatagaacaggcttaaagagtacctgactcaaaaaatttacaaaatcccactgctcccttgatagagagatcagatggaacatgaaataaagtacttcctttaaagtcctttaagaatttaaatgtgaagatagaggtcatacatgatatacattaagatgaaagtaattaagagctagcattctctggggacctgctaagtactaggggttgggccaagtgttttacaaacattatcactcgaatccccacaacccttgggcaggggcctgcatgttcaggttgtacactgcagaactccaaggggcaccattcatttagactaacatgcatggtagctttaggtggtgcagtggcctgacctatgagattgttaaacgtttaatggttagttcagacttcacatagccaggaagggactgagctgggattggaacccagaacactttactcacagagtccttgcttctcactgctcttggtacacctatgcccctgtaaacatcctctctcagggtagagaatcaggctaatttaatcagcatggccatgcttttctgggttatatgaaattattctctgtaagaatctcaaagccagcagttaatgatttggtaccattatcagttgattgtggatatcacaattcggtccatcttgaagtggtatgttttgataaactgattccatttaaatgtgtatcgattctatgttcagtaccattatccttccttttagtataacgtgcactgaaaaaataaaattgcgttcagaaataatacttagttcagccccagtacacacagttgttatatttcttaaaaaaaaaaaaaaaaaaaaaaaagctagcaagtttttggggaactccagggaaaacaatatgtgaattaattttcgtttcaaaagaacagcaggaattattcaggtaaaaatatttatgttaatatgctacaactgccacatttcatctgtgtgaccactagtgctttctaaacagctgctagaaaaatgtacacaagaaatgtgtgaggtctatggaaaatgtaatttttgtattctagctattacattttttcccagtcattacatctcccccaactcttgcaggatgtgggttttttgcataagttgcaaattcacagttaaatgaggcaccttttggacttggctaaatatgtatgaacatgaagttatgaatctatgaactggtttgaaaggtagaaccatgtgatgttggcattatcgtcatgttgggttttgggtgtttgttttttttttttacatcagtttaaaattactttgcatgaaattagcatagagtagcaattactcattcttactctgtataccttctcacgttccagtgagaagaagaaaacaacataggttcgtgacatgtaatatttgagaccattgactttgcttctcactaactgcatgtgataatttgggcaggtcactgaagctctggttctgtgtcttacttgaaaaataggaaggataataagccctcacctcatagattgttctaagggttcattaaatagatacatacatacaatgtttggcaaagtgcctgattcctagttagtggaactctaaattgtagttgttattactgtattgtattattctctggtctgcattgggaaaggatctgcctgcattgctgtataagtattttgttattttaatgatagtttctaacttttcaggtgacctttccttattgatatttatgttcatgttgtgataaactggaactatactaaaagtaaatatgtctctttaaatgttattttctatcagttccttctagagaatatttgttttggcaagtagaggtatatcctgctttaatcaacccatcaggcttattcaattcaaggaattttcaaccattttgaagattgcaaaagctattgagaactataaaatgtgttccctgcctttgaaaagatctggaaaaggattattgacatctttttatacagaagaggaaacactctgaaacgccaaagaaaggtttacatcaaatataataactgatgacatgctgatttaagcatttaatgagcaaatcctattaactctgcccacccattcattcagttacacaaatgaaataacatctgaacttccatgcatgggtgaccaaatcccatacacaaggtaatgaaggatagagctgcttgggttttactatcatgtctttccatgggaaagttctgcctttcacgtgtgtctaggtgctctctttattagctgaattcatctctgtcttgccaacacacttgcttatacactgatgctatgatttgggtcttgtgtgtctctatggggccagattactcatagaatttcactttgttttaataaagaaagggctaatttatatatgtatgtatgtatgtgtgtgtgtgtatatatatatatatatatacatatatatatatatttctttacatagtaaaagttttcccaagaactgctgtgtttttttgtttttttgtttgttttgtttgtttttattgtttgttttgtttgagatgcagcctccctctgttacaagactctcaggctggagtgcaatggtacaatctcgactcactgcaacctccgcctcctgggctcaagcgattctcctgcctcagcctcccaagtagctgggattacaggcatgcgccaccatgcccaggtaatttttgtatttttagtagagacggtgtttcaccatgttggccaggctggtctcaaactcctgaccccatgattcgcccgcctcaacctcccaaagtgctgggattacaggcgtaagccaccacgcccagccacttttttattttcttcaaaagtccttgcttacacacacaacctctctccctctgtctccctcttgctctatttctgtcttgttcttgatttctctctttcacatatgcacaggcagaggcactcatacctacattcatatagaccttttagtctttcttctcatggtattattccatatgccacaattgcctcggctacaactagtccagaaatttccaatccatagccatatatgctaaatgacacctatagtaagtggtatacagccttaaaaagactacattaagccagacatagtggctcacacctgtaatccgagaactttgggaggtggaggtgggtggatcacctgaggtcaggagttcaagaccagcctggccaacatggtgaaaccctgtctctactaaaactacaaaaattagccgagcatggtggcacaccaccgtaatcccagctactcggaaggctgatgtgggagaactgcttgaacccaggaggcggaggttgcagtgagccaagatcgcaccaatgtactccaacctgggtgacaagagtgaaaccatctcaaaaaaaaaaaaaaaaaggctacattaactcctgatttaagcagcaaatgaattgggtgtgagtcttacttgttaaacaaagaagactctccgtaggattactttatatcatttagaaaaagacagtttttatttttttctggaaatgtacggtagaacccaagaagtagtatactaaattagtactagtcttcaaaaatgtatagtctcattgatgtactgatttcagaaaaactacgtcagcaacttaggtcttttcgtgtgatgtagcaattagttttctgctaggctgatagaagaaagtaaaaagaggcaaggatttgttcctcaaattattgtgcttaggtgttttgttgtgcttcaaaagtttgtgtttggtttttgtggttatttaacccctctttccagccccctttcttaacctgaagaagaggtggaaggaatagagaggaacaaggaaggaatcaagcttttgtcttaataagagaagaaattctttgagggtgcaaaattatttctaggtagttctgaacttggtttcctcagagaactgtgtggtggaaattggccgtggtacaagcctatgttggattaccttgcttaaagcttttaatcactcatttgagttccaccttggtatgggatattgagaggtagctggagggaggatgcatcttctccacttaccttcatgaggccacccaatcagtcttttcacactctgggtccctgtctgaacagaggacttttatttgtcaatacagataattcctctgggtgtaatcttagcctatactttaatttcaactttaagaattttgtttttctgagagctacaaccatggcacatcttatccaacaggagccattcctactcattcatttaatacaaacgcgtaagaccaaaatcagtgtgttaggtgaagtcattccttgtgaggaaaagtaaatgcctctgataaaataatgtttcaccctcctgcatcatcataattaagaagataaaatgtattcaaacagaagacttaaataccaatattaggtggcatgggattgagtacagaaatagcaatgaaggaagagggcagtacaggccagaaaaaatcaaggaaaaagaaggctttgaataagaactgcacagagtgactttgagttgcagtaaccttatgtgggttaactggttttgcgttttttggctgtgttgatggagttgaaagaatcagccctttttacttgagtactttaaatttttgtgcattatctttaggctatggttcttgatgttgaaagaaatatgatgtcttcgaggcttttctctaggatgccaaagagtggcaccttgggtataggaaaagagcatgtgttaggtctgctggagtgtgtgtaatagaggtagatggagctggagtgtattgattctttatttcttgtcagtccttggcatgcattattgacagtggagattgaatactttgaagttggtaaaagtcaccatcaagaaactgtgttgctttgagtttgcaggaataactgaggagagaaagacaaaccccttgctgtgctctgcctacccctgggctttttgtgcactggattatgaaaagtgatagaagactggaactttttatggtaaatatctaaagggaaaactttgtccctatagtaacccttttagcaaatatggttgtcatgttcctgctgcatatgactgggactgtgctgagctcaaacgaggtgatcagttattatcaacatataaccagctaatggatgagcaaatatttaaggaaacaaaataattatcaagatcttgacttcttatattcttggaaaggtagagtaattgatagaaacctgagtgtgcctgcaccacccacacaccctgcccagcttggttgatctggatggaactttagaagacgttctttatgattaacctgtggctgtattattggactcctccttaccaattgtctacctttgctatctatttctgaatatagaggtaaaagagggtgtacagtaaagctttgttatttattggctgtggtggggaggggaaataaggattatcataacactcaattagagttacatcctgttcagggcagttctccaagtgctccctctgctccaaacttagtgataatttaggcttataaagcaaagagacattattaaaaatacatcaagtttcatcattgacacttcctaccctttgacaaatacttccctgtttcccctactccccagcccctgcagtttcccattcctactctctgcttctaggagtttgactattttagatttaccatataggtggtatcatgtagcagttgtcctttatatctggcttatttcagttagcatgatattctccaggtttatccatgctgttgcaaatggcaggagttccttctttttcaaggctgggttatatatatatatatatatatatatatttatttatttatttatttacttatttatattatatattatatatatttatattatacaatatatatttatgccaatagatatacagtgtgtgtatatatataattataccagtatatatgtataattataccagtatatataccagtatatagatggtgtgtatatatagttatactatatattatgcatagtataatcatatactatataattatatagtatgtaaaaatatattatattattatatagtatactatatattatttatgctgtgatatatattatgataagtatatattatatatgtatcacagtatatataagaaaatatatattagaaaatgtgatacagtatatataagaaaatgtgatacagtatatataagaaaatgtgatactatatatatatatataagaaaatgtgacactgtacatatatataagaaaatgtgatactgtgtgtagatatatctatatctatatctatatatccattcatctgtcgtggacatttaagttgcctccatgtcttaaactattgtaaataatgctgcagtgaacatgggagcacaaatatctctttaagagctggttttcaattcctttgaatatttacccagaggtgggattgctgaatcatatggtaattctgtttttaattttttgaggagtatctatactgttttccataatggctgaaccaatttatattcccatcaatagtgttaaagggttgcccggccgggcgcggtggctcacgcctgtaatcccagcactttgggaggccgaggcgggtggatcacgaggtcaggagatcaagaccatcctggctaacatggtgaaagccccgtctctactaaaaatacgaaaaattggccgggcatggtggcaggcgcctgtagtcccagctacttgggaggctgaggcaggagaatggcgtgaacccgggaggcggagcttgcagtgagccgagatcgcgccactgcactccatcctgggcgacagagtgagactccgcctaaaaaaaaaaaaaaaaaaaaaaaaagggttgccctttctccacatcctcctcaaaacttgttttcttctgttttcttcatagtagccatcctaacacatggtaggtgatatctcagtgtggttttgatttgtatttccatgatgattaatgatgctgggcaccttgtcatataccagttttccatttgtatgtcttctttggagaaatatctattcagttcctttgttcatttttaaatcaggttgttatggtttttgcttgttttgctgttgagtaataggagttccttatgtattttggatattaaccctttatcagatatatggtttgctaatattttcttccattccaaagatagccttcttgttttcttgttttctttgctgcacagaagctttttagtctgatataatttgacttatctatttttgcttctgttgcctgtgctttattgtcatatacatggaaaccatttccaatgtgtttgtggcatggatcatagtaatggtttcatgggtgtatactcatctccaagctcaccaagttgtatatattaaagttgtgcagctttttggatgtcagttatacctcaataaagtggttttgaaaatgcaccaacaaaaacagcatgaattgtacatagtataattctagaaatcttagaacccactgcctgaatgccgtctagaatcctagcaagtctaccttctgtatttcattaggctgtggtctcagatcccgaaccagactgaagacacatagaaacatctgaacatctgaaatctgtactgtctcttcagtggattctaagctgcctcagctttaataaaggtctttaagtaactctacttagtagagactctccatcacttagaagaatggtggccagaggcatgtcaaagtcagaatattaggtatggtttaccaaggtgaaaaggaacggtgtggtgctcggagttttctggtccaagcatttgttgggtcaatgaataagagcagggcttacctcttgccttgctatgtttaaattcattgatattgagagacagtccagggttggatagacaaatcgatcttatctgaaattctgattcctattgattggtagaagctgcctaagatgttgagttaagaagattataatgtcatgacatctggactcagtacaaagaagagttatcacaactgaagagtgtatgctacggggaagaaagtgatggagagagagagagagagagagagttagatgataggctatattatatatacataccttttagatacaaatatactgtattatcaaaatcatatatgcacttttaatattgagagtgtcactgttagggtgaaactgcaccatatagatggcagatactgtctacttgcccaccaaattattccctttcttctcaggcaaacaaggcaactggactacaatttcatcctctcttgaagctagacagggccatattcctgagttctagccaatgagatatgtagaaatggcattcctcacttgcagacatggaaaataaatctttccacatgtgagtcccagttctatttctccattcactggcagaagggatggagaggacttgggtagaggaccgaggagagggcagccacaaggaggagcctgagtccctgaatgactgtttggatttgaggcctccccgccagcctctccccctctgcctgccaacctgcattgtcatacagtgaaaaagaactatgcttttaccgtacagtgccacagaattggagttgtttgctctaactgactaatactatatatgttaaagttttttttataaaaacataaagcacaatgggagtatataagagattgtaattataaggtagcaaaaacaccatttctctttctatacaaacctatattgttatgtgtgctaagaagtctccccaaagcattctttcccttttatgaaatgggcgagtctagcacttccctcccctctgcatatatcacacagatgcctcaaactgtctatccaatacagtcctacctcataatgactgtcagcatctaaatccaagtatagtcacagaaactatgccagagctctggaggaagtctcagtggtgggcagacaggggacacttctcccccaccgccccatctgcagctgcgtgcatcctccactgcatcagtttcctgctttgtagtcctgtcttttccaagctgagttcactgcgtggtcttctcttatccccgggttatttgatcttttactctaattttctcaccagcacttttctatttagtttttatagaatttatttctccttccctacatgtaattttttgtatctatcttatttgaatttcatttcatgtaatccctccagtgcatccaggccattttggattctaaacgtgttgtctcttccctgacagctgggtattcagtgtagagtacaaatatatacttagctctaatgtccacaacacttataacagtaaaactagagtgaaagtcagaagaagagatggtggcggtccagaagcccagtccaactggtctttgctcttgcaacagggcagcaggagtgaatggagaactgacatttaggacaggttctctgtctctttctcaggacagctttgtctctgtatatcgtactcaatctcccctctcttcagacccacattccttgaccacacgaaagaacatggctgttgacaccccaaagttttacaccttgtctcttcaagaaaatggctcttttaggagtggttcaaaaaatgagagagaaaccaaaagcgagagtgagagtgagagagtgtgggaggaaaggcaagaatgagagagagaaagagagagagggggagagaggaagactctttttggtttaacttgatcaaccatctacatttggtctaaaaaattctagaaaagagagcagagttttggagtaaaaatgaggctgttgggatctcgaacttctggataagttgaggggaatcattataaatcaggcaccacccccaaaagatctactggtgatggtagtagagaaattaaaaggtagataaacaaaggaagaaaaagaagtaatgatttaacttcctttgaacataaaatttaccagtaacaatcactctttgagaagaagcatgttgttaacatattctgttgggttctgtttgactctgtggtggtatgtgtgtgtatacatatgtacacacacatacaggtatacacatgcatacacacacacatattcagtgaatacatactatttgacatgaattacaccaggtactaaagtagcccttatttttaagtgactttcgatttcatgggggaaaaaaacaacaacacacaaacagagaagtcacattcttatatctgctgggcagaggagccctgggagcacttaagtaacctaggaaaggagaatgacagaaagtcttcccagaggaacaagtgcctgagctgactgtgaaaggctgaacaggaaggagccagatgaacgacaagagagcagaacattcaagacagaagggataatgtgaatgaaggtgtgacaatgagaaatagtatggtgtcttctggaaagggtcagcccagacttgccatgacataaattaggaagtaaaactaggaaagcagtagggaaagatgaaagggcagatttcaaagagcctttttgggcaggttaataaatccagacattaacctgagggcattgggaaaccactgaaaggttttaagcaaaggaatgacacagtcaagcttgtatctactacagatcactgtggtatgacagaaatgcacaaaacgggtttaagatgaagacaagctgggagacagggagactagttgagtagttactgcggtaatctagggcaaagatgatggagagctaactaaagcagaaatagtaacaatacagctatctattattcatgaattcaacaagtagtcattaacatgtcttctgtgtcctacactgtgctaagcattttacatgaatcatcttactgaatccccagaggcctatgaagccaggtactggaattgttggtgagaaaaatggggctcagagggctgaattacctggccaaaggttcaaaactaacaaggaacaaaggcagtattcaaatccaagtctgacaacaaactttagtaatcaaccaccaatccaataataatagctataagcaggaaggaatacaggttaaaaatacatagatgaaattagccaggctaggtgattgactaacttccgggaatatgggagaagaaggcaccaaggataattctcatatatcgagtatgggtgtctgggatagtaagtgcagaaaaactgttttaaatgtttgacattcattccaattcactgcaccaccaggaaagtcagtcatctggcaacatcgctagcccactggcccttccacattctgcagctagtcaatcttcccatccttttcggcctggacccctgggccaatatttccagcaatctgctttacagtgacttcagtctctttgtcccctggcctttcacaatgcccaccttgccaatcacatcccttacatcaaacccactgtttatctgtgccagcttctgggcagccattcagtgatatctgtaaaattcagccaggtactggtgcttttgctcaatcatctcttttccttcttctcccatcagtcccccttcctgttttgcactgcgctcatctccttagacccaaccagccacctgttctttgcagtgtgcctttgaataccaaggtcatgcaagttgaggtctctctacatgtttctctatctttacccatttttctctcttcactcttctttcagagtaacactcttatttcagagtaacttatttcagagtaacttgccaccaactgaaccttgatctatcaattgtgtgcaaattatttttaatacattgcttaaaatttactcatggtacaaattcaaacttatttttaatccttatcatatctatgaaaaatactgtctttgttagcagagcattcatcatcctaaaataaactatgagaagggctagactttcctcatctttatctcaggacaggatgaagtaggttaagctccaatcaactcgatcttaattagcccccaaatgatgctttacttccatttctaaagccttagttagtgaattactggataaaaaataagtttaataagtaaagaaaggcaaaagtcatgaatatctctacaaatgaggtattttagtgtatattccattaacaagttttaagatgtcatcaattgtaagatattttttaaataagaggatttgggggaaaattaaaagtacaaatgtcaatttaaaccagatttcagaaatatgaatatgaaaatgtgagaaaaacaaactggatcttataattaagacaacacagcaagttttccccctagaattatgtttctgtctgtctagtatgtagctgtctaacttggtcattttacaaaattcctattcatgccacaatcccctttgttaaaaagttttgcttcattttttgttttatagggaagaactatctgagacacctggtaaccatttctttcttagtttagaaattggttttgtggtactattactcaataatcctattcagaaatataagcatagcttcagtaaaggttgaaatatcaaaaggaaagaaaagcctataactgagggagcttttttgaatatggaataaaacatgaatctagacattagaaaattggaacatatttttccatgttctaccccagtagaagtttagagaagaaaagagttaacttgctctaaaatgcagtatatttctttcggcaaacacccatatgtgttagtgtgtgcatgtttttcttattaggtgaaaaaatcatgctaggtctggattttagcatcttcttgctagaagcaactgattgtacctatcaagcccaagacagagcccagacaaaagtattttcctgcctggtgggctcacagtttgtgcagctttatgtatgtatgaacatccattcatatatgtgtatacatatgtgcgtgtgtatagtgtgtatacacatgtatatttttaatgacattttggaaaggatacaatagtgtttgtattttgcagtgagtgcgccagttcataatctatgtttattagaatgaactaaattccttgagcctctgccatttttcctaccccctacgaagattctgttttcccctcttctaaaatataacactggagagaagtgccaaatcaacagcccagaaatcgggaagctccttttttaattcccatcctgtagtactccccttggatttctgtgccaaagctggctgagagcgctctcacttcagcttcctatttaacttggctggtactatcttcctggtgaatcatttcacgaatttgggcatgggtactgatctcatacatcaaacacacaagtacatacatacaatgcacacacacaaactcaggaacacctccatgaatgctgaccacatgcacttgcatatgcaagcatcaggcatgcgcacacccccaccaccacattcatgtgcatatgcagacatgcacatacatgtgcacctccatgctcacatacatgcgcacatgcaagcacaggcatacatgcatacatgtgtttatacacatatgcacacaatttggtgagcacacatgcacgtacatgcatatgcatattcatgtacaacacacacttatactcgtgcgtacgtgcacacacatacacacgtagacctgatgccctttttctctttagcacctaaaatttttcctctgctcccattttctcatttcccttttccccttcagcattcccaatattgacatgcttgaggttattatatagttcatcattgttcagaatatgctatctctactcacaaggtctggatttatctttccacaagaccattgaacagtcctgtgtgccagctatggaagttttcataacctgcctgaatagaagaaacatcaaatcactgaagcttaaccctaaagaagtgagggtcacctcagccttgccttctgactcaggctgttcatgttgtaataagtgagggacatggaattgagcacttcacaaagccttctttatagccaggagtgtgatcacaagtagggatttccatgtatttcctgacacatttccctcttactttgttgtgaagggatcttgattttcatgttctagcacttcccccatggtgcggttttctttgcactagactgaagaaagagagttttaagttgcttcttctgcaagggcaagaagtcgcatggattggggagtgggtttacccttccctatagatcttatctctgctctttcttctgttgtttcgtgcattgagaatggcattgttgggtctgatgtctgctaagtctctagaaaatactggaaacaagagcaaggggaaggtggcatctcttagctgaattacccaagtccattgaatcctgccttcttgttttgcatgcacctgggcttcccaagcctctgagctcaggattttccaacctgctagcgtatggcccaacaaaccaatggcatggaagcccttgaacaataaacaaataataggaattggcttttctaagaaaatcagacaaataaaagaaacaaatttactgaaaggatttattagccagacttaagaaatgtcgaccagcaccaatcctatgaggttcttaggatattttccctgtcttttgcttatcactccaacccagaccctgtgccaaaactcattaccactggggctatctcgacagccccacactgtagcatttctccccaggattggtggggcctggaaacgcatcataggtgaggaaatggcttccaaatgttagcttagaagggctgaactactgatgtagataattaattgaaaaccttctacccatttctttttttctttttaggttctttaaatggaatactctctctttcttgttgatagaacttaagagtatctactttatactgattttagtgtgaggctcaaaggatgccaagaaacacaggacatagcttctgacctcaaaaatctcttggtcttggaaggaagaggcagataaattagtattatggcttatctggagtacataatcaatggacaatgattgggaaggctcaagcaaagatcccaagagggaagctgtgttgacatgataggccagaggagatagattttaaattatgtgttaggagaaagagtacagttagttacaataatctaaaattcaagcaggggagaaaatatctacaaaaaaatagtgaacacctggtttctttgaggatttcttaagaagtcttcagctggaggcaggtggcatgggctacggtagaggcccagatgaaggggctatagaggccatgacaacccgttaatccaaaatgagccattgaagggtttaaagcactggaattaaaatatcattttcaattgttttaacccctgggatgttttgattttatggttatgaacaaagatatgttcaacagaattctaccaaggttgataaattattattgagacaggatttcctagggacaataagactaagccaatttaattgctcaatcggtttcatatacctttccatatagtgtcatttatgcagagtaaatgataaggtcacattttctttagagtcaaaatgacagatgaaaaagttcacgtagcagagtggtgggttcaaaacttgcctctttggattctcattttatatagaacatgcaagcttctgaatacgaaatatattcccactgcattctactatttttcagtttgaggattcagctattttagaagtttccgttattagggattaaacaaattatatttttttaagcgactgaacatgttttaaataggatttttatgaagaggaaaagtagaagtccagcaattaggcacactttatttgctgccatcgctctgaaagtggtggagtttggagtgaaggtataatccttgcagccattgcacagacccacaggcgtctgccagtgtgtgccaggagcccgaggctcttcaaggccatggaggagcatggccccccattcagcccacattaactctggagtgcagaaaagtgacgaggtcctttgtagtggaaacagtaactcctgtcacgaaggcttgaaaacaagtcacttgggtgttgatgatgactggaaaactgtattttgaaggatcccaaggtatctctttaacattcatgccttctcccacaatctgctagtctgccgacttcagctttcatctcctggaataccacccagttctcgctgttgcatcgtatctgtgaaatgtgcatcattcccctgcctttcatctgagagtttataccaagattcaagttttcatcggcagtgggttcatgtcagttagaattaatggcagtttcactcattggcttttattgttaatatttacataccttccagattgtggcttttgggtagggaggccaatggaatgcaaaatgagccaaagtcaagaagcacagagctttgctcctttccttgaaaaaaaagttgcattttatttgtttttaataaataaaatgagctttacagcttccagtaaaatagccaaaaataaaatagaagactgttttatgcaagtcttaggaatccaaatgaatactaagcagtggtatttgggagctgggtaaaaactttctgacacaagcattactatgcctataatacagaaatccgaagggaaaaaaaatcagtttcaagtcttttttataactttattttcaagtgactaaaatttacataaagccatctttactcaactttgggtctttttttatattttattttattttattttattttattttattttattttattttattttattttattctattctattctattttattttattttatttttgagacagtcttgctctgttgcctagactgctggagtggagtgcagtggtgcaatctcagctcactgcaaccttcacctcctgtatccaagtgctcagcctccctggtagctgggactacaggcacacactaccacacctggctaattttttgtatgtttagtagaaatggggtttcaccatgttggccaggctggcctcgaactcctggcctcaagtgatctgcccacctcagcctcccaaagtgctaggattacagatgtcagctaccatgcccggccaactttggtcctttctagcactaccaagaccactctatcctgctttcctgaccttggcattcaattaagtattttgaatgcttcatcctcaactatgaactgaccctcccgctacccgcctcactttaagttctcaaaatgagatgacttagaagtaggttggacatgttctcaagtatcctaaaataacctgggttgtatgtgaaagattcgatggacataggcacctcatactctgaacactttgcctccttgaatgcttattaacttttgctaggatgctatactttttataccatccatctcttctgaaattttattaatttcagaataaaaaaattaattaattttttttggcttcttgagtaagtgttttccctttctggttgaaggacttatagcaaaggaattgagcatgacctttggaatcagctcttcaatacaatcaaagctgcatcgagaggctgtgtgcccttggtttacctttctgagcctctgtttttgaatctgcaaagcgggattgattaaaataaatacagactgtaacctctgtggggtagaaactgtatctgtttgctcacaggtgttattccagaggaaatgcttgggcaagcagaactttgtctaaaataccacagtgtacttcctgttggaattcgaagttggtagttctacctttgtcaaataccctgacttctcttttgagattttcacactgctaattcccaaaggagatttattttaaataggtgatctttgaaggtctctgctgttctgaaagtctgaatatctagcatgcatatatgaattggattttagctgtactgtcattgttatttccggaatcaaagggacttactggcttcctgcaacatgacttggggaactccaactccttttgcaaagtcaagctcgggggatctatcacccaatttatttttgtataaatgtttttccatgtcttcctaattgactccactccccatcctgttgctgtggaactggccctgctccgaggacctcacctgaagctgtgtggtgtagaaaggatgtgctgggcttattgtctgacaaattgggtcctgttttggggccactcacagaagagctggtgaccagggcaagttacaacttccctgtagctcagtgtctgcatctctaaaacagggtaatcaccactgtcctctctgcctccctggagacaatgtacgtgaaagcagtgtgaaaaatctcctgggatgaacaagttcaggatgagccattggtagtattgaaaagcacagatcctacagaaccctctgggactaaagggggccaaagtcaaatacatagttcaaaacaggttaagtgagtcttgatatctgaattattttatccattgtatagtggaaagaatatgggttttgaggtcatattatagatcgggattcatacaaattaaaaataagccaatttctaagcacaacaaagcaggcttcagttaagaaagtccagtttgagtcaatagtttgggttggatttttttttttcttttcttaagaatttaccggttcggtgatctctgacatatcatttaacctctctgagcctcagtttccttatcagcacaatgatgatactactgcccatttttcagcttcttatgtgtgaattagagagaaaatatataaagcactgagcatagtcctgaagacacacatgcccaaaagacatatttattattgtttctagtttttatgtttttcaggtatacaactaaacctgatgttgaactcaatccatatgttaataatgctttttttaggtatgaagcattattctgcatttatatgcaaataaagacaaaaagatgtctacccataaaagcaaagacaggttgggaatgtagttaaagtagatgagaagaaggaaattctttgtcaaattgaagattccattcctattaaaaacacgcataacttacgagctaaatttcaggatggaaacactttttgaaatggattggcctacatacttgtgaagactccgcgggaccaagtcctgttcttctgtcaatacccatggtttcaataacatagcacagaggactagagagagaaggcagttctttggtgacaagaattgagattttaggacaacactaggatgtgagaaaaattcctaagggtttgagttcagagatcctggagaccagaaggaagcttcgaacagctggagtggggtttccacaggaaaagatgtgtttctaaggaggtaaaaggtgaagtgcatgtttgatgaactgagaatgagtgcagaatgacaggcaattaatagcctaagctgtggaagaagttcgagttaggactaatggacagaagaaagtaaaatctaaataaccagaatattggcaataaagtacatgcgagagagtcttctgcagaactgagcagatcctccagaacagtggttctcaaccagtggcgattttgccacctcaaggaatgttgccctgtctggtgatgtttttgttttgtacacgtgggtgagtgctactagcatctagtggatagaatccagggatgctgctgaacatcctgaaatgtacaagtcaacaccctcccaccacccccaacaaataattacctggcccaggtgtcaaaagcacacaggttgagaacccttgctgtagaatggcatattccaaactgcactccactgcatgcaaaggataataacacattttctgtgggttaaaaagaggggggggcttggggaagggaggttctaagatccaataaactgaggaagctctgtgtctaataaacagatttctttattatagaatgattctgagtacttaaaaacaaaaagcatttccaaaaacaattttctaagaaataactttgaagttacaagtgttccacaaaacacgggacaggaaacactgatctagtatttcatattaattagtttttgatagaatattactaattacctacttgaaaaagagtagacatatttgacattaaattgttaaaaataaacaaacagttaaacataaaacctagccatgcatatgaaaaaaatatgaaagcacacaaagattgcatactgacagagaatgcatcatccggatagtccaggcagtgatgaaaccaacggatgttccagtacatacttcccttctaccatctgtagcactaagaatgacaagagtctgatgtctcatcaatatgccgggatgctaatacaaccttttccttagtaggcactctatatttgaatttattgtagatacttaagtgattctccccacccctgtttgtaagtgagtagttatagcagatgctcacatcagattgctgtgtttgtaaaaggattctattcatttgcatgtttttctctgaaatattgcatttatttatttcagtgcatcttcttagaagatgtattcaatagggagcaagaataatatatactcgtggttgaatgcgagaccataatttaaatagaggtattggactgacatcagagatttgagtgaaagtggaagcccagaggaaggaaggggacaatttattattgtttacatattacactgcagctttagattcccttagttactacttgaatgtaaaatgtattactcagaagaggatctggaatgaactctatgcagaagacgaagttgggtgggtgttgtgctggaatgaaagctgcagtcgtctttgcagatgccagtgtactgggaaataggcatgtgtatttagcataataaagtcctgcattctcattgcccaatcacttaattttctaaaagaaaacttatatcctatctctcttttgatcctacttactacaatattaagggatttaacagccttaagaccttttgtccttcaatcattcattagtttgatgttatacctaatccccatttccatttgcagagaagtcagtgaatagaatcagctaccattattaaacaggttttaaaaaacgtaccacatcacttgaaaaaaaaaatgatgaggattttttggagtggtttaattttgtatctaatgcaactaaaaaccttacatattctttttttctattgctgtcataacagattaccaccaacagacgcttaagcgaacacacattgattatcctacggttctataggtaaaagatccgactggatttccactgggctaaaatcaaggtgttagttgggtttcgtctctttctggagcacatagcaaagattctttcttcgcttggattcctgcttcaagaggctgtttccattccttggttcatggccccttccttcatcttcaaagccagaagtgtagcctctctttgagcctgctttagttgtcacatttccctctgaccacagccaggaaaatttccccacttagaaggacatgtggatgagttcaaactcacttggataatccaaaatattctccccacctcagggctcttaaccttaatcacatctggaaagtcccttttgctatgtaaagtaacatattcccaagtcctaggcattaggacatagacattgttgggaattcatgattctgcccaccgtgctttatttccttccatttccaatgcgatttgacagaaattccaaatgattccccccaaaatcagaaaaacctatttcaaagtgttttataacacattagctgttacttctttagctttgaagtgaaattaacccagacgtgaaatcctcagctctgtttccttcccactcatgctgtagaaataaacctcccaaagatgctgagtaggctctgtcccagggccaatgatggctggtggaggttggtgggacatctcccctctccacttccagctataaatccccatgtgtcacccaaagcctgcatggctcacttagagaagctcaactgagtgacttctgcctcccctcaggcactgactcctacaagcagacaattactggtgtcagcaagcatgtgcctgtggctcgctgcatgattagccgttaatatttggttttgaactccatcagagataagctgttcttgcagcatatcaaaccaggcaatctaatgcaaaggatgctatggtcagaataaagagttgctcattttccaagagataagtaggtagatagattgatagatagataaatagatagatggatacatagatataggtagagatacagctatagatttagatacagatacagatatagatatatagaaatagagattttttaatagactagtttttagaattcacggattcttgttgagggtgaaaaagaaaaagggatacagatcatgacgtcaggagatcgagaccatcctggccaacatggtgaaaccccatctctactaaaaatacaaaaattagctgggcgtggaggtgcacgcctgtagtcccagctactaggcaggcagctgaggcaggataattgcttgaacccgggacaaggagactgcagtgagccgagattgcgccactgcactccagcctggccatagagtgagactctgtctcaaaaaacaaaacaaaacaaaacaaacaaaaaaaaacaacttttgagctaagttctcaaatatgtttctacttcaattttaggtctctttctcctaaatatcagaaaatgtctttgtccaatatgagtagtcacggagaaatgaggcagtttattggtagtgagagtgtgatgaggcaaccaactacaaaaaccctctttggagctagaatgatagtgttagatttctatatccctcaaggactttaacattataaccactatgtctgtcattaaatacacctgaggttgtgtattcagtgattataaccctattggcatgcttttaaaaaaattaaggctattttttagtctgtgcctgaaaaccacatttttaggtcccactgttggctaaggaaagagttaggagttcattctttgcccaaggtgctgggcttattttattaaaacatccttgcatggtgactttccttatattcaaagttcattccagacgcccagcctgatttggcccctgagtcctcatctagtgccactctctcccttgctcactcttgtgcagtcatgttgggctttttctgtttctggaatgtaccgaattctccagtctccccacccttgcacttgaggctaggtcttttcccggctcctccttcattcataagtgcattctcagcaaaaccgccagagggcgcctgacacgtgagctctgatctgtcttcaatggcctcccatttcactcgagatacaagccaaggctcttatatctagcaggaaggctgtccaccatttgaactcagtttcttctctgacctcctcttctgcctactttcttttggttgcacccctggacttcgctgtgtgcctcaaatatgctggatatgctcccacctcaagacctctgctgctgctgttccctgtcctaatagtcttcctcttagtgtacacaaggctccctccctctcttcctgcatcctactgcagtttcaggttctagaccaagcatgtagtaggtgctcaagtaaatatctattgaatgaatgaacgaaagcaggcattactgttcatggagccctttctgacaaccctttatttagcaaaatgggatttgcactctgctaaggaacgtgaatctaatgtaaaagatggtgtcccagaaggctgtgaactttagtgttcagacacactgaggtataaatatatgagttccacagcccttctgactttctgtgcagctgacagtacctgtttgatgagaattaagtttcctgggtactctgtaatttaaccaggacaattgttgcagtgagaccagagattgtttcttttgcttttgcccattcttgtcttatatatctcattgcatcttatatcagtacaatattggtaaatactagcacaaatagcaaactttctatgtagtacacccgttaggcctcagtgtgacttgccttcctctccaacagcagccttgtaaatggttttggaaaagacaatctgtggataaattactagttttttttttttttcccatgtacttactgtgtgactttgggcaagtttcttaatgtctctgaatctcttcatgtataaaacagggttttaaaaaattctacttcatgaagtcctcatgtattcatttaataaatatttcattgagcacttactatggttgaggcattatttaggtgctagggaaagagggatgtacaggacaaataagatgcccaactttcattctattgggtggagggaaggagggaagacagtagagtaggaaggagatgacgaattcagtaaggtatttttcatgagtgatgagtgttatcaaagaaataggcccagggaaatgaaatagaaagggaagagataggaacaccacttcaggttgagttatcagagaagacttcatttctttgtggctgagatctaaatgctgagaagaaaccaaacacacaaagatcctagggtataatgttccaggcaagggtaaaagtaaagttcaaagaccctgagacggacagtagcttgatggtttggggaacagaaggaagactgtcgagcccgcagtcgtagtgagagtggtattaagggagctcagagacataagcacaggctggattacggcaggtaagctctgcaaaaagtttctggcagaaatcatcttaccactcttcctggcacctcataattatctaataaatttaaatgtcctttcttttccaaatttcaattttctaattagaagaaggattatatttattctccattaaaataaagggtatgagcaaagttatgttcaaatagtttggtatgcttgtgctaatttacatttgtcaccaatcatgattttaattaaatacatgggaaatggattcttattaaaattcaataaattttttttttaccccaaatgtggtcaagtgttttcccctggatttatgtaagcataactcctatgatatggtgtaaaatgaatcacactttttttttaaagatgcttttgtttgagtatcttcaagaaaaatctgttgtgagaaagatcctaaacatatgtatgtatagatgcatatctttgaaagcctatgtgaataccaagggaatctgaactttttctttggagatgtttacataataaatctattttcatcaatctggcatatttttctcctagcactgacttactgaatgccgctgaccacgtgctgcctctcatgctaaatgcttacttaattcatcaccaaattctgtagactgtacaggctaaacacctctaatgcatttacttattttcatcctcactgtccatcacactccctccctccctgtttctgcaacagcttcccaattggatctttttaaatgcaaattggatcctgtgttctttactttaaaatatttgtatggctcgccagtgccctgagtggtttaggggttcttagcttttatcccttatttacttttctaagtgcatctgttaccacttcctacaggtcagggtcacgcttaagctcctcccatcctcaaagaagccttactctctcgctttgccttgtcccttttgcctgaaatccccttcctctactctactttagcccctccaccattaccagactaatctctactcatccattaaggcccgcttcagccctctcccaagggctgcactccacaaaccccgcccccacatgtctagttattagcacttcgctgtgcttacacaccttctagaggtatcagaattatcacaccccattgttaggactggctgcctagccatcccactagattgtcagatggtaggggcaggcatcatgactatggggttcctcttaaatcccagtgctgggcacgctgcacggcatagagcaagtactcaagaaatgtttcttgaatttaaaaggtgcctttaaatcaaatgcctctgaaaagggagttgataatgctcctcattacctgaagtttagcttcatgatctatggtcaaaaacatccagtttggtcctacctgtggaagcatattgactgcccttaactcaagcccttaactctctaatttcactgatttctataatagaaagaagtattattattacattgtttatcatggagctaaagtttagtttttgcatgtgaataggcgaggccccttctcacccctttccttaccttcctttttatttatttacttatttattatttttagagacagggtcttactctgtggccaggctagagtgcagtggcatgatcattgctcactgtagacttggcctcccaatctcaagcgatcttcctgcctcagcctgccaagtagctgggactacaggcatgcaccaccacacctagctaacttttttattttttgtagtgatggggtctcattatgttaaccaggctgatattgaactcctggcctcaaaggatcctcttgctttggcctcccaaaatgctgagattgtagacatgagccactatgctgggcccccttttcttattcttagcaggagcattccaaactctggaaatctatgcccaaaccgttgctttcattccacgagcttgctaatggccacagatgcctgcaacattcctcaactcccctagctttcagttttatcctgtaaaattgattgctttgaatttctattgttagtaattaattgaaagaataagtcttcatgataggtcaataaatatgttttatggatgaaatcccagcagtgcaaatgcaaaacttgtgtgttttaaattttaaatggttaccaaaatgaagcctccaactctactcaaactacagcttgcaaaatcagtaatgaatccattaatttctttttttttttttttttttttttgagatggagtcttgctctgttgcccaggctggagtgcagtggcgtgatcttggctcactgcaagctccatctcccgggttcatgccattctcctgcctcagcctcccgagttgctgggactacaggtgcccgccaccacgcccggctaattttgttttgtaattttagtagagacggggtttcaccgtgttagccaggatggtctcgatcccctgacctcgtgatcctcccgcctcagcctcccagggtgctgggattacaggcgtgagccaccgtgcccggccatccgttaatttcttgacattgtttttcacatgccttgtgtcagctcccctaggcatctactgagtcccacctaaaacaaagactactccatacatctgcaatttttcagctgaggtagagaaatggagaagcttactactgttgtaacgtagatatatttgttcatgttcaccttgatctacttttcgacatcactggccaaggtttaaatttagattcatctaacattttgtgtgcacacattgtgctaagaacactgctagatactttacatgtattttatctgtaaatattcaaactccaggaaaaagttatttatttactacagcaccattatgcagatgaagatattgaggcccagaaaggtttaaatgtttatttaatgccacacagctgttaagaattcaaatctaagttattgtaactccagtacaaactctttcctttatattgtgctaccaaataaatcccagggaccctttgcccttttgggataaatattaccattatttttctggtctttgtgtctcattgggaacttgctgtgagatcctgagagtgtcgcttagcttatgcaggtgtgacttacagcctgtgtcaacaatctggccccaagtaacatgccaggtaacagtttcaagcctgggttacttgaaaagaaggctgagtaggttggtgggaactgggaccagtcttatgatggaggaatatgctgttgctattcttgaaattcttttcctccaccccacttcatcccctaccccttgttgttggcaagatttatcttcaggtatccagggaagatgaactcaagctacctctcctccttcccttcattttgtctaggtcctcagtcctgcctacacacaagtattagataagtctccctaattttaaatggaatggctggccaggcatgatggctcacgcctgtaatcccagcactttgggcgtctgaggtgagaggatcccttgaggccaggaattcgagactggcctgagcaacattgggagacctcgtctctactaaaaaataaaaaataaaaaaaattaacggcatggtggtgcgtgcctatggtcccaactactcaggaggcaggaggattacttgagccccagaggtctaggctgcagtgagctatgattgcaccactgcactccagcctgggtgacagtgaaaccctgtcaaaataaataaataaatgaatgaatgaatgaatgaatgaatgaaatagaaagagtggctgagggagtatgtgtttcattctgtgttttatctacagctcgagaagcctggaactctgtggtcctgcacctccccctacaccccccaacaaaaattagcctccaatcagctcctggagacaatgttggtgggaaccacaagggttcctgggcatgcccaatctctggcactgaagaggagattcaatcaaaataaatgtatgctgtcgaggccaggctggccatatgttcctgccaggcagttgtcaggaggagatatttgttacattcaaatgtggacacaagctcctacgaaggcaaacacttgtcatttaaagggacatctgaatatggcagcatgtttccagtgataacccaatttcattttacagccttttccttccctttctcttgggctctgggcctccttaccaacacatcctgttggccagcctgctctatcacagcagtatagttgaaaacctaggcacagctttctacccataagtagctttgtaatattcctaggaggaacttcctttctcccttcctctcccacattgcctctttgtccagatgttaacgtggaagcatattgactgcctactttcaagcccttaactctctaatttcactgatttctgtaatagaaagagctattattattaagtttttatcacagagctaaagtttagtttttgcaagtgaatagaccactattctccttcctgtgttagtaactgctttttaaagctcttgtgttctattaaaataacaatataaaattatgtaaatgtgctaattgctttattgaaattaatacccttatttagcaagttaaaccttgcaaaatgaccatttttattaaaaattatggaagcatgctggctgtttaaaggctaatgtaattgggtgaactcagcaactgggaaatgtcaattaatgagagattgttaaatagtattgtttaaacaatcaattttctcttgcagtttggaaaatggtcctgataaagtaatagtgactatctaaggcctgaaggaaggtttgtgagtattttttcccatctggtttttagatctgttggattttcttctgggtgtgtcaaaattagatttgtttagtaatagaaatttgaacttggcagtttatagaaaatcaggatagttctcctctgtgaaggtcattttctagctggcaataaatggccacatgcaacctctgccaccagaccgtgagcacttgttgaaatagttggagacatctaattactttctcctgagatggtttgcctttttcttagaacaggattttgagactataaagagatctatctctctgctcttgatagttagaattattgcgtctccttgataagatattgagtatccttcttatgggtctgagtttttttagcttctctaccattggaaataacaataatgcttgccacgaaaccatctaaaaatccatcgtctttgcagtagccttcaaccggaactactgatagctgttcctgcagtgccgttgttctcattggagcatactacagaaacctatttatgaaaatatcttgtggtttccaaatagttgtaggaaagggaatttttggtcacttatgcaatttacagaattgaggtcagttgaggatgttgggatagttctgactggagctgtgaagacaaaggtatgagtaatactctagatctctaagctcatttccaattgtatattgtttgtgagtcattggctttgaaaaccagaggagaggcccacatttgagtttatctgtaaacacccgtttttggtgtcatccagcatttgaaagtaatagttgtaggtggtggatcatgtttaatttctagggctttttgtgaatagatgataaagtgctcctttattatatgataagacacagctctccactctccctcccactctactcccccgtcatcctggaactaaatcaccagagggtttaatctatttcaattttctttgttcacatcagagatgttttgggtttgttctgtggacttcttatgactaagagtattgattttattaatccaattgtttgtgaacaaaagctggctttttttattgctggaactgaaaattagtgacataaactctgatatcttaaaaggctaaactcacatttttccccagaggcatttaccaaactggctgttacatttatcctttcctctactaaatttatgcaacatgaactgcaggataataagcgtaccaatatacttaggttcctaagagtttcaacataatacttctcacagtgaaatcattggttcagttataagacactccatgcactattgaaatacgacctaggatgcacctagttttactctgatttctgtgtagatgtggatgcaaggattcttttgattgaaacatgtccttagtttccatgaacaaggcaacatacacctgatcattccacccttgaaagatgcaaataatctttcacgttttatattaaaacaccagataaaaaccccatgccagttgactaaaatgagtttctaccctccagacagttttttttttttttttagttctaaggaaaatagttcaattttagctgtatcaatagcgttttgagcgagatggaagatgttcgcctccgttacagagggaatttcaggcattgcattggagctgaaatttgctggcacctgctgagtgagatttttctggcctgtgctctgagaacatcttttatcaagtgcatgatcatttatccagctttttgagatctaaaccaggtcattctttgatctttatcttactctgaacttcctaatggttgaacccggtcagaagagggtgaatctcagtcctccagacccttcaggaagaaagtcatcctgttggtagtttagttttctttgtaacaaaagcattttttttttatttaacctattttatcacttgaaaatctactattttgtttctgccatcctagagtgtgtttggtctaattgaatctcttcatggactctgggtggtcactaaagcatcaatttctcagaggttttttttttttttttttgaaatatttaaggctatttgcttgcctccaaatggttccagactactgcatgtagtttttatgtctttctttggtagtatagccttctcatttgttgctttcatgctgttaccttgtcacaatgcctggcaaaaagtaggtgctcattaaatatttcttaaatgaatagatgatagtattttctcttccttttctaattgcctacttctaatttgttgatgttttggaaatcaagtaggcatacatgataatattgtgagcaaatcaagattaaacagtatataattgcgggctttaatcccttggaaagtaaaaagccaggacttattttgtgatactgatcttgtgacaactattttgactactaagaggtggcttttaaaacatgctttgtgctttggaactgagctctgaatccacaaaaactgaaatttttgaattccaattaggtgaggtatctttgtagttagttttccatccaatggtcattaccaacacctaagagtactcccagaagcaggctgtagaaaaatcactaggccattactgtgtttgtgcttattttaattagatttcttttagattttttaaagctgtccagggagaaaatgtgtcccttgtgaatgcaatgtccattatgtaaaacttaagtgcatcaggggctttggaaagtgtaaaatttatacttagggccctgtttagtcaatgtgatgagatttaagatcaattataggggaagaaaagaactggatacattattgtttttaagaaaacttaaaagatgataagtatgttttttgtctcactgccaaatggttgacagtttgcttttttgaattgcagtggagctttttgagatgttggtcagagccacttctgctactctcttattgtgttctggctagaagtgttgggaggacaagaaaatttctcattagtgacatgtagtgacacttcactttattgtgcacggatgattttctgacagagatagatgacatggttcaagtttccaagaaaatgttattccatcattgaatggggaagctctgaaccaatctttccgatttacaaacagaccatagatgtgccaaatatgacaaactgatactgaaatgtggagccttgaaattgaagatgtttccttgttcattgttgggtatataaggttacaggtaactgagtacattaaccatgccatgtgttcacttttcattaagtagtgacgtggatggtgcaaggtcgatagagaaaagtctccattagtctgaattttttgacactagatttttattttcctatcaggaaatatttttttctggagcagaaagggcaaaatagtttcctccattttctccaacaggagcatctcctcaataggattcctcagcttgactcgctggtgtcaaagagaaaggcatattcccaggcagtggcggagttgattggtcacctgctaccccttcccttctgtaacatccactaactcctcatctccttgccaatagtgcccactttctgtttgacatcaaggaactaaatatagttagttctgacagaatgtctagtcagtgctgtgtcagtaaatggttaataacaggcactgagggcctgagtgtggatctgcttgtaacatctgatgatttgatttccatggtgtaagtattctcactatgactaatttcaagccaccaaagtaacatcgaatgtgaaattaaaaagaaatactaacaactggctcccatgatcccataatactcaataccagcatactactacctctattccaaagctgctgttttacatacaagaaaactgtgatctaaaggagtgaagaggcttttctgagatcgcacaaacagggtaagacttgcgccagagtacctatccccaacttctgaagttagtttttaataagctgatgatctgatttacttatgtttacatatgtagctgctaactgaaacaaatttatttcttttaaacggaagggccccttaggttctttgcttaagaccagaaaactagccaatgtttcacaaagtcagtattttagactctgctgcccagtttctggacaagaatcccagtgtatcttaatggaagcggctatcatgtattgcgtatatatgtgccagtcactccatatgcatagtgccacagaacccacagggaaggcatcatctttctctccacattgcgtatgaggacactaaagttcagagatagaaacttacccaaggtcacgtctcatacgtactaaggagtgtagtgagatcttgaccccaggtttccttgacttcagataacactttgccttgcacttgctgcattgttctggagaggtcttatttccactatgtgctgatggactttggggattttctgtaatttaggaaatatttgtgggaaacaaattactgtaccaaatgaaaatgcagatggagcaagggtttgatgaacaggtaggtagctaatagtatccatggccctttggggttctgatcatagtttttagtattttccctgctacttcgtccctcatctcatctttgagatttggtaaagctaactgtgaggactcacctgagaggacccacatcttatctcaaaggtccttttaaaaaataatatgagaaatattcatccacttctagaactaacggtgaataaccagtagttaaaatctaaaaagcaggcaaaagggttgcatcttttaaataaatataaataactatattaattagatataatcatatataatatatgcaatatattatatataaataatatataataaatatattaatagttaatgacaacaaggctggttaaagcaaaggctgcttcgttttatccttcttgtgccaaacgaatggcattcctatatgattcccatagtttgccagtgtgttctatctacattatttggagtgagtctgcagctttcagtactgtggtctgcattaaagtgggatgattagcataatctatactgcacccttaagaatatgggggcaattaaacactgagcttgacctaccgccctcttttgcagggcagagatgatcctgcacagcagaggtgattataaatatcagttctattcattcttcctctcaactgcttcgtctcccttccttccttcatctctctttctccacgctctacacatgcaatttttaacctccaaaactggtgaaaaactgatggcatcaggctatcttgctggaaattgaaaatgccagtcaaacagggtctccaaatatccaagtatctggatgtttagggtggtgtagacaaattaaccagatgcatccattgtgaatctggctctttttggagacctgtggaaacaacaaatatctatatataaagagaaaaataatactaacaagcaaacaattgctttgaagttccattgcaattgtactgttatatgtctggcagccacatccagtgtctgaaaatcgtggtcgtatttgctataacaaatcattcccactgattcccatgttgaagtctgaaaatttacagatgaaaaaaactatgtcaagatatccaaggcaatttctgcatttttaaataaagaaatagaagtagtgacctgcttggtaaagactaactaaaatgtcaagttgcttctttgtgaaaatcagaaagtttgctttgtgttagtatgagaaaaactaatcagtcaatactaaataaatgtaatttggtaaacaaaacctgttacaactagaaatacttagcagattttttaagaataaaaagagggggctggacttgtgaaaactattgaccaggaagttctttgaccaggctgagtgcagtgtctcacactttgggaggccaaggcaggaggatcgcttaagccagaagttcaagaccagcctgggcaacatgtcaaaaccccatctctacaaaaaatacaaaaattagctgggcatgttggtgcacacctgtggtcctagctactcaggaggctgaggttggaggatcacttgagcctaggagatggaggttgcactgagccaagatcataccactgcactccagcctgggcgatagagtgagaccctgtctcacaaaaagaaaaaagagaaaaaagaaaagaaaagaaagttctatgaccggttcataccaatccagccatgattcactgtacacccaactaagtgccatacagcagtgaggtcaagattgtacttgtagcatatacaatctaggggggaaaataaagttttacacattcgatgaatgttaccaaagtgtattagtctgttctcacactgctaataaagacatacctaagactgagtaatttataaaggaaagaagtttaattgactcacagttcagcatggctgaggaggcctcaggaaacttacaatcatggtggaaggagaagcaaacacgtccttccttcacatggcagcagcgaggagaagtacagagtgaggggtggggagaaagccccttataaaagcatcagatctcatgagaactcactcactatcgcaagaacaggaggggataaactgcccctgtgattcaattatctccacctggtccctcccatgacacgtgaggattatgggaactacaattcaagatgagatttgggtggggacacagccaaatcatatcacaaagggacttagagatatctatctagaatttctgcttctaaccaaacagaatttgaacaggagagtcatttacctatagttagtgattttataggggtcaaaaatgcaacatcctcaaaattatccattttggcaaaccagtttacaaatcctatattgctcacttctttgggttaaggtatttaaggtctcagtaaaagataatgctgtaagacaacgatgtcaagccattatgaaaccttaaaaactcgactctaataaatgtgttggattagcagccagtcacctaggacctccacagaagccctggctcaggaaaaaaaaaaaaaaaaaatcctctgagggtctgaagagaggaatttggagaggaaggaatccccgaaatgcatacttccaggtgagggagccccggtgggaacttgagaagtcttgttcctatctgaagacccataggctgaaagagatattgaaaggaacatcctaacaaggggctgaagcagccacaccagacaattctgatggggaagtctgccttccctagccagtgaactagcctggtagaacacctgctagatctggctgcagaaaagcacaagtctccctactgaatggcagcaaaaatgaagcagagtttctgagatttgcccaaggccatagaagcagtccgcctcacacctgggattgggattcagatctttctgccttccagaaagacaactcctgtcgctcccgatcatgtcctatttttaagttcattagttaacctctgggtacttagccagttccaagagccagtacgtcaaagcgtttttaaatggacgagcctaaagtgatcattgtctggttggcccggctcaccccgtgagctcctgcaaatgttctgtggttcatacagaggctggctgctcatcaacaagtttctctgggaggtgggaagcatctttcttctgatcagaacatgcctgtcacagagcgccggcggctaccaagcagtgcctgctcgaaagagccactgccccagcctgggagtccaaaatctgtcttctggcagaggctttaactgtttggctgctgctttcgaaggtccatgctggtacctcccaggaagagagaacccagctgggaagctgccagttgcaggcaatcttctccttcatttcaacttaacaagtatttaatgtgtacccgctgagggtccagtcctttggggtatgcagccctctggaggtctacaatcatgctggggagtccagacacaagcaggaggcaaccagatgatacatcaaggctctacataattaagagctctgcagtcacggctacaggaattcagggatgttcagggctgttgatgtagcactgcctctgcaaaaggacaactagcagtatttagaaaggacccaaagacattgtttctgccctatcagggttctttgtctcacactaggacacaagtaaaaatatcaggcaaaatgagacctctgcttaaagggagagctcatgaaaatgaatggggctcccctgatgcacaagattcttctccagacagttctatagggcactgagctgatccctatcactctgaggtcaaagggaaggctaacttggcctcagctgtcatggctgtgttgttaatcaacccttccatgctaaactcccagctccaatttgcctcctttttcttgtgctgatacttgttttattttgtccttgcttttcagcatttgctgggcacccacagggttctggcactccagcaaatgcctgggtggcagtggagtcataactcagaagacaggatgctgtgcgtgactgcttgatatctagcaatgcagtagcacggtggaagtttctggctgtgttaaattctaattgtttatataataagagcgtagcattggggggctgttataacatggagtgatgtgttgagcttgagcttacatggtgttagatcagctttctcacacttctgatatcctctcacctcctggaagagtgacttcttgagctaggcaatttgcttttagaagatttattgttaagtctgattaagtaattattagtaaaataatttgttggatgtctgtcccccttgcaaaactgtaattcttatgcaggcactgacacaatgtggattcttcttcattgcagccctagtgtcttaaacagatttgtgatgaaataatcgataaatatttattaaagtgattatattatttttctagggataccataagaaaattccacaagctgagtggctcagacaacagaaatttatttcctgtcagttctggaggctggaagtccaagatcgaggtgtcagcaggtgtggtttttcctgagacctctctccttgacttgtagatggccacctcctcacagcatgctcacatggtctttctgtgtgcaccctcatccctggtgtttctctgtgtgtccaaatttcctcttcttataaggacaccagtcagattagattagggcccacctgaaagtccccgttttaacttaatcacctctttaaatgccctatctccacatatagtcccatactgaggcactgggggttagggctccaacatatgaatgggggacaccattctgtaacagggatgaatgatagaaacagaatgaagtatattgcagaaaactggatcatattaaagtggataaactagagaacaatatacataaatactacattaaaacgagttaaagttattccttgcaataggagccctctccctcatttgttcccttggctagaaaaggacagggtggctttgcagtctgcaggccaggaatggtgttctagccatgggtagggtgtagattagttctgtaatttgggaatagtctatttctatttctgggcttttgttctttattctacaaaataaagggaatcgggctcatgaagtcactcagtgatcctatgaaaagccaaaccagaatggaaatattccttatggcttctctgtttgactaagagtgataatctgcagtaattctctttcctccaaggctcatggagagaaagaagagacccaaagtctactttgtcttttccttagtgggattccagttacctgtaagccagacagtcagggaagcaaaagtctctaccctaggaagcaataagcaactccctaaatgggaaaaaagccagcaaatgctcctggttcccatcttgctggcagggagcaagtctgtgctgccttgtatctgtcttctcctgtcttggtgatgacggactttaggagatacagtgttcaaggaagcagtaaggaccatgaatccacaaaacaggaagtcaaaccctagttcccctgctgacttgctccaaagctcagaataccaaactggtgaaatcccaactaagaccacttttcacactattccactgatgtttcccattcttccccgtttggagtgcagagttgagacattaccttgagcactgaaatgacacaatatacacatggaatttcctccccatccccagtgcagttttccagcaatatgtgataactaattacttgtgaccctcgcttccccttgttatctcctggaaatagttgtttttctgtgtaagaacttgctacagatgctactaaaataaaatccctgggataattagcagatgcgggggtttctgcgatgtttcattagtgagtggtgctggtctaggagactgccagcttgcttactgcactcaaaaagcagggttgtagctgccattgtttggatttgcatatgttcttcccattttcacttaccgcccctttgcccaagaaatcacctctccaaatcgacaatgactttccaaatctatatgtctttgcttttccagttactgccttctcttcatttacccagtcacatcgggttatggaaacacaaatgcagaaacgtgcccaaatcactgtgatctcagaaattcagagccgtttgcatttcagcttaaggcagcagcttctgaactacactgaatagaacttgggaaacctcgtgcacccagaactgatagaatgcttctcttgtgtgtttttggattgtgcagtcaattgacattttgttgacactacttcccttcaatttccctttctatataatttcaattctccttcttctaggatttcccattgctatttccagtggctttatatcatggctcagccgatctttgagaaataatgccaggcctctctctgttcttttgtatcccgcgtgctacctgattcttatcttacctgtgcaaacacaaatggggtacggccaagaataagaataacactttagcctcagttactgggcctagggacccgtgagagggatctgatatagctcaatcagtagttggctgtcttctttattctgcaagactgatgatcaggacaatccttcctcttactgaaacaatatattcctaacctcattttcaaattccctcttggtgatccctaggccctccttgacttcatcagcacccactgcttcctcccgctactgggctccaaccacctcagtcttctgtcaaccctgcagacgtgccaagctcattccaacgtgagaaccttggcatgtcttctgtcaaccctgcagatgtgccgagctcattcccatctgagaaccttggcacttactgtttcctctttgttgtacactctttccctatagctgcgtcttgtccttctcctcaatctgagaagctcattcttatgctcagaagttacctccttgaaaaagccttccctgaagttaagtgattttgcccactccacccagtccctatcttttccactgtgaaattctttcttcttcttaaacttggtactgtcaagagtaagctccacagactttggcactttatgttgtggccactatttttttccagcatccttaactgtgcctgtcccagattagatgctcaacaagtatgtgttgaatggatagatttaggaaaatagggttaagaaaggatgagttagagaggaaaaataagattcatgatcttcaaaaaggaatcagtggagaaatggccttgttggttcaggttttagcacttaaagtgtgttgttctcttggattttccagttgtgggtcatctctgaaaaggggcaatgtctgcagcaagtctgccttggcttcacacacagtcttcagctattacctctacacaaattcctctcagatctacaggtccgggaatggaggcccctaatcacagcatctcccctgattttcagattctgctatcacctcagcttcaacatattgaaaaatcattgttacttctggttcagcgactcagtctaccttctcacttgccttgttaacataccaccatcttccgcctttcttctcaagaagaaaaaaatcagacctcactgacgcttcaccatcttcagcccctcattcccaatgtatctaaaaggagctgtgccactttttagaaaatcaaccctcatgcattcggcacctgttattatttctagaaactgtattaagcctgtggacaaacagggccctggttgtcatggaatttgaagccacccttttctgttttgattggatgcaggaacaatgagtacacaccacacccagagtccatcccttgtcatatcaagtccctctttcttcaaagacaacctcctacctgtatcttgcagattattgccaaaagaaatatcctaagtggcaattaattgctctactttatcttcatgaacctaaactaactctgtcataagcctagagttttcttatgctgagcttttgaaacttttcataatctgatattcactcttaactaattcccacattcccccaataattcccacttttccagccaagatatttggagctcactatccccttaacttttatttttatccccttaacttttgtttttattcctatagtgcttaccccagaatttaaatttgaatggaaccacacatattatttaacccaacctctacatagataaattaaaaaaaaaaaaaccctgaagttcacaggcttaaagtcagaaaactaattctaaaaatagtatttcctgatttttaaggttcttcacccaatatattgtcattttttcttgctgtgtatatgtccatgtggttagtatgttagcagctcctatcagaaaccaatcaacgttctcaaacaaaatggaattaagagagagcttttgttgagtaaactagggaagaggaaaaagggaaggaggcattgggctaaaagaactcatgtttgcagatttgagtatctgtgttccattcattcaaatttgccatctggatcattagaatataagatgcctaagctttggtaggctgaagcagaagtatcacttgaggccaggagtttgagaccagcctgggcaacctacctaccatctctaccaaaaaaaaaaaaagaaagaaagaaagacagaaaattggctgggcatggtagcatgtgcctatagtcccagctactcaggaggctaaggcagaagcacaacttgagcccaggggtttgatgctgcagtgagctatgatcatgccactgcattccagcctgggtgctgggtgacagagtgagaccttgtcttaaaaacaacaacaacaacaacaacaacaacaacaacaacaacaacaaaccacccattctgagccgccatatcgataatccaaatccttgacttcctctcaacaccgaacaaaacaacatacacacctacacatggttgtcttttgtcttttagtataagacctgggactacacttactggagagcagctgaggctagagtgtaaaagtccaatagttgttgactaatagtgcctcagtggtagttccaatatgccagttaatgcataatgtctccccgcatgaaacctgatcaaaaagctttaaagctgcttggcccctactgtttgcagagggaaaacatggggactgagggccttagaaggaggggcaatgtgagcgcattgagtgactgggcaagacatcattagaaagacaaaaagagacatcattctcaaaatgcactgcgttgcaaagaggccacgattcttaaatgatgtttagggtaactattcgaaccgacaaaaaggcttatcaaacaattaaataaataaataagtttttaaaaagcagtcttttctttttcttccctgtgtttgaaaaccttcccattaagagaacacaatatgcaatggcaaacacggctcagcctcatcaggaaaagagaaaattgtttgaaataaacctcaaagagaaagaaaaaagctgtcattttctttaaggacactattatgttcttattgacaagacaaaagagtaataaagttaaattatagcaactataagcttgatagttcgattggagagaaatagagaaacctttgctattaaaaagaaaaagaaagaagaaaaagtagatcttttaatcagcccctactgaagcgatgactactgaccttacccctcactgagagcattcttgaatctgttccaggggcaacattcctacctcattgatacaatccaggaattatgaaactagaagtgagcttgaataatcattatgctggagtctcttattttataattggagaaacccatgtctatagcagttaagtggcttgcctgtgctcacacagcttttgaatttcaaggttaaattctagaaaccagcagaagctaaaacttattttctccagacacagaatctgtttattcagccttattacaaaatcatcatgctaacaacaaattcatggtgattatcctgaaatctatctccaagcatatttggagattctgagtatacttactaagctcttacggattcagggtcccaaattcctcctccctgtctggactaggcatcaggcagttgaagaaaaagcgtcaggagatccccatccttcctcactgctgtatcttgatgacagtcaacatctcttacccacacagtctcttgttggaacaggaacagtgcctctctggcccctgttgtgaaaagaatgaagcaaaaagaccctcctagccatgactgagttatgggactcttcagaactgcagtgagagaggccagacaccttagaagtgacaagttctcccttgtaatatatagtaggagttcagaaaaaggaaaatgcaatgatttttaagtactttgggccattttcctctcttgcttctctcctggagaagtctggacacgtttttatttggaaaggtgcattgtgacattttatatcgttccttccacctattaatagctctggccgccccaggtgctcattttcaagacaccctcagagaagggggacttctggcagccactctgcagctgatagctttggggaaatggcaggttttaattgatgtattgtggacactgttctttctttctgtctgtctctctctaaaacaaaacaaacaaacaaacaaaacaaaacaaaacaaaacaaaaaaaccgtgatgggtttagtatcctcctaggacctaggacctatagattttaatatgtcaattattccccttttatgggaacttgtatgtttgtgactgactcatggtcttccaggtatctttttgtctccatgtgacactgagcaccaagtatcaacatcacctgtctctctttgaataaactttctagacaggcaacaaccaacagcccctatatagatgctcatcagaacagcacgtcatatgaattcttctcaaattggtggattgactgttaatcattacaatgagatggaattggaaagtagggctaaaacgcaggaatgtgaagtaccaaaatttcttatttaaaaatagtccaggtggctacccctgatggaggcaatgttgtccaggcccgcatttctgcggacattggctgctccaaccatcctctataattctggcttgttgcaagtgctgcgaagacagcaatgtatttcccaagagcctcagagaatgttggctctgccatctctgcccaaagaagccagtgtctccatgctggctatggtgtggagctccatcgtaagccttgagacactgttctcaatatgaaatgtagggagatttcttactgctgaagttcccctcggtattctcacacactttttaaaaaatagctttttgaagtataattcacataccataaaatccacacattagaagctatttttagctttccacaattttcagcaaatttatggagttgaacaaccaacaacatcctccacttttagaatattttcatcatccaaaaattccctactggccatttgctgttaatctactctacccccagtcctagccaatactgatctacttttcttgtctctataaaagtgaggtttctgggcattgcttatcaatgggcttatataatgtattacatgatggtttgtaggttcatctatgcatagcatgtatcagtagttcattctttttattgctgaatggtattctgctgatacaggtttaccacgttttctttatccagcagttgatggacatttggattgtttccaatttggggctcttatgatgccatggacattcacatgcatttccttctatggatgtatgctctaataagcttcttaaatgctacttcttacatgcccctgtgcccctaactatgctaatcactttaaacgtattatttccagcctttgcaaaaactgctgagataggaattttaaccaagaaaccaaagcttataaagaagcaactcacttgaaacaatgtttccagagccaaaattcaaccccgtacacttcggactatgccaagcagtctctattactccctaacaaaaaagcaggcatttccacgaagcttgcacacgaaacccaatggctcaccctacagccatactagggagtgttgccaccttaaatggattggaggtttgcaaatccaccctaggacttcatgtacaaatattctcttcgaaattacagcaacctcaatggtcacttcaaacccaattttgacatggatacatagatcgatgcaaatgtatcaattatctgctttatgcctagaaccaagttgggtaaagtgaggaaacaaaaggtgaatgacaaacagccatggccccttgaggtcagcataatgggatgaccagcctcatacacacatgtctgaattacgtggaaccaactgcacatataatgagagcttcaattatttaagaatctgtgccaagacttaagccactcacgacttgtgtgtcatctacctttttcctttttcagttatgtgggcactgtagagctaaattaccaacagagagagagagagagagagagagagagagagagagagagctggactctacacaattagtgagctactcagaagatattcagtggaaacattttggaaatgttattatttaaggcagctggataatctgcagatatgtgtgtgtgtgcgtctatgtgtgtgtgcgtgtgtgtgcatacacacataaaatcttcctggaagcttatagacattttgtttcatttatacatctcacaagtctttattaaacacctagttgcagacatagtgcaacgtgttagcatagtgcaaaatggtgttccctgcccttctgaagcttacagtttcatgtagaagatgtatattaaataaagagattagttattaaaattatgagaagtgctatgaagaaatagagtatgtcaagggaacatttgcatttacacatgtgtcaggagcagaaggtgatgagctgatatttagctttgcattaaaacaaaacgaaaaacccagagccaaacaagaataaagaacctttcaagccaatgtggggaggaagaattcccagtgggcaagtgatatatcctggtgacttagagtaggaggctggcaggagagatgaagagaaatagacatgtttataaatggaaagcccttccttctgggtcttcttaaaatattctgcaaatcttccataaagattggcaatttctctatcaaggctgggtaacctcatatatcaattctccatttccctgcccaagtttgtgataacatatcttccattaacctatgctgaaagagccatttctattctaagaatctatttatgttcccctacaactttctcaaagatatgcctctgggttgtaatacctcacgctgatactcagctcaaatgtgaatacttttgccacatttcggtaacattgatcgagacttttctgagtcatttgatcatggggatgtggggatgtcttctctttgtggggaagaaaatgacatccctttcatttgaagggactaaggactgaatttgctttttctgttacttgccataaatttggtcttcattgtcaacagtatcctatgactatttttccaattatttcatgaattaggacacaacaggtaatcttatttctgacatttatttgaataaataagtgtatcttcctattcttatctctgtttttattaccttaagtaacacactgaatttcatttcaagtccctctctctctattttctcaattctttgcacagtttcttatgaagcttctctggttaatttctgttactttccagttgtcagaaacctttaggtatgtgatcgtttttcctgaaagatctctaggataaaagtctagttttacctttcataatccccacatcctatcaaatctgctttttgaacatgtactttcctgtaccactttctactgaagaattagttaccctttttcctttcaattgcctgtagtcattaacagaaatattttccatctgtcactctcctatttgtctttatttctcttttttggtaagaagagcatatacaattgcttccaccctacattttggtcaaattattttgtggtacggattgaaaagtttttataattgcaccaagtttcattgacccatattaaaggtgtcagtgtgcaaaaaaatttctatctgtataagctactggttttccattaaaataagaatgattttttttagaggacaattttttaagagacaagatcttgttctatcacctaggctggagcgtagtagtgtaatcatagctggctgcagcctctacctccttggctcaaggaatcctctcacctcagcctcttcagtagttggaactacatgggactacaggcacatgccaccactcctggctctttttgtgtgtgtttattaatccattttcacattgctattaagatactacccaagactgggtaatttataaacaaaggaggtttaattgactcatagttccacatggctgggaggtctcaggaaacttacaatcatgacagaaggtggagcaggcatgtcttatatggtggcaggggagagaagtgcaagtaggggaaatgccaaacacttaaaaccatcagatcttgtgagaactcactcactatcatgagaacagcgcggcggaaaccacccccaggattcaatcacctcccaccggatccatccctcaacacatgaagactgtggggattacagttcaagatgagatttgggtggggacacagccaaatcatattggtggagttttgctatattgcctaggctggtctcaaatccttggtctcaagccattctctcccctcagcctcccaaagtgctaggattacaggtgtaagccaccatgtccagcctatttttgtatttgtatcttcatttttttaaaaaatgaaattagacatactggtttcattacatatttcttggaataattatcacttttaccataataatagagaaaccgaggaaaaacaaaaacaacaaaaaagtgttatttgagacaaagactatacaaggcattatactaagaacggatatgaacagagagattaaataagacattattcctgccttttaaagactgacacttcagtaattaagaaaaaaataaaagatgttcatatatccacaataagatgaacataagggaataaaaattcaaggaagctgggaacggtggctcatgcctataatttcagcactttgggaggccgaagcgggcagatcatgaggtcaggagttcaagaccagcctggccaacttgatgaaaccctgcctctactaaaaatacaaaaatcagccgggtgtggtggtgggcacctataatcccagctactcaggaggctgaggcaggagaatcgcttgaaaccggaaggcagaggttgcagtgagccaagatcatgccactgtactccagcctgggtgaaagagctaaaccccatctcaaaaaaaaaaaaaatcaatgggaagagagcaatatttataatgggctgagtagttttgcacattcaagactgattcctgggacccacatctttgagatcagcatgagaagaaggggaggcaaagttaaatcagtcaatgactgtgcactggcatttgaaacctatatttttaaatgagtgtctttgcttttcatcctaaatcttataaaccatgtatagtttatcaataaagagatctgcctttttctgagggagaagaattgaggagaaacttgggatctggaactggctcaatctctggctacattgcctattctgataaaatcctcttcaccatcatcatctccctttgctttgaccaggtgtattagactttgtcaaaagcaatggagatgattttttcaaggttagaaggcataccggggtgaactgcaggaatggttcattatcttcggggaatgttaatggcccacctcgaggattctaaagagggaaagaatgagccaaacgacgctttggattaaacgatgaactgagtgtaaagcccacagtagaggagctggcacacagtaggtgctcaatgaatagaatttccccatcacccttcccttgccctacgctgttacgggttgcagctgctgtccatataggcctgttacagagagagcagcaggtgtttgccaggcgttgacagggtagggagtctgattctcagagtttgcatgtttctccttgactcttgatatcctgagtaattcttgacaaaggcattgtcctcgtcatcctgtagtggtcctcttcttttgacctgcgcattttctggagttgtgagccatgttataaaggggatgagtccagatgggaagcatcagtgatgacctggcattttctgctggggtgattggtataccatagaagcagttaatcaaggacggccaaggggctcctagaacacacgatagtggtacacctacactttgatcctcactctagacctctgggagcctttttgaatattaaactcattaaccaaaggaaccagtctgccactgatgtacacattccagcctggggttttctttttttaataaaaatgatgtgggtagctgattcagcattacagtggtttctcccccaacctccagaagtatgtcaggactgttattttatagcataacatggctgtttagaaggtttctgaaaacctagagcttaacatttttctggtgccattatatcatattccaccagtgtatcaggaaatgtgctttgggaaggtcttgaagaaaatttatagaatagaatgacagcatgtaacatcaggaggacctgacttgcatatgatatcaggaaaggcttccttaaagaagtaaactgattagtagaaggtagccacagggagggagaggagtgtatgtgaactgggaggaaaaatgatgtattccaggagttgaaaggacagggttgccagggtggagagaggaagcaggggagaggagggaaatacatggtaggaactgggcaaggaccagaccttacaaggtttcatggatcaccttaaagaggttcttaaagaggtaagaaccctatggactctgccttaacaaaacaggaagccagtgacagatgtttaagaagggagtgtaatgaccagatttgtttttaaaagatcattttgcctgccatgtgaataaaggattataaagacagtaagagtgatattgagaggaccgataggaggttgtcacactgcaagatggcatgatggcagaggatagcatgataatttatccttgtcttttgggagtttacaatctagtaagggagtggacatgtgtacacagaattattacagtgttgcatgtgatagtgccatgagaattaagcaagataaagtgagaaagagagaggtcactttttgcagagaaaatcagggaaatagcttcttagatgacaaacaggatccaaggaatgtagtggcctgaggtttgttttgttttgttttgggcttgtttgctgttatttagatttttagatacaactgtttccagattaataaattgctttaaaagtagctttcccactgttttggttttttttaagcttcacatacacatacattttctgttccagttcacattatctttgtcaggcaagaagaaagcaggttttatggttatatatgtaattcccttttagactggagtaagtgaattcctctatttctcttccaggtcatctgtcagtccataaagccaggaagagttgagagacaagtctgtcttcttgaggacgcgtagtttctgtgaaaataatacacacacacacacacacacacatgcgcgcacacgattgtgcaaataaatatgggtatgatgctttcatcctaagaaattcagaatgaattgcttttagaaggacttacacaaagttctcatgcagctcttggggccccttctttccttcttttttttccagatggagtctcactctgtcacccaggctggagtacagtggtgcaatctcagctcactgcaacctccacctcctgggttcaagcaattctcctgcctcagcctcctgagtagctgggatttcaggtgcccgccaccatgcccagctaattttttttttttttttttttttttgtattttaagtagagatggggtttcgccatgttggccatgctggtctcaaactcctgacctcaggtgatctacccaccttggccttccaaagtgctgggattacttgtgtaagccaccgtacctggcctattggaacccccttcttgaaacacctgtgtgagcaccctgcttaccatctaccagtgaccacacccacatagggttctatttcagtgagactacagagccaacaaagtgcactagttagctgtgatggaaaacctaccaagctttactgatggatctctgctgaaaagaagtaggctaggttatactgaaaccatgagcaagaaaaatgttcagctggtcatgttgggagtcattgggaatattctagcccatgatttcattcacattggctgaactctcagctccacctatacgtgagcgtggctagtcacctaagctctctgagtttctttggaaaaataaagtggttaggctgactgatcccccagatgttctgcaaactcagtttcagatatagatttccatccaggagagctgtgaactgattttacaggtttagcctagcattgcaaggatttagttatatgggtctatacacaagagagtacttgaatgtgtccttcatactgatgccagaaaagtagagagaactccttaattcctctaagtatctagaaacacattttttagccaaggggatggttggctatttgaacgagaattttgactgtaccccgtggtttctacaattaaagaaatggcatatctggacttagaaagataatggtttcctaggagtttgcattcttagaccacacccagaaaattatgtttcgtttgagattatgcaatttaaggatgttgacaaatctgaatgcatgcaaagaaaaatggtaaggatgaagaaaaacccaggaagactgctatatacggaaaagttgctaaaaacttggaagggttggtctgaaggagatttagggatacattacagctgtctcaaatattgtggagtactgtcagaggaaaagaaatgagactatcctggctctgtatttcctaatagacctggggtaaatcgattgaaattgccaggagcttaatttgggctcagtgtggaggagaaatttctgacaacaatatgtagccaagaataggatgggatctgatttcccttgtgcaaagagtaattaggaagagactggatgttggtaatattgattgtgaaaagcagtgagttgtgtttttacatgtattaatgcaatcttcatgataacctgttgatgttgcttctgttattatttccatattacagatgaagaaactgaggcacagtgtgggtaagtcacttgcctaaaatcacacagttagtaggtgacaaagctgggatttgaactcatgaatgtcctatcgtcaatttgggaggcttaaacatgctgacatgttgccttcaggtggccatcacataggtggatagtatttctgccccgggtttccagaatggtctttgaagagctcactgatcatggtgtattccatggtgcataacagacagattctgtggtagtacctaatgcaggcagaggtgccttcctgcaggtgtgccagagtctttggtaatgagccattatgctccgtcagtcattctgctgtaaccatgcatagtcatcctgtttccttcctcacagtatatggagttgggatgcattgtttcttggtagaatttactttgtctgccatattgataatatccacttcagcagctacactatgacattcccttaaaaaaaagaaaattacaaaaatatccaaaagccctacttttgggatatgcagactgcaactatactttccttccagacatgatggatagttgtttccctataagatactgcaccttgtgtgagtgttggagagagatctctgctttattggccctttgcacgttaggaaacacaataaaagaggtaaagtgctttccagtacaggaaaggaaaaataatccctttcaaacttgatcagatctatctaaaggtaaccgaccaggaaggagaactgaccccatttcacatacaggtgctttaaaataatttcacaacaggtagttaaaatgtaactatgctgtgctgtcaatcacatctcgtccttctggattttaacgcttgttttacttgagggaagatgatatttgaacattctatagcatccgtcaacaggaatgcgcacatggtttcaaataagggttttcagccttctgaaaccaattacttctgcctaagtggaaatgccagagcagagatgtgtcagcaactaagagaataatttaaaaaaaaaaattaagtatacacagtgatgtcagaaaacaacagaaattgtgcattcctgcacacacatgtacacacatgcacatgaacaaacctttttaagagatatttcaaaaaaaaaaaaagtctgtgtcaaacaacgttaacccagaaagatgcagaaatgtcagagacattacatgggcaggacttgcggttggcatttggctggcagcgggggaggcgtcctccccaactaattcctcaggaacctcatgctgaggctgtctacagggaagggagcagaaagggaggagggagagagcagatattgcctattatgcttttccttcccagctggagaaggcctcagctgtgtcagactgggactgctggtgatttttctgtagttagagggaaacacaaaacgaagagcggcccactcccagcttacgccgatggtgagcccacctctcctgatcattagcgttgctggcacaattgaatgcaagccagatcatctcttatggagacccggcagtacctcacctcagtctgtgagttttctccatgggaaggttgtgatggagtctctgggtaaggatgatggatgtgcatgcagatggggttttgcaagcacctgtcctcactgacagggtagttggagtatttactttaacccttcagcggataccaagggagagatgggagacttgacggtgaaactatttgatttcgcaccgcagttgtcttaacagtagttgtgaattcttctcactgagtctaatttctaattcctatcaggttgttgatctgaattttttttttgctaccttcatgatatctgccaggtatttcaccagaaaaaaaaaatatgtgaaaataaatataaatataaaatggaatttattaactgtaaacatctgttaagtcaagcatcctgtgtctattgctgaaatactctttcaagtgactctgtctgcatctgtcacatttttttcaccctccagagacctatttgcggtagctctctgtgtactaatgaaaacgtgggattggctttaccctttattgtagcttggtgttaagacatttttaaaataggcaaaaggaagacaggggaaatgatccattctgttagctgaattttcttcaaaacatggattagtcttgctgcttgtatgtgatatttagcatgctgaacaggtttttgtgaaactcctggtgtcttctgctgcaggtggctgggtttgttgacaaatcttcaggtgtaccatttgccttcaaagagggtgctgctgtctcatcagtataaatggagtggtaataacccctcacttttctagggcaacgtatgttttacaaagtatcttcactgtattattgagttgctctcattttattaggacatcagccctgtgtggcaggtattccagttgttattagctccattttttaaacaaggaaactcaaggcaaaagactcatccagggccacaccgttagaactggacatgttggtatttcaacccacttcaattctcaagctttgttttcttatgtatatgaactgtgggtagtatagacacaaccaaacaaacctaagttgctgtttccatgttgtatgatatatatatatatgtaatcccacttcctttttgcttccttaagccacactaggcacagttatgatgcagaatgagtttaatttcagcatgccccacctctcttttccacaactcaaccccacaacacaagctcatacacagacttctgttgctcccttggtttaggaacgtgggttcctgagatgctgtgggtttctcctcatttaaggagaaaatcatcagtaaatctgatagggtttataatacctctcatgagtccagagaaaacaaagtgatggttccacagtggtgcaatttcatttacctcaatctgagtagaagagatatgaggctccaggaggaaatcccctcatcctttgaaaccccacacttcaattatctcagaagttaggaacaaggacatgtatccccagaagctagggaggacagatgccctcatggagactctgtgtcttctatttcaacaagcatagtgttctctcaagagtctgccaatgagaaaccttgagaactaggagcacctcaccaagcacctaggaacacattgtaggacaacttagataagccccacatgatccagggagacaaagtcacccctcccactcccacccccagctttcttccaaccaaggccgtattgccaaacatctgcattcagtgaccagttgcagttggccactggttctttgagagaacacagggtgggttttaaattgccctgacatagacccccatgaaatcatgtgagacatctctttttgggttttccaaatatgcttggcagtactttctcatataccttttctttcttttttctttttttattatatttttaaattttatattatattttttatttttttattatttttatatttttaaattttactttaagttctggggtgcatgtgcagaatgtgcagttttgttacataggtatatatgtgccatggtggtttgctgcatccatcaactcatcagctacattaggtatttctcctaatgctatccctccccttgcctcccaccccccaacaggccccactatgtggtgttcccctccctgtgtccatatgttctcattgttcaactcccacttatgagtgagaacatgcagtgtttggttttctgttcctgtgttagtttgctgagaatgatggtttccagctacatccatgtccctgcaagggacatgaactcattcttttttatgactgcataatattccatggtgtatatgtgccacattttctttatccagtctatcatcgatgggcatttgggttggttgcaagtctttgctattgtgaatagtgctgcaataaacatacgtgtgcatgtgtctttatagcagaatgatttataatcctttgggtatatgcccagtaatgggattgctgggtcaaatagtatttctggttctagatccttgagaaatcaccacactgtcttccacaatggttgaactaatttacactcccaccaacagtgtaaaagcgttcctgtttctccacatcctttccagcatctggtgtttcctgacattttaatgatcaccattctaagtggcatgagatggtatctcattgtggttttgatttgcatttctctaatctcatataccctttcttttgcttcagaaagagaacaaggggtttcacattagaagaattctttgttggaacaattttaatattctgaagtctttttcttagagcattcaagtatgccttggttaccctgtggcatggacaaatgcccttccacctcagccacagtttgccttcatgcatctgtcaatacataagtgcaaagtgatgtagaatctaccagagtttgcactgtggggttgtcttttatactttcctttttaaagtaatcctgaaaatctcttaggaaattgatggagggtgggttcataaaacctcacagtgtcagagttggaaggcagtctaaattgcatgtggtccctatagtgtcattatgatgaccaagaaatcagttcccagggaggctgagatttgtcccagtttaccatgatggtgactgtgctgcatattttctgtttgtccttcacattctttcattccatcaatatcttgctctctgccttggaagctgaccctatagactggatctgtgggtgctctatcctctagctgattggctcaatgggaagagatcgaagatcagaagatagaaggtggaagagagagaggcaggggcacttcctaccagcttggaagagagagaggcaggagcacttcctaccagcttcctccttgtcattgtgctatagcaggctgtttttctgtatctgagacagacattcccaggtagccctctccatacagtcttctctttctggattcttctaatcacttccacttttttttagctctagatcattgcatgttagcttttataagcacttgctggttgttaggactcacattctgtacatggaaacatttattaggactctggttctgtaagtgaaaaaattcgctgattttctcgagccatgcacactgacataacttctgatttccagaaaccttgaccacaactgtttaaatagtccccttattaaactctctcatattgccaggtttgggtgtcatctgctttcatgctaggaccttgattgatacagaaacagctaaagctaaaactatagcccagctagttctctgtctccttaaccctattctatttgcttttccaccatactgcttttactatggataccttgatactttgaataaataataattgtttcataaacacacaattttgatagtagataacagtagcatgcagtggttaaaaacatagactcaacatcttgggttcaaatcccagttctgacacatactagattacttaactagcaagttgcttagggttcaaatcccagttctgacacatactagattacttgggttcaaatcccagttctgacactagattacttaactagcaagttgcttaacttctctgtgtctcagtatcctctttcataacaataaggctattgtggagattaaatcatatcagttccttcaaagaacttagcacatatgagggtgttaaatgttcataagtgctcagcacatggtaagtgctccataaatgttagcttttatgagtgttggctgtttgttaggactcacattctgtacatggaaacatttatcaggactctgattttgtaagtggaaaaattttcagattttctcaagccttgcacgctgtcataaaatttcatgaggataaagtcatcagttcccaggaacactgaagagttacaggggaagtggggaggtgcaggtaagtgggggtatatatgagtcaccagagggacgtgaggagagatgggaaaggaatgtagacaacatcatgatggacaagcctggatgtgccaggaagctctaatccacctgggagggctgtgaatcagcccccttccagcagggtaggtgtccagtttctggctggttgacctgggaggaggccatggaagctgttgccccatcaatctattgttgagagatacagccatgagcctggatgttcctacaacaataattatgcaagagctagtttacaaaggtgctgacaaaccccacctggagacagtatttctttagctccgaagtgtgaaataaggtgtgattttttaaaaaaacatagattctgtttttcagatattgattctttcttttgcatatttgataaatattcagaaatgtgaaattgattatacttgagcatggtcttacttgagcttactagagcggtggctgtacttaagctctacatctctgggtagtcactgtaggtatttggagagaggagctaaatttctgaactgacttatttaagtggaatgctatgcccagctcttcactggttaaaactccgcatggtacattttatcctcaatggctttgctcctggtcttcctaagggtgcaataaattgtggcttctcttacctagaaccagtttcttctcttctatcattaaatagggcactgtcacatgcctttgaaagaaagagaaattaagtcatcccatcttttgttgttcaggatggtgacactttctgttattactttaggtcaggcaaggaaagaatttaatacactgttggaaggcattggacataggaggaagtgcatggtgctctgtggcctctgtgagttagacttaggccctaacatccaattgcaggcaatcgaggcttctcccacttgttccctttctccttgttttctcttttgcctttattagaatttttattgttggcctgattctgatcattggtaattgtccctagagtggacagccagtttgatttaggtggacttgtaaataggtaagtgtcaacaacaggttccacaagcagctgccttgttattgttgttgttgctgttgttgttttgagacagagtctcactctgccacccaggctagagtgcaatggcatgatctcggctcactgcaacctctgcctcccaagttcaagtgattctcctgcctcagcctcctgaggagcagggattacaggcgcgtgccacgatgcctggctaatttttgtatttttagtagagacgggtcaccatgttagtcaggctggtctcgaactcctgacctcaggtgatccgcccaccttggcctcccaaagtgctgggattacaggggtgagccaccgcacctggccttactgttctgttcatgtcctgctgcaatgtccatgtccttgcccaacaagtgacccactaaatgtctctgtggcggaaatgtccaggtctacgggtgactaagatagtgagtgaatgccttctcctatctaaactttctgcttttcctcttctgtcttttgtaaaaatgaatcctactctgagcaagctgtttaaaaataaagatcatcctctgtctcatccaccatcttcactgtcagtttcctctcccctgcttattttcttacttttacttttgttttttgttttgagtttctaacatgctatgtaattattgattatgtgattgtctgtttgcctctacccattaacatataagctcaaccagggcaggaaacgtgtttgtgttattcactgatctaccccatcaacccagaatgccgtctgatacatggtaggcagaataaacgaggaaacaagtgtcccaaagaggccactccaagaaattcttcaacctctaaaaaagacccaatattatatttctccacatggagaaatatggactgctattagaaaaaaaaaatcatcctaaaatcatgttctatcaaaataccaaatattaaaagggaaaatatcaaaagggaagttttgctttctaactggtcattgttttagttttgaattattaagttgaaagcataaaaagaaaaccatcaagtagcacttacacagacccacaaatggctctgcagaccatggattgaggaccacaggcctaatgagaagtcacagaattcatccccaggccctccaagggaactggaatttctcacttcactccccaagcttctgagcagctgtacagagctcttgtggccttgccattcctccttccatagacacattcagcaattatcatgtatctgctgagccagagatagaagcacagaggtagtgccagaagggccacttccagcaatatcgctgattgaaaaagtttcctcaactttgaatcatcaataagcttcaaccaacgagctaggagtgccattggaaccagcgcctcagctagaaagaattaagtacatgcagaagcgctgcctgacttggggctaggttgagaaacacatagttcttgattctcagatggctctttggaagaaaaatcaaagtgaagtgactaatttttagtctctttctctctcctctctctctctctcatgcatacatgcatataaacacacacgtgcacgtgcatggatacgcagctctaaggttttctacaagtgagctaagaatatccctggctccttaggaggacaaaagatcccctcctgcacatccccaaagacctttgtttcactcttaggtgtgggagaacttatttatgtctaatcttctgcttttcaactgcgtaaagcatcaaagcttctttatcaggtagactaaactacattaaggatcaaaaagaacacataatatttgtgatggccaatcatattctagagagatgcttccctcccttcctctcgttattttcgtctatttctcttgcccatgtgaaaacctgggtgatttaagcaggtgctccagtctgcagtgctctggttgtcagttggcaatggtgaggttaggcatgaaaagccaattttagatattctcctggtattgatctctgcttatcagaaaggcttttgctgtgccagttcacttctgtgcttaggcaaagtcttttacagatttaccaccacaacttactcaatctattataaagtagcatcagcatgcagggtgtttttcccctttctttgacccagttttaaaaacatccagctaaaaatgcttcattaagtttacatagaggttgcaaggcaatcaggattcctcctgcagttgtggctggaagaatttctacaagtcctctacatcttccgctccaaaagctgctgtctttggggctacagaacatctgccatgtgcaggaaatactttaccaaaattcaattgaactgtcagactttttttcccaccctttattccttttccattatcactgattacccagcttataaattcccagttcacactttctctttgacctgacttctccctgtagagcaattccggaaaccgggactgtggccctaatgcacacactattaaatattggcactcaaagtcacaagagtgtattccagctctcttgctgaaggcagctggtgcaaggctcactgcttagagaaaaatgtggtcaaagcaagtgaatgctttaaaagatcttttaagaagtaatatttgggataccttggttcatattccatcctgtctggtgtggtctttttatttcttacctatgtggaccatagagagcacaacttttaccaacaggcttttcccagttcacaagtctaagtcatttcattccttcacattagattctttatgctgagagtttcaaatggcagcctcaagctcccaagcaatcagcaaatgtcaaatgtccccaagcactgcaaccatctgagatactgagccactgcctgccgaatgaagattgtattattagtagtgtaatgtttctggtggggcggggaatagaaaagtcaaagaaaagaaaaaaagatgctgttcacagacacaagctcaattgtcttcaattgcccagcattgtctaagaaccaaagtcattctaacatcaaatctggggagagtttgctaacttcattaccacttatgtcttgaataaatgataaatggcagtgcgcgcttctaacttttcatgaatttgttttaatacctagaatttttcttctaggtaggctgaacttccctcactttaaattgtctgtttactttaattaagctttcctccggctctccaacttgttgagcttgacaagcattaatttacagtgagcattttttttttcctttttctttctttgattttttcaactttagccctctcatccttgcctggcaaagaacccaatgagtaactgacaagcaacttattactaatcccatctttcttcgtgggaaggtgtctcaatcaatacaagtcagaatttccaagccactcctgctgatagtgtgcattgcgtgtctctgtgttggcttcttagcgtaggcatctcagataggatctggcagacagggagatgctgaaaaattctcaacttaacattccagctgtgacaaagagaaaaaaaaatatattgttagggataaatttgggagactgctgagtcttccctccactgcttataccccaattttaagctacatgctgctatccattctttatgtcctagtccaatttgacttctgaaaaattttcagtgaccctccctttccccctaccacccacagttaagtaaggttcctcatccctgctctgagaacaccatctgttttttccatcatagtgcttcttatatcctatttaaattaacttagcaatttaatttaaattgactggattgtcagctctccaaggagcgagaaagcctgtcttattgtcatatctcacctggcaaatcatagcttctcaagaaggagacctctattgaatatgatttgtaagctctgtgatctggaagctagagagagttcccactcttgcctttgtgtttcagacagtgcattgagttacatgtggcaaatttttacctgcctctttagatctaaatagagcgcattcttaggtggaacaggggcacttggagacggtgggccggtgaggattgactctttactgtcccagtctatcacccgtatgcagagaagatcagggccaagttgcatatttatgatctctgaatgaatgtgccttccctacttgcccacggggagctctcccctgagtctcccctctgccagacacactcctgtgctttgatggatggagctgactgggcaaattgctatgctgatgaactgctcagctacctgagcaaatgttccagagagatctccagggatataccacattttagagaaggattcatcccagcctggggtgagccttttagcccttagcaagctgagtatggtggagtaaggaagatgaaaggactacagtctcagttctcacttttctgcaacccgagtgcctgtccttgggctggcgagaggccttattgcatttttcactcctcccagaaagttattcaaattgagacctacaggtctgggtgtcactatgctcactgaaagagcaaaatcaagaagctgaacagaaagcacttaaagggaggatgcattaccttaaaatatgcagatggaaaactgacattattgtcaatgtcagaagtcacctttctgagtaaacatttacctctgggcaaatgcagggatgtgtttctttccgtttacaaatgactgggtatgcaaatgcagggggttagagttgtgccccagaaggtgcagttgtcttctttcatctatccataacgaggaacatgcaggaatctgtcaaaaaaggcatcatgggcttgatttgtaccttctgaataaaggggatgtcagtgttaaatctgccagctggttttgtgcctaagtgttacatcagtctcttgtatgatcttgcatcctgtgtaaaatgcaatattttggcctaatgggcaggattagcacgagctgggaagccataaatgaaagtttcttgtttctagagagcaagttagagcttttatattatctgccgcggagctcggtgaatttaaatgtatctcttgggctttggtaatattcgtgttaatgtcaaaattgatcccattgttattgagatgtgtggttttttcaggccgaagatgcacagagcctgttgccagggctgatgaatatatgcaccggacacattctttctaaccgtttctcagaaccgagtgatgttgtcatgttatcatggtgcctgctaccatatactcttcacaggtctacatttttctgtaaatcgcttgtaaacttaattgatatgtattgaagacctactgtgtgcctggcattttgtttgactttggggatcaagcaaacactgttgcaacagtgggcaagatctgggctcttttgccataggatttatccctagaaacacagagagagagacaataaaataaatgaacaagcagaaatattataactgaatatttatgttagtgttatgtggacaaattgcaggaagagagaagaaatcacgaggaggggagccactggatcagctgatgaccaggtggtatttaagctcagagagggtgaggcaaagatcaccttgaaaatagagagggaaagagctttcatggcaaaggaattaatatgtgcgagtattctaagctggggaaaaattttacatatttagagcattaaatggagctaagcatatctagcacaaaacaaggggacacagtgggatgatacagaattaaagagattcccgcagttaacagatcacacagggcattgtagccatggcagagtttattattttatcaaaagtgcaattagaagccatcgaaggatgtttcttagttcaatttatgtctttacaaagtatatttttacatccattcaaatggctattacatccattcaaatggctattatcaaaagaatttaaaaataggaaataagtgtttacaaggatatggagaaagtagaacgcttggccaggcatgatggctcatgcctgtaatcccagcactttgggaggctgaggcgggcagatcacctgaggtcaggagttcgagaccagcctggccaacatggtgaaaccccatctctactaaaaatacaaaaaaattaactgggtgttgtgatgcattcctgtaattccagctactcgggaggctgaggcaggagaatcggttgaacctgggaggcgaaggttgcagtgagccaagatcgtgccactacactccagcctgggagacagagtgagactccatctcaaaaaaacaaaaacaaaaacaaaaacaaaaaacaaaaaacaaaaaaactagaaccctcaagcatagctggtgggaatataaaatgatatcattgctgtggaaaaaagtgtagtggttcctcaaaacattaaacgtacaattaccatatgatccaaatccacttttgtatgtatacttgtcaaaatgaaagagcaaagactcagacagatatttgtacacccatgttcatagcagctttattcacaatagccaaaagatggaagcaacccaagtgttggtcaacagatgacagaatacacaaatgtggcatacacataccacaaaatattattcaatcttaaaaaggaagggaattctgacacatactacaacatggatgaaccttgacgatattatgccaattgaaaaaaccagacatgaaatggcaaatattgtatgattctacttaaatgagacatcttagagtagtcagattcattgacatagaagatacaatggtggttaccaagtactagagaaatgatggactgcagggttattgtttaatgggtatggagttttggtttgaaaagacaaaagacctccggagatggatggtgatgatggctgcccaacagtgtgaatgtacttaatgccattgaattgtacacctaaatatgattagaaatataaatcttacatatacttcaacacaataaaagagaaccactatattttatgctagatagaaaggaagcaaaagaataatagggaaaagagaagaggctactgctgtagtttattattaagactatgatcacttagtggcaatagagaggcagagaatctcaggatttaaaacattttaaaggaagaggctgcaggacttacttgtggataacattccagttctttgtattttgaactctgatatacttgaagtctgtagaccacacttgtgggggtaaaagactggcaaaatccctttgactggcagatgtgtttaagcttgatgtcttggtgcatgacaaggagagctttatttttaaactcttcagtagtcttggatggagtatgggagctattgctgttgacatgtgaatatttgcctgaactgtcatacagcagtcatatgctcagtgtgaacgtggcttgtcttgagatttgcagtgataactagcatgtggctagagttgttcattctctcccttattagtaatgcgcgtcttccattagcatatgcaactaactactcccgttcccctgtgctgtgttgacattcattgtaatgatttattatccaagctaaataaccctcaatatgaaacaacaaacatgcctatgtttgtgttttccattggttttgttttccctttctggcttccacataagtagatagttctttatgtgatgattacatgctatagaaacaagcaatgggaaagcccactagaaaggttaagaatgttggtaaggtttatttttaaactattgaaaatccaccaaacttagtgacatcccccattagtgccttggaatttaaaaaaataatgtagattattaggaaaacgtttgttatgtgcaaacactccatataagacttaacgatctacgaaagggccacatttgggcttcctatggagcctccaaagcccttagaagctttattttatttatttgggatgtttccacgattatctcaaccatcaggagctcataatggttatgaagtggtagagagtggtggtggggatcccaagctctaaagttagactgcctgaatttatataccaacaaagccactgactgtgtgacctgggattatttacttaagttccctgagcctcagtgtccctcttctataaaatgggaacattagccatgcctttctcatgagattcttgtgatgattaagtaagataataaatgtaaagctcttgcaacaatgcctatcttagagtaagttctcaataaatgttagctgttattagaagttctcagcctctgttccctgtaacttgggagacgggatgtataggtaagaaggaggaagattctagagggtgcggctcatggtcactttcttccccacatctcctaaacagcagctctgtttttggtatcaaaaatctgaaatagtgttactttacagttaaatcaacagaaagttgttcagttgatgttgaaaactatggaatctcctttttaaaaaggtaactttcatgatccacctcttaatgctctcagtttttatactctgtttagtttttattgacatctctgtcatggggcagctcatctagacaagtttattgaaggcaaatgatagtgatgactatggtgctttgcacacagattgtcaataacaatctggttgtttggggagcacttagaaatgtggttcatgcatgtgtgaacctcgtcagtgtaagttttgtgccatttaactgataacatttcatcctcactcactctggtcattttattttttattgaatgtatgtagttacattttggtcaccatgataacatttaacatcattttggacactggggccttttcattggctaatgataatttctgtatgttaacatcacagaaaaccaattgcattagattttatccagttaaactaccttacctggcttactatggcagttttgttttcttgtttttctgtccagttgccacttaaaaactaaactggttattcttgccgcaggcttttccccagtagaaaattgttattggtgttttgtaagtatcgtattccattcaaaggtaaaaggctccttcaacttcccatttttcctgtgattttttttctatactatgtctgcaaatcaacactcctgggctcaattaaaatatgtatttagtcactggacttgcagagaaatgatcaaacttgaatagtaatacccaggctattgcctatgaatacaaggattgtgtccattgagggatggctttcaagacaatggccagtgaacccaggatgcctgtgggattattagagcttggtgtgggtctaaacctgaagtttgctagtttttttttccccagtaaagacagagtttgttgttcactaaattcacaattgtatggctagaatgttcacatgggaaattcaaagctactttctgtcttcccagtgtctagtgatcccatctgccagaagtttattttcccaacatgtgctccaaggacctaacacattgcatcaggatagcactaatatttgttgagttcttactatgtgtcaagctctccagtcctggctgtggaaagaatgatgaacaaaggtaggcacagcccctacctcatggagaatccattcaaaggattggaagagggagtgatgtagtcgtgggaatcaattgggcagaacagcaaaggcttagtgattaagaatgagtattccagacaaggaaagcaggatatacatgactctatggcaagttagacaggtggcaagttagacaagtggggaacaaggagaagttacggatggctgcagccaaggaaagcaaggtccaaagtgattctggagaagcgataagaaccagtccacctaagcaatgttaggagctttgtcttgactttttataccaaccttagtgcaataataggtactactgatattcgttttccaatgtttaagcaaaagtggtaaactaacttcattccttacttaggaagtggcagatgtgggatttgaaccagaacttgctcttgtaaccaccacgttgcacttcgtctgtaagatgcatgcctaaaatttttatggagttttgactcacagcattattatccagtgtcaatgtggtcttcctgtagggtctgttacgtaagtctgccattggtttgcttttcattaaaaagaaatctaacttctggaagagtaaacgggatacaacacagtaaacttctgaacagctttggttatctgtacactgaatcctgggtctctaagactcagaggggggcttaaaatgagggtttgagggctgttggtcccactggggaggaccatggctgagagaggatagtacagctttcttggcaggttccaagttgtaaagcccaaaattagaatttaaaggaggcaaaaattgtgtatcagaaaatgtttcaatgcactcaaggaataaaaataacctgagatttaatatgaagagaagaaagaagagaataaaagaagaaaggagaggggagagagaagagagaaaaagagagcaacatcactacattataaggctacttcaatcggtcactctctctctctctctctcaacttttagtctgaagctaaacacttgatagattagcccagcactaaagaaaatgccctcttttatgtgtaaaagcttggtaattgctgcagaaagatacttagtggatcctaatattcatataatcagattagttttgaatcctacctcagcagaggatgttggaataatccagttcatgcctgtttaccttgtctgtgtgttcactttttttctagtcattttatcttttccgttggactcagtaggtgctagcaacaaagctaccccagtatcttagagaacaagtcaagtaccaattcaaaaaggaaggaaaaatagtagatttaaatgtttgaagaagagtagggttttgtttgttattttgtttttgcttgtttgctcctttgcattcttggtaacaattgaaacaattctatggctctcatcctacgctactaaaattttgttgggcagttaacatctcaattcataggcaacagtctcatgaccaatcctctctgagctttgaacatatggctgcatctgatggcttcgctaatttcaccagggagagttttagaagatctctatttgagggggcagccattacacagatgagtgatacactgctggaattaattattgcttgccaagtttaaggattgattcattctaaactcagagccaaaaactcatcttaaagctgaaatgtttttgattcgctggttccagctccccttcacagaccctctaacctagcgccatgtgtgttttgctgttgagggtgaactacgtatctgaatgccctagtttgaaatgcgctttctaattatataaatatggtggccatacagtacctgggacttataattaaggatgatcttaccttgcaactccaggcttccttttcttctgtgaaagcttcctttcttcctgaaatgaaagtggcatttcagccatctgttgtgggctgctgtcaataaaagaatccaatcacattttacccacatgattctgcatgaatagtaaacttggtctttataaattaatatgtgttccctggaatttaggagtggtcttcagtatttctgaactttcctaagatgaataccacttgagaaaataatatatcaaaaatattataataattgctggaatttaatggagaaaagtggcagagattatgggtgaaagctacaggtcagttttggaaatctacctaaaagcatgtcagttgggtgagcttttttctctgaccaatgtatcactgtcaggacatcacacttatggcttgattagcttttttaggcagcatggctctctattcattgtggaagttatcccagtgggcattctcctaggtttccctggggaaagggtacaggccaacttctctcattttatgttaggactttgaagtctgacgttttcaattacataccaggcccgacattttctttgaataaaacacttaccaagtatcagacccacttttttttttttgcagtttataatacaaaaagcaccctattaatagtttgcttcatatagattgtcaccatgccaagtttaagcacctataatagccaggcttgcatgttaaatagaatcagtattctgttaaccagaagaacaaataaaaccattctcagttttccatatgtttaacctccttgaaactactgacaggtcttttattttggaagtatattttacacggaaggagacttcctaaatatgatttaattcttttctttcctccagagaaataggatttaaaactttgtacttgtaccctccagaaatggctcaaccaaacagagtcaaaatatcagagcagtgaaaaaagatgctatattgtttcagactcaagatctgtctcttgtgataaagagatttaaattctcactgctcaccaagcaagagccaatctgagccatggaatatattgaaatgatagaatgctttcaagtttagcatttgtgtgtgtgtgtgctccatggttgaaaattctgtttgagaaatatggttagactattttgacaatttttaacctgcttaaattggattttttaaagtgcacaaattgatgttctgcctacttggagaatgttttaaagatatcaagacttcaaagaaaaacagtgagagtaaatcagatgcaaacatccctgtatccatcctagcaaaattagtttagtatttcctagggcgatgctaaattagaatgatgctcaggcattagggcaagtaccactggtaatcatcgtttttgttatggggtgggaggtggctgagaaaagaaaatatattttcctatcttgtaggaatcaccaaatgacatcaacttcatagatattttctgaggttacaattgagaattcttagtgtccctgccactgtcatggataattgtgtcattttcaagtctcttggaatttggggtgttgggtggcctttcttacccttgttgttctttcctgtcctgctatttggtcatcagatatcattctctctcttattgcagggtaaattaggtcctgaaaatggcaaggagtattagacaagatttcggctccagaagctgaaagcattttttttttaaatgaagccagagagatggagtgatctgcttgataataaagcttagctttaatgccagctccatgctgttacagcatattactaaacagcaagaactgtggcacagatgttgtggcggccatattttacaccatgcaaaaggtcatgtcgcttgttattacattcagaatcaatattaagtgagcgttccaaatttcagctgtcagttgaatttattgctgcaaaccaaagctgaagggttctcgactgtgattcaagcaagctaacaaattaactaatataagggcatgcctagaagatgcaggtgacccacatgccaacagcaaaagcttggttcttacattgctgcaagaaagagctgctccagctgccaaccagaaacaattgtcatctcaataataaaagggagggagggagggagggaggaaggaaggaaggaaagaagggagggagggaaggaggaagggagggagggaggaaggaaggaaggaaggaaggaaggaaggaaggaaggaaaattaattctcaggtggagttaattcaggtggatgaaatatcctgaaggcagcttcttgagataaaatatgatgtatgcctatctatctgacaatgctcaagatcacagttaacaccccttagagtttacttgcattgccaaattagtccaaggatctggccacctacccttactccatggtcttctttagacctagacgtggatgcattgacccaggtgctaatcggactatccttttcatctcaccatgtatcatctcaacagctacattagggagagtctttcttatagtcagctctagaaaaggtacacaaatatctaatagatgaacatccatttaattcatacatggatacccctgggttgcctaagatggtttattaaatggaatttgagaattccaagttaatgagaagaaactataggtaatatccaatcactaggtcaagaggggatgacaaaagtctcagaaatgccataccagtggattctgtgcataatggtggatgagtaggaatttcgaggactgtcagcagcaagcctgagtccccatgcccatgggtttctctgaaataattctcaaaacatatccttaaaactgtctatgtccatgatagtttccccccagtgcatctgttaagacagtgagtgttgcccaatttgcaagttgtccaaggtatgcactggggcttatttgggtgtgagatttttttttatttttattgtttttgagatggagtttcactcttgttgcccaggctggagtgcaatggcgcaatctcggctcaccgcaacctccacctcccgagttcaagcagttctcctgactcagcctctcaagttgctggattacaggcgtgcaccaccacacccagctaattttgtatttttagtagagacggggtttctccatgttggccaggctggtctggaactcccaacctcaggtgatctgcccgcctcggcctcccaaagtgctgggattacaggcatgagccactgtgcctggccagggtgtgaggtcttacaagaccaccttgaaaccagtaagcaggaggaaaccaggttgtgtggcccttgtcggatggaatttctctcttaagaatttcccatcacagttggaaaaaaatatcatgagattttgtacagataaataagtctccaaactgctggtaatgcagaactaggtttaactggggccctcagcttcctgacaaaagcaggactcacttttgggtgttgactcttattctgccttctgtgacaaacaccagttataatttttaattgactttactagaagtgtttaggaaaaaaatctgtaattctagtaaataagtacttcagtcaaggactgttcattattcaagattcaataaacattttctgagtacctactctgggcacattctgtgttcagtgttctcggattaaaaaaaaaataaacaagacatggtccctattctcagagactgggagagaaacaggcatatacaagtgaatacaatgcagtgtagtcagatgtagtttaaaattctgttaccttagacccagcaggtttatttctaggaatttatccagagaaacagtgtgcaaaattatgtttaaatgaatgttaattgtatcatggtgactggcagctacataggtgctcagtgactgtttattgagtaaataaatattattttgaaccattttcaagagcagagatgggaaattctaaatgtaaaacaaagagggttggttaaatatgacatctacaattaaaataatttggaggaataaatatttgtgaagaatatttaatggcattaaaaagaattcctaaatatattgttaagtgaaagaagcttacaaaataatatatgaattatgattgtggtcctgtgaaaggaaaaaaaaatccacacacacacacacacacacacacacacagaagagaagcattcttatcctatatgactaaatcaagtgatggttggactaaaaaagtaaagcaaggagtcataaaattcagactatatatatcaaatgttttaacttaaatatagaaaaataggccaggcatggtggctcatgcctgtaatcccagcgctttgggaggccaaggcaggtggattgcttgagtccaggagttcgagaccagcctgggcagcaaggcgagaccccatctctacaaaaatacaaaaattagctgagcgtggtggcgtatgcctgtagtcccagctacttggggtctgaagtgggaagattgcttgggcctgggaggtcaaggctgcagttagccatggtcgcaccactgcactccagcttgggcagcagatgagaccctgtctgaaaaaaaaaaaaaaaaaaaaaaaaaaaaaaaaaccatatatatgtatctatatatatatatatatatatatttttcattaaccttatgctacactgatcttaaggggcagggccaacctttctctttgagtgtgggattgtttctttcttgcataaaccactcccattaggcagcatctatgattttctatttcggttctttaaaatagagcaagaaattaaaaggcttacaaagaagtctgaatcctgactccttctagatgtttacatgttccccatcatttttttccagttgtatccatacctaatttgacagcattgtttgtagcaatttgcatgcattgaatgtttttcaaaagactgaacttaagaaaacactttgtttttacactattttatgagttcatgctatatttaactgaattgtgaaattagattaaaacaaaactggcataaataagtttgagaataaacacaatttacaggagtagaagggggagggttattaaagactggcctacaagctgcatgctatgcatatgtttatatgttttacagaggagacagagagtgtgagctaatctaagtcaaccaaatgaaagtccactgaggcagctttgggtgtgtatattagcaaaggagagagaagacagtgatggaaagaatggaatctcaatgttgatagtgcttatctctggaaggggaaattatgatggatttgtattctttttctcttttcctatattatttaaattcatacaatgaataagtatactttcaaaagcaaattattcatttaattaatttattttttaataaataagtattagaaataaaagatgtaatgtgcctagcactgtgctatttgatccaatcagtgtttgggaggtggtacgacatatttgttagcaatgctctctttgtatttgggttccctggccttgaatctcagccctggcacgttttacatgtgtgattttgagaaagttcccttgaaattctctatagtgtccccgtttgtataactgcaaaatagagataacagtaacagtgcctaacagccagggttgttgtgaagatcaaataaagcacataaaaatcttagaagagcatgtgatatgttaagtgcttatatgttagctaggtcttgtttagtattatttttcttatgtcagaaaaggggcttaatttctaaacagtgagccaaagcttagctcttcatgtcattcacagaaaaaaaaatgcaagtaagtaaattattaagtaacagcatgtgtgtgcttgtccgaattctgtgggataggggttggaaaattatagtccatgagccatctaaccaccagttgcctgtttttgtaaataatgttttcttggaacatagccctgccattcatttcttggctggtcctggctgcttccttgctgccacagtggacagagttgagtagttgcaccacatggactgcaaagggtaaaatatttgctatctagccttttatagaaaaaatgtgctggcccctgctgcaagggatccatcaaggtagtctccttgtaggctacagtaaaaagagaaagcttggtgagctaaagaagatttgaagaggtgggaggaaagaaaaccctgagatatgaatccacatcatggatgcatggattctgctgaaaccaacaagagccatttatgtggaggagaagtgttctgaaagaagaaaaagtttggccaagtagggtaggaactaatatgaagacctttcttgacagcaacaaaagtattttaggtctagtgtgttgggcactgagccattacagagtgttgaacaggacaaatacagagcatggcttaaaggagattatctgacagtggtatgcacagggattgtaaacctgtaactggagagtaactcggtacctgctagagtcatatggttgtgagaaaatagggtttcagcaagagtgttagtgggaggggatagaaaattgaatttcatatagtcctttaatccttataagaatgatttcccacagtctcacgaagaaaacacttgggtttttttccctaggaataagcacaatagtatatagtcaacagcaaaatttatcattgttagcagtatagcacaatttttcctacaaaaggaattaaaatgataactacaaaatgggatacttaatctgggtgaaaatgtagaataggcttatgatgcctttctttgaaagtcatgtgtgtgtgtgtgactgcacaagatttagtttggggaagcaatctgaaaactatcttacttcatcaggatgccttctataatggtaagatcttaccttgccagttgtcaacgtctgatctgacttgctctctacttagcccttggctaatggtgtaagcagcattaacgcatatcaggctgtcacccagagttcagagtttctttagagtcctttattgtggtacagaacatcatgatggcaatgaggtggaaggaagaaacttttcattctaaacataaagtgaaaagaaaagtattctcagcacacaacctctaaaacaccaagcgggccagcagtggtgagcggtagctctgcctccttcctggagggtgttttgtgctgcatgttgtaagtagggactaatgtgaagacctttcccaacagccacaaaggtattttaggcctagtgtgttgggcaacagggacccatcacaggctgttcattactccagcctccattgacaaaaagtctttagcgactgcaaccaagaagcaaccaaacaacagagatagtattagaagatatatttattgtcctaccaaccaagaacctctctagatttcaatggggttaggtgagaggagtggtggaggatcctcagtcaccttgaccattcattgtgagatcccaaaatgcacttctatggtgtctaaaatttcacaaaattacgtggggtgagaaatgagaacatgttacttcatattgtcctatacacatgactttattagggtctgtccttcgtttgtagtcttggcactcactaacttagaatcacattatctaaggcaaaactacttaaataactgagttttaggatatgtatcagtcagtggctcccctcttcgtgtttgaatcaagtaacataccagaacaaacaagtctcagagagaaaggctttctgtaacattttagataagccctggcattgcaatcatctcctatggatactgctgacaaattctgtcctgttcccagcacaactttagagaaggctacaaccagctggagctgggtagtggggagggaggaaggaaacacagccactgttacatttggccacgaacagtgttgagccatttttcaatgtaccaaatgttctaataaggccacgatcaagttccagttgcctcatggcaaatcttaaatatcccaaatttgtagagagaagggagaagttcccaaagcatggaataaacaacactggtgacactccgggtgactctaggtggtttacacacttggcattaagaagcactgaatcacacagcacaaatgtttttcactgattacactctatcagctcttcttactttgtcaaggagaaagcctctatttgatcctagcatgtcttacttcataacagtcgatccttgtgattcttggatcccctacttgctaatttgccaactcacttaaatttatttgtaacctgaaatcaaaacccgcagtgctctcacagtcatttgcaggcatgcacagagcggtaaaaatcttgagttgcccaacgtgcacagtcccagctggagccaaacaaggcaacactctgccttattgtgtcagctctcatatcgtaaacaagtgtcctttcacggcctatttagtgccatttttcccacatttgtgtactttttgttggtgattttgctgtttaaaatggcccctgagcatattgcttgagtgctgtctggtgatcctaagcacaagaaagccatgatgtgccttacagaggaaatacatgtgttggatgagtttcgttcaggcctgagttgcagtgctgctggccatgagttcactgttaatgaatcagcattgcatattaaatatggtgtctttaaacagaagctcacatacaacaaagctatgtaataattaattgataaaaatgttgtgcccagagactcacaggcacctaactctgtgtttcctctaggagcaatgattcagtattctctaattcagtgttcacccttgctgacattgtaaaacataattactgcaaatactgagacccaactacacttacataacacactggcaatagtatttttgtaagaatttgtcaacacttttgtttccacttatttatttgtttttttgacatttttattatttgttcttgctgttaccttctatttatatcacaaatagcacttaaaatgtccctatgttacaggcctgctgcggtggctcacgcttgtaatccaagcactttggggggctgaggtgggaggatcatttaagctcaggagttcaagaccagtctgggcaacatggtgaaccaccatctttacaaaaaatgcacatgttagctgggtgtggtggcatgcacctgtagttacagctacttgggaggctgaggtaaaaggatggcttaagcctgggtggtcaaatttgcaggaagctatgattgcaacactgcactccagcctaggccctaagacatagagacaaggtcttgtaaattccatgttacaaaatagtgatgcaaaatttccaaatacctttattggagcaaaatgtgttaatacaaagaaaaaatattaagtaaataataataaaggtactacagtattaaagccaaaataatatgtgaaggaagtaggcaagaaataagcttatgatccctgggattggagagagcattcattcttctcctttcttacttactgcctccttagagtctagccctatagctgagagcgagtttaacagaggtaatgtgacttcgtttgctgagaaaagaaagaataaatgaaagtgatcaggtgagtatgtggccattctaaactcaggctataggcctcgtagagtttagaatttatgaaaatcacagaaaagattaggagtttcctgcattggccctaagtttccttagaattaaaagttgggctggtcgtggtggctcacacctataatcccagcactttgggaggccagatggcttgagtccaggagttcaagaccagtctggacaacatgacaaaaccctgtccctaccaaacatacaaaacttagctgggtgtgaaggggcacacctagctacttgggaggctgaggcaggtgaatcaattgagcatgggaggtcaaggtgcatgagccatgattgcatcgttgcactccagtctgggtgacagaatgagaccctgtgtccaaaataaataaaaaaataaaaataggctgggcacagtggctcacacctgtaatcccagcactttgggaggataaggcgggtgaatcacctgaggttgggagttcgagaccagcctgaccaacatggagaaacccagtctctacttaaaatataaaattagctgggcatggtagcgcatgcctgtaatcccagctactcgggaggctgaggcaggagaatcccttgaacccaggaggtagaggttgcggtgagccaagatcgtgccactgcactccagcctgggcaacaagagcaaaactctgtctcaaaaaaaaaaaaaaaaaaaaaaaaaattaaaaagaaaataaaagttggcttctgagttactgttaataatagagctcattgttcatcaaacttggcctctaaagcaaatcctgctttagatggcccaagcaagctggctccctcttgttttataaagatgccccatgtgcagccctgggaaggtgagatgggaagatgctctcaccatccctcagtcaagtcattgagatcatttccaagttcagctctttgcgtcacactgtccttcaaccggctttattgtaaatgcaagagaagggaggtttttggcacttggagcaaaagatgtaaaaacaaaaaaattacaagggagcagtcaaacagaaaagagagcaattaaagagacaaaaagtccccttagctgccttttgggtacttttttgatcttttcaccaaggaattagtagcttttaattttccccacctcagcttaaaagagtgctggcaggaaagaaatgaacattatgggaaggctgctttggattaaaaagcaaatgtaggtgagactatcaggcagctgtcagactccatgaacacaggcctgctcgcccagctcagcagccaggttattgctggacaacaaaagtccccaatctagaagcagtggctttcctcagccttatttctaataatcaggtgcatgcctccacttggcttgatattttctacaatcgtctggcaacttgctgcttctgccacttaaaagtggggaaggggttgcttaatttttaaagcacagtgcatctgaatttgagtgaaagctcaggtccttgttctcactgtggaagatgaaacattgattggcttcaactagaaacaggttttttttttttttctgtcttttgtttttgtttgtgtcttttttcctccttcccccaggagggttgtgttcagcagcacacaccgggttcagcccacctagcaagtccaaggagaaggggtcatgttcatctgggagatggtaagggccaggcctgggcagtgaggggcaggagtgagccgtgtttgtggatgatcactggatgctgcagggcagacccacatggcactggcggcagagctcaccattgggaaccagagtacaatatttcagaaggaagggtttctgaaccccagtttaacaagccctctacagcaccagttgcaatccccaggaaactcgttaatgcagttagatgccacggcagtgtgcacttaagacagggaagaagtacagctgctcttcagctccgcggatgccaaagcagctcctctgttcattagcccagcctcttcctctatactgaccttatggagatgctgctggccttctgagaactagtagaggcaagcttccaaatcattgtgttgtttttagcattacgaaaccatcagccagtatctgaagggttctttgcctaccagcaaatcgcttggtcctgctgaggaatcacacagatggtgtgggagccctgggctccctcccagggtgcgtgtctctccccaggggagcaccccaaggtggcaagaagtcccccggggggacttgaccagggccttggtcaagcttagaggtgcagtgtaccccaaatactaatctggaatatatggagtatcagtcaatgtttgtgactaaataagagggagattgagggatgcttggaagtcactgagccaagcaggaggcaaagctaaatggtccatctattgataaccttgtgaaattttttgcaatgaaattaggtttaatttaattgagaaaaatggacagggacccagcagtgtcatcgttgcagcaacagttgtaagcatgggtgctagagtcactgtctaattcaacttctgactttgtcattaatgagtttttagactttggaaaaattgcttaatctctgcagcttcagttttcacttttgtaaaatggggaaacaaatagtgatgccctgaaggggttttgttgttttggggggtaaagaaataaacagaacaatgtgtgtgaatatgattaacacagagcctagtccatagaatgtatgtagtgaaagctcaatgcttgctgctgcttctcctcttcctcctcttctgtgattaaattatttaaagcaggaataatggtttttatagaaatcatccccctttcattttaggctaagtagcatactacagtcatatgaaccttaattgtgatcacacatacaggcgtaagcggaaagataatatagttcctgccttctgggtgtttacattcctagtagtctctgctcacctgcttttaaccttctccaggataatgagttatgtgacttttgggtgccaggtatataaaaccatgttttcctgtcagccagccagtgactataagaattcacacatttgcatttgtcattgtaattcttttgttccaaaaagaggtgaaaaaaaggttaaaaggaatgtcatccattggaaagatatatcaaaatgtgtacccgtatctcatcagaacctcacacagaattaagagtttgtgttatttgggtttcaatttaaggtagagaatcaaaaataccagtgacaaatgatttgtgactcctacttaatttattcaactccaaatgatttcaataaatctgggaattcatctatatcctgttgaattaaggtttttttttttgaattattctctctaaatatgcttaatcttcattaatgcagccctgcatggcattctgagccaaagtgaactaagaggaaaattttttacatttctaattcttaaaatagacagaatttctttttttcctactacacagtctgccaaggcatgtatgtatagagatttgatgtacttgtagagtttttctctctcattcgcctatcctgttttatcctagcacactctcatttctggatatcacgtgatgtgatttaatgtggtcactgtattttctttatttcttccctttttcctcagtgccacaggaagatgaatcaatgatctattaatatgcatttcatttggggaagctgttttaaggaagtttctttcttcccttttttttcctccttgctcatgtagctaatgaaacaatatgcatttcaattccaaggctccctggattcagacctagagagtagctaacacacaattgatttctagtcctgcaggaaaaggggaagcagtagagaaatcagatggattgatcgctgagaaacaggacccatgggatgcttcactatcatccatgtcttgaatgtatgcacaatcccttcatcaatagagtaatccccaggataggaacttcatagggtccagatggtagttcaagtaggcaggtgtgttagcctgtagtttgtccctcttcaggtctgctctgccataataaactgccaaaataaatttacaaattcagactttagaaactggcaaatcagaggtagaatgttgagcagtggtgctgacatttcctaagagagcattagacaagggacagcaagctcaaatgtccacaagtaccatgtaggttggtgtgagacagtaagtgttaaataatttctgtccatccctcaggatagcacctgcctacttactttgtgttataaagcatgagtggggtgggggaaaaatagccaaatgaaacatatttatgggtcatctttatcctaaaacctgctatttgtggtccctgaattaatactactcatcattttacagaagaaactcaaaacatgagaaattaaacctccttacccaatgtgtcacactcagaatttcccaatcttttcacatttttttttctgtctctgacgccatgaccaaatgccatgcttagagttcaacttctagttttggaaaaccagcctctaatgcctcaggtaccaagcctctgcagaatgctattgtttacactattagacaggattctctctctcacaaatggcagaggctgaactccagctggctttggcaaaaattaaaggtgaattcattacctcatgactgagaagaataagacaattctagctaacagagtgactggacctatgttcatctcttagctcagttttctctctcggccttgttcttaagaagaccctccattgtaatgacaagataagttccagtatgcctagacttacatatgtacctgtttaaaaacccaaccaaattgtcctagagcttctctttcttaatggatacaaacaacacactcctaagattgaatctcattgaataacttaggtcatgtgccctttcctaaaccactggctgtggccaggagaaaggaataaactgaccaggctgtggaaactccccactgaacctcctggcctggaaataaggagaaaagattgagaccttggtccaaaaaaggggatgggaatcaggcagccaaaagcaataattaccagtcatgcttccacttcacactctgtttgttcagagcctgtctttaccacccaggagctttaacttagcacataggggtttggactttgttgggccacatctcagagctccccaaacctatcagaagacacacactgggaattaatacaactttctatgactcaaatgcaaaaagttaacccgttatagaattctaggtttctccacttttcttcactcttctttaacatatgttactaagcacttagtaaaatactagtcactttgctaggtattaagcacttaaataccagacacttgacaacatgctttattttattcatacaacaatcttgcaaagcagagatgattatccccagggggcaaataaggagcatctgctgctgttcaaggttctaaactgtgttccaaggagccatgagattccacactcaggagatggggggactgggagaatccaaagtgtagatcatgaggccaaggcctgatctccatcagagcacttcttttgttggtcttacatttttaagttttccatactaatttttctaaaggcattgatacttacattctttttgtgaaaatcacttagcaagtaatgaagttattttactgctcagtacttgtacaattgcaaatgaaagaattctgacttaacctcaaaaaaatgatagaaaggtccaggcctggctgaatccagagcttcatgaccggggcttccttctactcaaggaagtttacattctttgactccatgtagaaacaggatggatatctatcatgctttcccttctcactttgttcagggcctgcatttcccacctggaagctcctggcatccatcctatgttctatcaatctcagcagagaaaaggctttccttttccagtgattccaacaaacaccctgtcactgagtcttattagatctttttgacctagcctacatatcatggctgtccctgtcctctgtggccagagaagtaccatgctttgtttggccatggtggaatcaggtgttcacctgtgcaggtgggaatggagacaaccctcgggaaccacatgggttgggagtgtgagtgagttgccccgctaaaggaaaactagaggattgttggtgaaggtagaaggtggtagatgagagttcacttgcccaccaccgctgtggtagagctgagatcatagcatagatctttaatttcaaatgaatgctgtttctaatgcttcatgttacttctcttttgtccttgatatgcctttaaaaataacagctattaagtttttgcttaattctttttattttaccatggcaattagtggtggatgggtggcccaaggaattttctgttttccaagtgggtaggactgtttttatttactacactatttgagaagacacatgcatagctgttagaggccctacttttgacatcagaaaatgggttcagatcctgattgttattgaatgactttgtatgactttgggccaattgccttactccagtcccctccttcataggatttttttgaggattaattgaaagcatatgatacagaaaatggtctcagcacagttgctagctcctagtattgcttttctcttccttaacttgatttactcgcaaggattatttaaattacaaaattccttaaaacatgggatgcatagattaattgacagtaaaggaatctgtgaaaacatttcttcaattaaatctattgcataaagaaaaaaccacctgatttacaactcattattgtgatgaaagtgtcattagtaattgttggcagcatatacaagccacagtgaaatgccaaagaagatctcagaaataaggaaaatatttcagtcctctgagagtcaaagaggtaaaactcatcacataacgggtcttcaacaacacttttcttatagatcatgtattaattaaggcaatgcaagctgtggtaacagaaaaacttagatttccagtgacatagtgtctctcacgctcactatggtccaatggccaaaggtccagtcttctttcttattatttagggctcttccttagatcatcagcttcctctccattcagccatggcaaagtcacccttgtttctcgattactgagccaagaagtgacttacgtcactcctttccattaatggtcaagtagcccttcctagatgcaggtactaggaaagtgagtcctaatagcaactcttcaaaatgacaggtaggaattacaaaatctttgtgggtcaagctgatcatacctgctgcagctctaccccactagatctactacacgtcctgtgatctacgaatctacgggcatcttgagaagaaccactgtgtcttacttagcattgcctccaatgcacagcatagtacctggttcataaatgttttctaattgaacaaaggtatcaataaaaaaactaacagataatcaggctaggcctcgaaaataatttctagacaaaaatttgcaaccacttgaaatccatatttttcttttcctggtctctgtccaacttgtctgatatggaagtaaaagtagggtaatgtaaccctaatagcccctgaccagagaactcccaagtaagagctacccattgtgggaagccagaactagtcgtaggtcagtggctgcttcaccctcatcccaattgctggcctatttacaaagttaaactcacttcattcctcgacttgaatggatgaggagccagaggtaatcctggacaggtggaaggagtggattccaacatttcttctctggatcgcccagccaagtttggctgctcctggtccatgggtctgtcctcttccaggttggttggacactttgaatgtcctgtgcttaatgattattatagcatccacataaagtcatttgggttggttttctttgctgctgctttgatcgtgttgtttagattccagcccgctttctctcataaaccatcttagtatgtgctttcatttgtttattttcagagccaacaatattctttggtactaaaggtagtttagagaagtagttaagaatatgctgtctgcagtcagactgccttaattcaaatcctggctcagcttaccagcagaatgaaatgggactttaataagagctccttctctagcaggttattatttaaaaatagtactcagcacagtgctggagacataatatgtacttaataaatgttaaccagcatcgtttttattgtcattatacaattttcatactttaccattttaaacaggactagatcccattagagtttacagataaagaaatgacatcaagacagttgagtttcccattgcctggtttcttgatttaacctctatctcagttctttgagtgtactttttgttattaacagacaaaataaaaagcagacttttttttttaaagatatgatggagccatgccccggctttgattcctgcacagagcttccgttcgtgtcagtgcgatttctctgcatggattgatggcagaatacggtctgtttctaagactgtttaaagcagggcacaaaagaaatcacactggctgagtccacagctggcaaaatgggagagactaagctggtgaaagaagctgttaatacagaccagaaaatttttaagctaaaaaaaggaacatgcccactgaaagtctgaaagcaaaagttttatttgggtaaagcgatgttcgactctgcatgattcctacttagaaaatgcacacgcttgccttctccaactgccagaacatcattttttaacacagaggaacgaaaatagagagaggaataatgggctttcagatagtccatgccgaaaagcaaacctagaaacataaacgttgcagtgcctggacccttcagattataaaacagggaactgttctcgtcacccctcagtcccagaggtgcctccgccatcttgcaccatttctgtgggaaccaatattattagcaacatagattccaacagagacatgacgttgtggaaagaggaggcgctcagtttccaagtcactttttggcactcctttctctaaccttctccgcataggatccctgcaaagacctttgccctaagcccccaggtggcaatattcctatggggcaaacattctctgaaaacaaggcttctccatcaaatgctttctacattgaatacaaaatgtttctctatcactggcagagtaggcattcagtgaccacattgatttttccttatttgtaatccagtgaaaaatatttttgcctttcatttttcaccccaacccccagaatatgattcaaaaatctcatggccatgcatgtctctgccagaggtttctatttctctgtatctcaatagctgcccacaagaatgtatttggcttggattgtaaaccccaagtgtgtgagcctagagtcttggtaatattcttagaatttatctagcaaagcactatgccttcaataaaagatcttgagtgatattttagctattatatttcagttttttgtatacttttgatttctctcatacattgtaaactcctagaaacagaaactattttttatatgtatgcaggtgtgtatttttataatctgtgtatcttatgtataatgtaatacgggtacacattacatattgaaatatgtaaatattccacaggatggatagcaaagtgctttacatatagtaaattctcatagatatgaaatatataatatattatatatttatatataatatattatatagattatatatttataatttattatatatataatgtatatttttatatattataatatataaatatatataatgtatatttttatatattataatatataaatatatatatagaaatgaatgaggataatggttgtgtaatacacaggaaaaacaattggaaccctaagtatgatgatcccaaattcttcaattaagaatcaggaagagagatctagtcttgatttcagccctctctgatcatttaatgaatcaaacctgtcttgtatgaccgacatagtgcttaagaaagtttggaatgagtgagctagaattaaaaacaaaacacatctagatttccaattgctcttgaaacatcagacagcctgaccgctgggccacatccccatgtgtctcagagtcatgtggagtgcaaaggcagttgactcttcagatggaacatacattttccagggagccatcatccccactctccatactccatccactctctcatcatccctactcacctccagcagtgaggaagagtgtcacttaccatttacaagatcaaggttgaagtattgtttttcctgtggtaaagaggagagtaaactatttgttattcctatgcttctatcaaaagtggacaagtgaaaagcaggtcaagacagctgcaatttcacaaagctggccttgctcgtttatgggatcttcctaagccctctaggcaaataaatctgcaaaccatgccttaagtaaatcataacagccctgagccttcattacagcctcttcccagctcacaattttcctttgaggaaaaatatggttatggccatgatgttgtcattacaacctacacaggatcagccattgcctttggcttacaggtcattctgtgcagcctgggacagcctgaggatgaaggcagagactggtggcacattttgggaggagattctttctgctcagggcccatttccccattattgtttgtagcacaggtgcggaaagatatttggaacatatcccaaccagaagcgtgcatcaggagatgtgatcgtcacgtgtggctccagagggttgctcgagacttgaagacaacgtgttctgtccacctcactgactataatagctcctcgggagccacaaagagcagttgtgtacatccttaagtttaaggacttcctccagagctagtgtttcacacagtagaacataatggctccctgggaacggttaccagaggtcagataaatctgcatgggggtcttactgccttttttgaaaaatggaaaaaaaaaaaaaaaggtgactcatttttaccccaggaggtactgttctgttaacaggcatttacatgataatagcggtgtcagcatgtgcaatgttatgaaaagagttttgctctaggtccagtaacattttcacggtttctgcaggagcctgcccctctgaggtttcggtccctgactgagctttccaatttgtctcgttcttccttctgcccatcctgccacacacgaagtatgccagggaaggaaatcttttctttttgtacaaacacttcctggattccccaggaccattagtaaattatgagttccaactggcttttagaaataggctgggtgaaagagcctgtccttgctagtaaagccttgagagagctttgcccttcatagttaaattaaattctgatgaatattctcaccttcacttctgaggtagttagtgcaagctgggctttgagatcaagagaaaaccaagttcaaatctgaactccactacttcctactgtatgatcttgagcaaatgacttaacatctctgagcttctattttctcatctgtaaaaatgggttataataataatagcttcatgggatggaagaagagagtttttgaggtttaaaggagaaaataatgacaattattatatagccatacctagtagattatgctaaatacttaataaatatatagtaatattattatttttcaacttacctctttagccattctttcatctttttctccctttctttttgctaaaaccacatgtaaataatgtattatctctcgaaccatagtttatccttaagagacatcaagaggccaggtgcagtggctcatgcctgtaaccctagcattttgggaggccaaggtgggaggatcacttgagcccaggagttcgagaccagcctgggcaacatggtgaaaccccgtctccaccaaaaaatgcaaaaattagccaatcatggtggcacaggcctgtagtcccagctactcagaaggctgaggcaggaggatcacttgatcccaagaggtcaaggctgcagtgagccatggttgtgccactgcactccagcctgggtgcaaaaccctgtctaaaaaaaaaaaagaaaaaaaaagaagcactaagaagtaagcaagcatgaccaactagagtacaaagcattgtattgcagcatagcaaactttctattagtcttcactttcacttctgtatgcacctttctgcttgcttggagagaaatatcagaaaaatgttaataagccccaaatttgagaagtaagaatagaaaaatgatagacagtgaggaatatcgcttagggctcctttccccaacaattattattcctgaatatttaaattctatttctatccacctattcaattgaagaatatattacagtagctatgtcgcccaccagtccactcagaacccagataaaatccaaagctgcctctacaaacacacattacacaaatgctacaggtggtacacgtttgccaaataaaacacttgtttgagaaaaaataaacatttactttgggcatgacaaattacacgtgtttacttcaaagttgtggcttctgctggtgaacctgaaagggaaataaattgttttggtcctggcagcttaggcagaaaggtgataacagggtcacgtcatcagtagcaattcctctactaggaaaatgttagggaaaaattacatttgtgatggctcctttacaatatgcatttgctatcaacatgattggcaatgattcagtaggtgtttgctgattccttctgtgttccggttgctgaagttaatgtgggtgtatatgacaagggtcaaattcatgcaataaagagtaagatctggaagagtttgaaggaaggagaaagaagtaggcaactgtcttggggacatgtttcacatgaaaggtgagtaggagtcagattcttggcacaaagttagaaacactgtggaaaagaaaaagctgcaaggtccccttgaaagataattggtgcagggaagggacatttaggcaaagcaatgctaatgggaacttaaagcacgttactaatgcaatatggtttcctggattgcatcctgggacagaaaaacctgatgaaacctacaggttagttactagtaatgtgctgatattaatttctttcttttcacagatgtactgtggttaggtaagaggttaacattggggagactgggtgaaggtttctagtgaactcactggattatttttataacttttctatactctaacattattccaaaataaaattttattttacaaacaaaatcaggaatgagtgatactaagtagagcaattcattaagcttacctgaaatttgggtagatgagtgaaaattacagctgagattgagggaaggattggtgtcagatgagagagtgacctgaatgccagactggagaatcctcacccttagggaggtgtttttgttttgtttttaagcaaagtagtaatctcactgaagtatggttgtagaaagattaatgtggtcaaaatgtgcaggaaacacaggtaagaaatagagattggtacaggtggacaaatgaggaagctcttttgcaggaaagtgttttggggaaagataatatttatgcttgcttttccccctaacatcctgagaattcagtaatggtgatatgtaaaatcagatctattctatcatcccagtgatttgaggcttctaaatgggttttggaaaagatgttaagggagaaatccacattaaattaagttagattttgcaagggaatgaccagagaagacccatctaaggacctctctatggtagaaatctagagtgaggattgcaaaggggagaaaaaagtcttgaaggcaatggagaatgcaaggtggagaagccacaagaagcaccaggaaggtacattgctcccaaaagtaaaagaaagaaagaatttccaaaaaaaaatgatgtgaacaatattgttaaatgcaggaaaatagtatacattaaggcaaacagtagccacacatatataatcagggaggtaactaatgactgtcaagagaactgtgtcactgaagtgaggaagacaagccagattttcaaaacgttgagaagacttcgaggcaatgtgcataagaaattacttctttagaaataaggagagaaataagatgtcaaatggtggagatacctctatgagtaagaatgcattttgttcttcttcttgttactttattactatttttaaagacagagtaggtggttttggtgaaagcaaagggaaaagaagtaggagactatggatgctagagaaagtaatggaaaggaaacagtgacctccagaaactagagagatagaaacaagggcacttacaaaggggttggttttgtctccactgacaccaccatcttgtctcctcctctggcaccatggtggcctcctatctaatctagtcatatctactcttgatcctcttgatatattcttcacagttcaattagaatcttatcatgtgttatcctgcctctgacccaaaacaccttttatgcaattgttctttggatcaagaccaaaatcctacaaggggctgcatgatctactctgcagctttaactcaatcttctctccatgctctctggttccagatgcactgacttgctctctgtttctgcaaatcgctgtgggtctttgcacatattgcttactcttccttgctcttccttctgtaccttcatgtactcaactcgcagcaatgaactcagttaatattaatacctgagtgatgcctttcatgatatccttaagtcaattctcccatttatacactcttagcatcttttttactttcaaagcatttatcacagttcatttggggtgcgtgtgtgtgtgtgtgtgtgtgcgtgtgcagaattgtttgattaatgtttgtctctcctgtagagttgggagtggctcatggctgcagggatgccatatcttcttcgtaggagattgccttaacattcttcgtaggctggtaatagcaactagaatatgaaagtcgcacatcctttgggagttgctgttaacatgggctgtccatgttcaagtgtttttgtagcctctctggaattctctctagctggctttcaaagtcctgatgcagcgtgagtcaggcatgtcctccttgaggatagattttttttttttcttattctttcctccctcatactgtcaatatggcattgtcaatatcggagtcatagctctatgctctacaggagccaaacatggatccactctccagtttgttacaatcccctcttgaataccatccagataagttattaatggtaatacggaagtggaatctctgcttgttagtaatcttagcctaacattgacagtcatttgaccattttgctgaggtgaggacttagcaattgttgacatgcagaaatatgcactcaatgttgtcagatctgctgatttttgagccagatccatcccaaggcccttcagtctgacacctcagtgtgtgggaggtttcacatggtccttggagtcctgacctcctttttcttttggcatcccacttaaagcttccttgcattaactaggacccattctaaatggcatcccctttaatgagcggaaatatttgtcccctttaactgaacagctcttagaagcaattagcatttagggaacttcttgtttagaaataatgtcttcatcaaactacccattatggactaatttgaaactggaagatagatgctcattttcctatggtagcacctgcaagcgtttgtggcagtggggctaatagcagcactattgtaagtcattgtatttctttcgcaatgtgtgtggtgggtaaatagaaaccccttcaacatgtaagcatttctgaggacaaaaaaatatgttcctttcaaattgtactatttacctgtcattacagatctgaaggttgagaatgattctcatgttataattaattctctcattgcctttgagatcactgccttttggccactgtctaggaaatgaagagggatgctatgtgtgagaaatgagtactctgtcagaaaaggaaaggaaagaaaacttgttgctgactgacagctgcaggaaaaaaaaatcttttgaagtagtttaaggggaaaacatggatctaacacaatgtgtttatgactccaacagagttgcatgtgcttgaattaattcatcctgaccaatgggtggttctggcaccattttggtaatatggataataacaagaaattttagtaagtgattattaaattccagaaactatgcaaagtgcatttcataatctttttcaatgactcatcctgatagtcctctttaccgatgaaagaatgatgcttaagtttccatttattcaagtttactcagctagaaagtggaagagctgggattcacgtccaggcgcaagctaactgcaggccagagtcttgacacccctaccacacagatgtcagctttaccagcactgaaagtgaaggcctcctgctcccctgccccatcaccatcagctttctataatttaaagattctaagtgggtcactgctttggaaaagcccttgttaaacaacaaagaagctactgccagccccctattcaccactccaatcagcccacagcagagagcaagttcctggtgaattaggacaagaggaagaagacgagaacctccaactatgtagaggtaggcacagtatcaggcatttcacactgctctttagggaagaaggctggtggggccagggtagactgaagaggggctgtgcagttcgaggaaagccccttctgtgggtggcattgactgacgtagggctgaagcactcaaaggagtaagacagagcgggcgtagtattccaacagatcgcagactccgcacttttgcctagggccggccctgcttcaaagtgaaacttccacaggaaaactaaataaaggaaagaaaagccaaacagaacaaattcccatttagtcagcttttactgtcctcagaggctctgtgtttatgctagatcttaattatgctgcttgtcaaagacacactaaactccactgtggttgagggagctattttatctttttatctttacagtcagaaaaggacttagtatgctgaaccctacccttgatgagcttcaaacctggaataaaagaacagttctctctcttctgcccaattgtccccacctctgcactgccgtccatgaacacctaatcaggaggctttgatggggttaggaatagtcagcgcccaggtggcctgggacaaaactgtaacatccaaggggactgcatgggcttcccatgttcaagcccctatagtggccctcctgctccaggacccatgcatctggtctccaaccctccctctgcagggcttatgacccgatattctggagaggcactcagctgtatctcccagcagggtaaatggcagagccttcctctgggtatgtaaatgcaggggagggggtgtacttgagattttaaatgaacaataatgtgcattaaacaacttcaaatcgcatggtgaagaagttattccatttccaactctctttagtccttcagatgaaatcagggagaacatctctggttgagtgtttttgtaatcttgctttcttttcactgtatttattttggcctttgctttctatttatggcagatacttttacttttctggtgatgacataaatgtcttttaaaataagtgcatctacttaggggaaaatcaaatttgcttaaagaaaaactattacataaataataaaggtacatgataaaatgaaaactgtaagaaatacaaggactaacttttagaaaaagctctaattaagatgctttgtgttaaggttcactctgactaaacctgtgaactgatagatgttcatgcagctctccttgcagacatgcctgtgtttagagggtcttgaaactgtggcagatccttaagagtggtaagttaggtctaaaaaccatttcaggtccctaaaggcaagatcaaaagaaggatacttggtgttgggcatgtctatccccagtctaaatacattatctatgatgatcacagtttgatcatcagttatcagactcatgggagatgttggctttgtaccaaaattcagatacctggggcccatccccagaagttctgtttcagtaggcctggggtaggccctaggcatgtgtgttttgctaactatcccgtgtcatagctcagcatccccaactgacaatcactgatgggctttggtcagtgttaccacccagtgttgtatgtagatccacatgaggaaaggtatatgattacaccttgaaaatatgaggataacaaatctggctggacaatccactggaggtcctttttatctgcacaatgtgcatgcatttgtttctatgcacaaagtaatccctgaaaaactggctcttacagaatgccacagatgtcatctaggaattttcctggttcctgttagaggcaagtcttgagttgggttttatttaacagatgagaggaacatcttggatccctctagtagtagctccatagtccttctctttgacaagcttcatgatgtcgtttacttcaggtctctgagaaaacgaatggaagtctgtcgtggaacacccaagaccagatgtgataggattcatttctaatcacgcattatccaggtgacttgctcaagcctagcttacacagagttccctttcagcatagacgtttcctaactagcattaccctgccataccaaaagccttgtgaaaatattttcagcagttaacaagcagagcctgcagttataatatgctcattaggccgcatgttagttttcaagtcttgcagcatgcataatctgatgcttgatttccactgaatttcagttctgttgggcatcagcagacaagtgctggcagccccgtgggctttgccaagggctgctgtctttatgtgtgttttccacaaggccatgctgactgtaaaataacacacctaccctatttgaatctccagtttctctttgtctggatgtcccttcaattatcccagaacctttcttgattccctggcagagaaaccccttcaggaaccacactaattttagaagacaatgcaaaagatatagccagtagtcccagtagatgaataggctgatttctggaatttattagatcttcctttgttctagacttcacttctatgtttcaaaaccactgccttaaaaaaaagaacaacgctctcattccaaattatcagttttcgaataaaggtctttgaccataggagtacagtactttttccctatactttgaatgtatttgaaaagaaaaaaaaaaaaaaatatatatatatatatatatatatatatatatatatatatatatgtatatattccccagggtcaaagtgttccaatgctgtgcgagctgagaatattttggcaatttcatattagtaaacaaatgtttctggctgctgaaggtataatttatttttattacattttgaaaatttcttggtggctggttatgaggggcagcgtttatttattccttggtcaataagttggtgccagcatatgcctggcagagtgttaggccttgaaagtacagagatatatcatacctgttccatatcctaatggaactaacagtcagtggagaatgccaaccctctaaacagataaatacaatggacaagatgagtggtattattggagctatgaacagaaggctacaggatggagagaatggagctagtacaaagaattcacagataaacaaagtcccatgttggagaagacgcaagaagagttggaattgaattgaattcaatttggggacaggaaaccagagatccaaggaagcaagagtgaaggaaggcaggttagaaccaaacattggcaggggcaggggatatgcctcctgagagatggccaggaatgcagaatgcaggctcatatttgatttgtatgtatggactggtagagatatgacacttgggtacatcagcctggcttagagaactgggtggggccaataggcagagaatgggtaattcagttgtaagaccagagagatcacaggaagcgtcttagtccatttgtgttgctgtaacaaaacatgcacacacacagacacacacacacacacacacacacagggtaatttataagaacagaaatttattttctgagacttctggagactgaaagtccaagattagcgtgctggcaggtttagtatctgatgaaggctcattccccgtagatggcaccatatcaggtgtcctcacgtggtggaagacctgaagtgcaaaaggaacaaacagctctcttatatctcttttatgaagtcattaatccattcatgagggcagagccttcatggcctaatcacctcttaaaggccccacctctcaatactgtagcattgggaaataagtttcaacatgaattggggtggagacacaaacattcaaaatatagcagtaagtgagggacgcttcattgtttaaaacctttgaaccctcaatgtggagtgtggataaaaactaatcatattttcttcccacttaacacatttcttctatgtgttaagtgggaccctcccatgactcagccgtaatagtacatttccctattaccagttactagaagtgttaaatgagctgatgatgtacaataaccctgctaagagcctagaatgtgaaagaatttattttggtcacatttctaaataatgtggaatcattctaattccttaaaatgtgtgatcctcttagatgggaatgaatcgagcttgaaacctgaaaggaacatcttcctcctttaggcatgtcagaatattttgttgaggggtacccaaggtgttcctcacagcttgaggaaattaaaccagttacacactgggcagtgtacatatttctttgcagcttctactagtaggcttctttattgcatcttctgatggtttaaatgaattcttcctgattcttgtcatggtgataaagcactcatgttggcttgagtaagtgtaggtgcattgtagtgcaactaatgatgtctgaacaaggttcacacctgtcaaccttcattctttcactatgagactagcaggtatttcctaagatgccaaatcttaacttgtgtgagtcctagaaatgatggcatgttgaccctgtatattcaaagaaaatcaaatgagtatttgcaaagacggttgctgacttcaggtagataccagcagagacttgagtgcagaaaaacctaaatgcttgatgtaggaggcattaggaagagcctcaggcacacagagaaatgtagcaaatcaataattggccaatcacttctctgagtttatcaaattctttacctcttacacagtgaacaccaaatctgcctgcctgggccagatttctcttatatggccatttacacgggaggaaacagaggggtaaagaatgcccccactgcattcctaaaattccaccagtcaaggtttctccaagggagactgacattctaagcctatcagctctgtctatctctgctcctttgaacagatagaaatttgagagtaggttttggtaagtgggagatttcagagagggttagggcaccctggagaactgagccagggagaagagaggtcttcaatggagacaaaaatgaaccagtgacagctttcctagtctccatttttctttatttccgggagtgggtctgctttctgtgttgatgttggacagggagtcgggaagcaccaaacctgtagggctcctgtggagctccgtattttccattaccaggacacagatctgatacttcagggtttgtgggagtaatattactatgcagaacagaggcataaatactttgattcagaggatagacctcatgctcctttccctcctttctttcctccttccttcctctctttctttgtttattaacttttttatatatatagttgccagatctctttatggtggtctatttgcataccaaaatttcacttatggtaagtgtacagtttagtgatttttaatgcatgtatatagttgtgcaataatcccctaaattatgtttcaaagtgcttgccctagctcctgcccaatttatttctaattaacatacaaaaccccatttaaaattggctgatattggttgagcatcctgaatctgaaattttcaatttcaaaatacttcaaaatcctaaactttttgagcgccagcatgatgttcaaagaaaatgctccttgaagcattttggattttgggttttagaattggggatgtttaatgggtgtaatgcaaatactccaaattttaaaaatatgaaattcgaagcatttctagtcccaagcattttggataagagatacctaatccatagataacattcttctgcttgaacaccaagaaagcatgttttacagtctcttaggctaataatgtatttaaatttattttttctagtttctatgataataaaattgctatggcatgaaaagaaacagagaaatggaaaaaaagataaccctttcttgccgtaagccctgtttgcaagagctgatcctctttcccatactttgacattctatgctgagatctgagggcgtagagcatgttgtgggtggtagagaaggaggaatctgcttcttgggttacatatgtcctaaactagttattaagcctttagttgccagcaaattggaacaataatagtaataatctctgctctttgttgactatatattctgttttatttcctttacgtgcattatctcatttaagcctcaccatgggctatctccctttatatagattagaaaactgaggctcagatagatcgaataaagttttcaaagtcactccacagtagatgtcaaggccagggatcaaaccaagacctgtctcacagctcagcctctactttcaagagcacactttataacatctctaaacaaatgaatcacggcatggcgatcaagggacagcttaattgtcagaggtctgctcctattactaggaagaaaagttgaaaatacatggccctaggagaaaaaaaagtaagctaacatcatatttaacagctaccccaaaatggcaggaataaaaagcaatttaaggcaagaatgcttatggctttggaagttttgagacattttttaaccacaccagtatttgaggctgaatgagaggatgagacagtgcatggacacgctacagcttgtttcacctttggtgactctgcacctgggaatgaagttcaccaggcatctgtggtagaggctggggagacatcctgacttggctgcttgaataaacttggaataggtcatgattatgtagcaattgggagggcgtaagaggggcattgtctgaagtggtctctccctcagctaactccttggtgtagcactcgtgtcactgaacagataaacactgccttccattcaattgtttcatgtctatctgttttattagctgtccctatggttctcaaagttggtgaagtacaacaatcatgggggatacttattaaaagaataggtattggctctcctgagaaattttttatacaatcgtcctgagaaaaggttcagacgcctgtgtttttatgaagctttcctgtgattcttggaatgaaccaaatgtgggatttgttgctctttaaaactataagtccatgagggcactttgtttcctagcagctcacagagtgcttcacagggagagaaattcagtagatacttgttgactgaaggagggaataaatggctattgtagcttccctgaggtcaaccatgatgaaacttacctcccacagtggcagtaaatagtgatcaataactgtttactgatttattagttttaaacctatgttttattttttcttttcgcttagctctgagcaaatggctatgaattcccttgaagttttgtgttctaaaagacctgatgcctatttaatgaggtgaggtggtgggcatagcatccaggaactggttttgagtagtttcaggagtttatttatccaaagtctgagaagaaaaccagttcccatattttgcaagttcattttgctctagtacagtgaataattgtcctggggggactagatggcataggagaatattaatcttagattttcatttcctataaaataatttcccacttattacattcagtgagaatactttgggtttcaggaaatacgcatattttatcacagacagtccaaagtgtgctcccaaatgtatctgaaactcaggagttaagagggacaggtgcagaaatttaggtaagccaccggatgccacggtaggctgtgagaggactgaaggtagaggcaggacagagtcacctagtgtctccacaccttgcacagtgttgtcaaattttaggcttgagctttaaaagaaatttgtaaaaggaaaatattaaaaattaaatgacaacaataataattaatgacaagcatttttcaatctcctcactatgtataaggcaatatactaagccctttcacatatcatgtcatataactgattttttggagagcccaatgaggtagtatagtgtattatagatgagagcatctcaactaaggtcacatttaagaaaaaaaaagatttttactcttggaacagcagagaagtccagaatagcttcagacatgttagatttcagggactcaagtaatatcacagtacccttctctcccgtgttaccttctcttccctattgcctttcactacgtggtaatgaagatggcccccagcaactccaatttaatgttctctgaagatcaagtccaatggaaaagaagattcttttcctacagagtcagggaaatccacaatatcatgcttacttgtgacatcaactgcgaagttttggggtccctaagatcactctcattttttataattcaccaaaatggctcgcagatctcactgaaagcttacacttgcagttatggtttcttagggtgaaagaatacatattaaaatgagtcaatagaagatactcatggaacagagttcaggaaagttcccaaaacaaagttcccagttgtcctctcccagtgtaatcatggacagggctaacttttctgagtaacagtgtgtgacagtacacacagagcactgccaaccgtggtatctttcctgagtcttcaagtccagaattttaactgggggctcagtcacaaagacataattgactacccttgtggctgaccattagtctctagtccctctagaggtcaagctaatactgcatggtccaaagcccccatcataaatcatattattcgactgcacagtttggcccaaagcccctaggttaaaaaaaaaaaaaaaaaaaaaaaaaaaaaaaagaagaagaagaagtttttgtcagtcgggatattccaagggttttgctgtcacctcccagtagctgagggcaaaagacttttttggggggtaaggttaattctttactacacacttccccagtgttctaataaaagcctggcctccattgtgttcatggacccatccctaaagcaattgctctgacacagagatgaacatgctaataggctaagcctaaggatggggccattcaccttgcccactacatagcacgagatcaagtaggggtgattctccaagaaaactggacattgaccaagatatttcaggagtaaataaaatgagaagacactagtctatgttaactcatgggaaggctatgtagcaaaactaaaatactaaattccctttattttgatttgatgtgctatcattagcaagtccacaggaaaatgaactaaaagtgacttaataaatgcattttttttaaaaaaaaaaaaaaagagacagaacctcttaaaatatgacatgtgtgacttagggaagaggcagaataatagcaagttgatgaagaggctctatatgtgatcacttatgcaaatttcccaccaagaatgaatttgtctttttccgcagggcaacatgaaaactccctagagcagtggtttctaaatttgtagtgcattagaaatacctggggaacttttaaaatcctgatgcccaggtcacacccgtaccagtgaaatcagaatgtgtaggaatgggatccaggcaactgtgttttttaaagattcccagaagatttggaaactactgtagtagatactgaaacaacagcaaacactactaatctgaatgctaatttccaatatgaccaaccttacctaattaaatggacaccattcaatcactggcagaagaactcctcttgagtctcagcaggatgtagtatagaatctgagttggagaaatatgtgttcaaaccacggcttttaccatttactttttcattacacttacgttactagttgggcctcgaggaagcaacttaatcactttaaggttcagtttcctcatctgtgaaacaactgataatttatatgacatggaacttcttttttgtttgtctgtttgtttgtttgaggtagagtctcactctgtcacccaggctggagtgcagtggcacagtcttggcccactgaactctctgcctcctggattcaagcgattttcctgcctcagcctttcaagtagctgggattacaggcatgcaccaccacctccggctaatttttatatttttagtagagacggggttttgccatgttggccaggctggtctcaaactcctgacctcaggtgatcagcctacctcagtctcccaaaatgctagaattacaggcgtaagccaccttgccatgcctggaacttctgaaagaaaatacacagaaagtacctggcatagcaaatgtcaacttcattacttatactattacctttattgtaagagagatagaaaccccttgtctttttttcctgtctttcagcctttgttattttgggttgttttgttttgtttttaatatatccatgtaggattttaaaaagtgtatctttgtcaataatgcaaaacttataacttgtctttgtcattaaatacatttgttcccttaaatattgagaacttcaggaggaggtgtcctattcattcagtcatttatccacacaatatttgtaaagtgtctatgacaatatttcgtcaatactaaaatgcactcatttgcaagatgtatcattgttttatgtatgaataagagagggaaaaactcagccaattaaactgtgccgcaccctcagttacaaaagggattcttatttcagaagtcttaagttgaacaaagaaatgtataagataacatcagtgaaatgcagtcagtgtggaattaatcctccaggatgctaggcataagacacaaagttacacaagacgctgtctcagtgatgggggacagaaaagaaccaagatccacagttggcttcaaccctcttgctcccgagaagagagtcaactccagtttcatccagagaaaattctttttcatgccccttttacatcattaaatgtcatacactgatcactgtttcacctttgagaaatacagtgacctgtttaaatggtcccatttttgaatcacttttcttcaaacagggccagttttaaatggctgtatgtcatcccacccatggatgagagtgaaaatggctctcattatttcagcagatcacataagccatgctgcaggagagcaggaggtgagaaggtagagggaattcaatttgatgatcacatgatctttcttcccctgaacctccccattcaactgaagattttgtgttgtgatcccaaatgggtcaaaatacaagcttggaaaagttttctgaatagtctttctctattctatatatacttaatacagatatgccccatttctctttccttacattgaagcctgcttggccagaaatgtgcttgtgttggctaattttttttaagtagttggcaaaatatgtccttgagtggaggcaaagtgttaggggaagattttggggacaggtgtaccatcaatgattctgaatcagcccattgaaatgcgatctttatatgtagtttggggaattaaattttggtgatagaaaaacagaattccaaaaagagaaagagaaactaaaaataataggctcttcaaatccaaatgagaattctactaacagcatcttggtgcgccatgccaggtccttgctccagtcaatagagattttcttttgaaggtaagcaatttagagaatgaatttgctctgccgtctggttggaggatgggtgccaaggttagatctttaaggaaataatcttattagtccctcttattaaggaagcctctgcagtgagtagactttgaacctgcctgataaaaagtaggtcttgtcaaacagctcacagctcctagtgaaaaggttgaactttgttggtttagatcatccaatccaaatgcaaacatgtttctaagcttctgtttgcatactctgggagaaaaagaagacttcctttttttccttgactctgacactaatagtattctgaggcgatggcagctcccatggaaattactaaatcacggtgttagtggcgcatacagaaaggcagaagtttccagtgtaacttgaaatgtaaagcttccaattgtcactgtttgggtccttttatttctttaaatcttcattttttccccttaacggaacttggtctccccatttcgccaccattacatgtccatactaaccccatctggaagctgtaaggctgaaattttgacagctttgtcattttcatagctgtgaaggttgatgttgagcttacaggattattgctctccaggaatacttcactacataatcaagcggaaggtcaagagaggtggagagagaggaaaaaaaaaaagaaaactctaattaaatcaggaagggctgacttgtgccctaagaaatgtgtgcaacttcagggagagccatgcttgtatccaagtgcaacaattggccccagtcagaggccacacttgtcacaatggacaacaaagaaattgccattaaagcaagcagctccttgaagaactggcttcactctttgctttcaccctgctattaaggcccttctcaaatcagattaaggaaaggcactgtaacacatagtttcattagagtaatggaaagaggagagcaagctcttttcttacgtcttctcctttggttcctgagatttgtggcttctggatatcaccctggtacataatgcaaccagacaatagtggccacacagaatgaaagacacgtctgagacttatgctactgagaacagaattgagaagaatcttactccaaatttttgcatgatatatcgctgcaaggaggaagtagacactgtgtagaatccccagagtgtagaattctcaggtaggatttgcacaaactgtgcattttagttcagcaaatcctacctgaaacctactgatacagtttggatatgtgtcccctctaaatctcatgttaaattgcaatcttcattgttggaggtggggtcagatgggaggtgtttggtttatggggatggatccctcatggcttggtgctgtccttgcaatagtgagttctcatgagatctggttgtttaagtgtgtggcatgcacactccctccactctctctcttgctcctgaccccaccatgtgaggtgcaagcttctgcttcaccttctgccataagtaaaagctccctgaggcctccccagaagccaagcagaggcaggtgccacgcttcttgtacagcctgcagaacgatctgccacttaaacctctttttttaataaattacccagtctcaggaatttctttatggaaatgcaagaatgacctaatacacctactgtgtgccaaatatttgtcaagatgttaatggttcaaataagtcatggatagagttctgtgtttaacccatttatgctggaggttgcagtttttttgtgtgaaaaatcagacctcagcgatgaccttgagcagcaggatatgaatagctcccaccagcttggcgttccagtaatggaatactaggcatatatgggttaataggggtttaagagagatgagcaaatactacatatataaggtaggataatcacaactgtaaaaattattgagcagctactatgtgcagctcactggtttaagtgctttgcagagaacaaattatttaatataaaggtcagactattatgcctagagcacatacacaaggacgtcatttcagctggggaaggtagaggacatggaaagttccctgcaaaagggatttaaatgcatcttgaaggatggataagaattatacccaatgtttaaaaaataagggagtggaagataaaacctttctaaatttagtaaacttcataaataaagacttaaagtgctacataagatgagatcatccaataaaatgtagtattcctgcagcacaaagtaaaaggcaggtgatagagaaggggctgaagatgatggaatgtaatgaaggctttgtctggagccgagggagaatttttaagtagggctgaggttcagatttccattttggaaagatcatcctagggcattgcttctgtccctgctgaagtgataattgtgcaagtttgcctcgtagacctggcttgaagacaatccactctctgagtgcaggcactgcccttggagggggcatctgtgtagaaccctcaggatcaggcatcccagcattttatttgttgacttaaatgggaagaatgaagctttttatttctttaatttattggtgaatgctgctcgtggacatttaatgcttctgtatcaaatcaaatgtaccaggatttcttagagttgcattctttaagcgccagcctgagtgtgtatcctgctgatatccttttatgtctatggaaaagaccctccctggacagttggctgcagcagacagtaactccttcttctccaggcttgcgcctgaggatatttgtgtcttatactcacaagccaaggagaaccatctttctgagcaatgcctatctttgatggccaggtgatatgaccaagggacaaagcaaatgagaaaggcagtgagagtggagagggacagaagagaagcaataatatgttgtgaaccacagtcagggacccgatgccacacagactggtgaccgcatccctggtattcattccactgagacttagcactgcaaaaaaggcaggctacagggcataagaaatatgaaataatttatcaggccagaaagttatactcatttcctttctaactattttgctgcaggttaaacattccttcgtgcttctgtagggcagctgctggaaatacaaaggtttgtatccagcactggaaagtacccgactttcctggccacctttgctgggggtggaagctctgtttcttcatgagcagtggctgggcctctgcattctgagggagatgtgtgcatcccagttagtagagatgggatgaggttgtaagattgtatgagtctccaaaatgtttccagcagtgaaataaagaagtgaagccaatccagatgaatgatttgggaggctttcagaggaaggggaaatattacgtgtctgcccagggttctggaaaagggtccttttgctgaagagcttacaagttctgcacacacacacacacacacacacacacacacagtggaactaaggtcagcactggaaaccactgagctatggcagaaagagtgttgcagtgttggaggagcagggagatgcatgtctgttgaaaacttggggtttgcttctgggcttgcaactgtggcagcattttttttcctctctctattccgcataccatgccatgatacaaagcaaacattgcattgacagtatgttgacaaattgaagccttcaaccactggcccagtcagcagcctgagcaatcacagttccaacctccccctccctctcactgcatcccctactccccagatttcttgggaacaggctatgcccccagttgatcatttcagttgtgtagccttcgtaagtcctaaccacaaatcagctttctaaattgagaaggtgatgaatttttaaatccttgaacctgtgctataatcatctttccaccatcctacatattacaatgcaggaaggcaacagatgtgttttcttatggctctggtaacatgaaatattgatagggacgggagcatgggcatcgtgttgaggttcatctacaatgaaggtagcagttctcatcccagcttctcatcgtccacctttcttttctgacacttaggacgtgaagaaagccccatacctgtgatgctcaaggctagttcaatgaaagctcttaaaaagccgtgcaatgaaatctgtctaaaaaggtctttgtcagtctccaggggccaattgctaatgcagctaatacacgtttgatctatacagatgatttttcctttgtcctcaagggaatctctacaaacactttgggtttacatggtgccaagcccaagtcgtctgtcggaaaataaatagcattttaacacattcaagcatcagtccccaggatgaaaagtagcacgtaggctcttctctgagttttctagctgggctataggacataatgaaaacctcatttttagaacatttcttttcctggtgacgtttcactcagaggcactgcattctgaagggggaaaggcacaaagtagacactccgattcaaaaaaaaaaaaaaaagaaaaagaaaagaaaaagaaagaaaagcaataagcaaaaaaggataaaattttatctaggacagtatttccaaatgcatatatgggtgccatgtaccaatctgtgtggtgtaagtatgcaagatatccttaagaggcacatggttgaagtattttatttaaaaaaaaaagttttaatatttatttattgtaatatattttaggaaatatatattacatacatatatatagatatctatataaatgtagttatgtacagctagcacatccaagctgtgattttatggatattattaactaagatgaaacgaaagtcagaaacaataagtcaagttgcagaaaaaaagtaaaggaaagaattgaagactagatgaaactgcagctccagcagctccaatcaggaagggttggctagaacaaatacccagaatgtgtgaggaaacggctaatgtgggaaatgccgatggagagaaattcctcatgtgttaatagaggaggcagagccagctctgccttggtcagtggggatgagtgtgaatctacttttcctggaatgtctgtctccctacagagacgtcaaccacagcagaattcctgtggctctgacacacagttctctgttgtgtgaagttttgttttctttgtggttttaagcagaaaatcacacatgttcatgctgcctcaatctgacatgtcgtattaacccttttcatgtgactttcataaggcaggatattgcaggccattcaggagatgtgcctttcagagaaggattcacctcaaaagagtggacgctgcactggacttaagtgaaaggggagagtttgtaacgatcccataatatatctgagcccatgggagaaagatgatagcagctcctagctaccaagtcttcagtatcttccaggcatgacatattaaatctaacccccagatgagctaagtgaaccaagcaccattattctcatcattgtatcgttgtatttatggggaggctaaaatgggagacttacacagctaggaagagattcaaatacaattgtgtctgaccaagaggttggatttcttcacaagttacaataagaggccatgctttggctgtgaacacttctggggaatggcttctcctatagttttggttctatccacaacagaacctatgtaaatcctacaaagccttccttagaataatgcccacagtgactgtcctccctagcaataggacatcacagaacaagaaaacattgactgtgatcttttttcttggaaaagggtgggagagtcagggggatggttcatgtgggagaatgagagggaaaataaaataatggatccatatagatgagagggatgctaatgtatacactgggattctcttcccaggtccatagtgagcccctacatgacactgagaagatctcttctttcccctgacctttttttgttccctccatagtatgaggggtttgacctaaaggatcacttaagtcccattatgatcctttgtgtgtgtgtgtgtgtgtgtgtgtgtgtgtgtgtgtgtttctcctctgatgtagaataactcagaaagagagagttgccctggagagtggttgctaaaacaacagggaaacaatagagaaaccttaccttcactggtgactcagtcaagaaaaaacaatagagccacattatcaatcatgaaggatcccaagaagtatgcagaagacacctgtttccggaacagaagggaggggaaggtgtggggaacatggagccacattctactcccttcctgtattccctttgatctctctacctgcttctttcttggccaaccacaacttagaatcaaccaagtttttgaattagcttgtatagacaagaaacatgctatgagccctccttctaaagaccttacctttaacttcaggaaacaagatgactgctttctcttgcttcatttacaaaagttattcagatgaggattatacagtttctgaatcttctctgccactttaattttctaagccaccaatttaaagatagccttaaacaactgttctgcccctgtggaaacaggaagtggatgcctcaggcagttcctcgggttgctgtgttggaaggagtgatagtttctcaattctgccgccagtgagacacaacttcacctcagcagtgtgtatttagagacattcatcattagaaattgagtgagaacttccatatggaaaaaaaaatcctagaatttaaagaccaccacaagtgcctacgtattatttagagacaaagaaagacctgtgttttataacaagcattcttaaccccacacattgtaaaagtacaaatggcccagcaaagtcagaatgacccgggtgaagtacaccttgtaaggcaagaaatgttcaacttattgctggctctaccattagtatgtaccatggaagtacatactaaataagggaaaaataagagaaatgctaacttaatgaagcacaatcatgactcgtattagaaagtgattagctgagatctgtgcagtgaataaaacagggccttgttacaacttgatttggttgatgtgtttcagaaggactcgtaattcatgttccaactggagaaatagcttcagcgaatgatgcaacatatcatatttttgttcaggtgttttgacaggaagcaaacgatagagttgtttggaactctaattgagaaaaggatcttaatgatgttcactcagtccagcatcaggatatagtgtgctgatatttcttagaggagaaaatgttgtagaatctgcttcttctgaagacttataattttgataagcctttgtttatgtaagcaagaagtgtgattagtacttcaaataactgcatgttcaagatatcttttatttgtttatacagaaaagggtgcaattatctatttaactatatcattagagaaaaatatatggaaaaaacttctgtattcttcaaagatattaataacttatatgtgtgatgccatcttatgaaaagacagcctttataaaatatgaagagtttgaagtattgcttttcttactcaaaagatttagaagtggccatcaaaaccattagatagttagatggcttaacaaactgtgaaaagtagaaccttttctctacaaagtaggaccttaaaatcaaaatttaaagcaatcactatctgaaaaaaaaatatgttcagtaaaaagttaaatatgggtcatgtaagctcagtattaacgtagagaggctggattgaactgaaaccaatttgtcggatagtgagatgaaacgctggctatgagttccactggttttaccttcagccttgtgggggaatggtggggacatttgataggaagtcagtcttgtgtgttccagcccagctctgctgggggcatgaatttgagcaaagtcccttcatttgtcctgtcacctttgccctccttcaggaaatgccagttttgcattagattggaagttctcagcctctcttccctgtaacttgggagacgggatgtatagataagaaggatgaagattctagagggtgcggctcatggtcactttcttccccccatctcctaaacagcagccctgttttgggtatcaaaaatctgaaatagtgttactttacagttaaatcaacagaaaggtgttcagttgatgttgaaaactatggaatctcctttttaaaaaggtaactttcatgatcctcctcttaatgttctcagtttttatactcttgtttagtttttattgacatctctgtcatggggcagctcatctagacaagtttattgaaggcaaatgacagtgatgactacggtgctttgcacacagattgtcaataacaatctggttgtttggggagcacttagagatgtggttcatgcatgtgtgaacctcgtcagtgtaagttttgtgccatttaactgataacattttgaaaatttataatagctgagggttgttataagctcataagatgctaagcacagagctaactaagtactttacatttcttactgaatcctcgaaaataatatgatctcattacccatagtttccagatgaggaaactgagtctcaaggaggatgaacaactttcccaaggccacggggtcagcatatgactggcagacccttaggccttcccacatcacagcactcagggcagtgagggtgtcccaagggatctttgctgagacttttagcctgaggtcagcttctgagttgattatgacttagttattggaaaaagatataattttcttcaataatctgcatcccaaggaacagtctctgttctcatcgctccagttagttgcttttaaaccctattcaaaaaattacaacgcgggttgaattccttagtggggaggatgagaggaaccgcttcaagctgagagcacagttgtttccagatgtggccagggcctccttaaaggttagtgggctggataacccagcattctgggcctagggaaccaacacactcacgtgacatcatcccacagggcaatctgtatcctttactttttgccattcatccagtttttgggtagctgggttgtatcattgtgtggtgtgtgactgtgtgtgtgtgtgtgtgtgtgtgtgcgtgcgcgttctctaatgctactcttcattcatttattgctgagggaagtcctgcttcttcctgcactgaagcccaattcccattgcttttctaatgtgtgcactggagagtgggacttcccctgtccgggctcttttctactgacctgcactgtgttctctatccattgcttccatctcagacagcgcttttcctcccaagatatctaagttgggttggacaaagtcattggaagtgacagtcacttaaaaaagaaaaagaaaggaaactggcaaaacacagggatgcatgttcaggagaagctgttgagagaagcaggtggctcttgcctccttgtgttcttggatgagacaattgactttccccaagctgacttcttgcttagatgaactgacttaactgtgaggtcctgccaaaggttgtttcactaagcggtgcctggggctttcacaaagtgaagtcacctctgcctgccaagcagggactctctagctagacactgggggaatttcatagccttctgattactcctccaaaagaggaagttcctgtcatcatcttacctttaccgtgccagggtgcagttcattctgcctgtggctaacatgcccagctcataatgtgctgttgagctatagagaagggaaatggcggactgcaacttggagaactgttcattttgctgaagaggagacttgaggacagaatcattgctctacttggctaaatctgtggtcttcctgtctagggctgtggcttcaatggggcaccaaggagcatttgtggagtgagcgtgattgctctccatccagctaggaaggttagtcatgtcaccaaatattccttacttcccttaacagcccattctaaatcaatcttccatgaattcatcaaaatgttttttgtattgcctcaactttgctgcttccatgtcaatttcctaaacccagggaggtcacgtgaagggcatttcccaaactgttatctgaaccttcctccctggagtgtcttctgctcactccagggaaagagtccttttccctgggctcatttgctgtggtggccatattttaattccctcttggcttctaatagatgagttgggacacgcctcaaagtgtttttgttccctctgaaagaggttgaatcagggaagagagggggagaaatatatgtgggaacagtttaattgtatccatgaggattcttagtaatcaggatgccagtgtgtgttttccagagcctagagctgacataaataatgtagcgtacctcgctttgtgcaggcttgctgaggaatgctgatggagaaaaagccaaactgggatctgaagctcccggctcccggcacagcctttgaaatccttttattgagtggtacttttgaaactgcagccaggaccttggcaggttggatgtgccagggagaagccaacagaggaggaactccagaggaaggtgcctcacttggcttttggagaatgagaatctggtgtggcctggatggctccggctaagattggttaatttcattttgcgttcctaatcccacaaggaataggatatctccgtcaaggccctgagagccgggtaagtgtatgcagctgttgctaacaagatatgactggcccctcaaacatagtgaaaagcatcttgctagccttttagagcctcttgccttaatgggaagagccaaatgagctttgcgggacaactaaccccaaatgaagtcctgcagcttaagctcatttaaaggcaaagtgtgcattgggagagggagagggaccacaaacgccacagttcttttgcaggaaggaaacaatgtgtcttcacgtgggattttcacaggaggtctgccaagccaaatatccaactgaaacatcttccagattttgatttacagtgcaacttaagcctagtcttggccataaatgatagaagtgaaggaaaaggtggggagtggggtaaggaataattctctattgtagaggatcttcagggacaggctctgggcatttagtgaaagggacagcgattcctttgcctatactctggtggtttagaaaaggacctcagggaacatttgttttgttttgttttgttttccttttgattaaggcatttggggtctagaaaagaagattcaagcaggatccatttaatttatttagtttgcctcacagacatgaagcttcagaatggtaagtgtcaattacattcctaccgatttgggtaaactagctgggagagggttctcgcagagcaaggatctgttcaaatctgggctgttttacagtttttggccagtgataggagctgctgtgtaaacacagaaaaagcatagatgacaagtttgattgggaaggaaggctttgtgtgacttgtccttttgggggatggttctctgttgttgttggtttgacaattatgggatgtcctttagaaaccatctatatagcacactaaaatttacttgacaaatgtaaacatgatccgatagttccatcgtgggaaaagagtatatattttcctcttatttggctacagatttgttgttttcttctttctccatttaaaatatggagtgttttataacatagtttttggaaattttttttgttatgtgatgtattgctataaatgtattattactaagaactctacaagtcccttttgatgatttcattgaactggtaaggaaaggagtacgttcttgtctgagtttcattccatcctctctcattagggtctgtgctttgcttatctactgctttaagtggtttcaccagaactttcattcagtagtctcaaaagccccgcgtacttctctctgcttggacaaatgccttcccaaattagtgctgtggttttgtcttgtgaaggaaaagttttatcttcatggataaaggcgaaacagggtttttgtttgtttgttttttcattttgttttgttttgttttgttttgttttattggggcaggcaagatttagtctttagtctgaggaatctgtttggacacttttccagcaaaccttccactctttgggaaagagcatgcccatctgtgaaatgggcttgggatttgattaaaaatgtaacacccacgccctctcggtcacattgtgaatgtttgaaaggaaaaaaaaatgattatagagggttagctgaggggttgtcaataagctggtctccgtaggactgagtttaaacctgttttaaacatgcaaaaactgggtcgcttgttagtttctatttataagtgcgttagaagaaagtacatcttaagtgcagggaaatgcaatacttctattaaacaaaacttagtttttataacctaagaagtgacctgaaggaatgtgaggaattgttagaagcctgtggttcttgggcgcagagtcacagcttcatgtttaatttaacaaaacattaaacatttcatgtttaatttaatgaaacattagagcactaggatttgtcaccttcatgacagaatgtcagaactgtgggatagtttcagaatatatgttctttctacagaattcacatgtcacactggagatgtttcacatgcaaaggcctttacttttttccaggggtcttttttttcctctctaataaaagaaggagaagcaaagaagcaagtagaacaacaaaaacaacaacacattaggcatgcactactagtctagctaattgtaggggggctattagcaggcatttaggcaaatcgattaacatttagcatcagtaccaatgcaattgcatttctactttttgtgcttctgacaaaataagcacacagatcttcaggacaagaaaagaacggacgttggaaccatttgttaggtgataaacgttttattaaacccatttggattttttaatgaactatttgagaaagtggggtgagatctttggaaaaaaataggtaaatgtatccgtttgataaaggttgttaccagtgtgagagaggcaaccctttgtactgcatcgcttgccagatttttttcttagtctggaaaatgtggtcggagattgatagtgctagtttgcctttggcctgtgatgggaaatttcccttttttttgtatttcaaagtgctgaaatagagatatgccctacctctctgtccatattttgcagattggtggagctctattttcatcagatgcttagaatgcttagctcttttccatgaaaaacaaaaattgatgtttgggcagtgaaggtaattaccgatccataaagcatgcatgtgtgtgtgcatatatgtaattatacatgtgtacccacccacacactcacacacacgcacacacagacacacacaatgtacaagtctacaaacccttcccctcacccccctgccaccaaattctccttctattcatttgaattgcctcctgcaccatttctggaatgctgtataaaacacaatggagatttatgcaagggcagtattttcttttgtgatgacaggagtgcgaatggctctcctgttattatatactcagcctgaatgtgctgcttccttgggtaccttgaagtggctgagaccagatgcttcagagagaaatgtcatattcatgcaattcagaggagcatatggcaagagaaaaatcgttgtgacagttgctgacctgtggagcaagtcacttttttaacccttaaaaaatagttttaaccctatcctaaatagccacagatacattatttagttgaagaattttctaattctcctgtatgttgcattctggaaaaagcctgcaatgggggctggggaagtagagaagctgccctggccatggtaggttggacggcctctcctactcacaccctactctcagggctacatccacacttctctcagcctctgggtccaaaggctgaaattcagaacggtgtgacccaccttacctaattcaggtttgtgatggctcccctgccttctccccggggaactgaggaggacccagcaaagctcagccctgcgtactgtcctggaggccagaggcatcgcctgctgcctttgtcgtccttcatgaccaccatcctaacccacagatagcacagaggtagcagaagttgccaaggaggtcccttcacttcataaggcctcttttaatccctgcctatgtgcctgacactctgacagaccccgggaaggaaagcaagtgtgatatgcctcaccctgccaccaccaccaaggatctcctagtgtcatgtagaagatctgtgaacaaaaatggaacaaagcattgtcttcagtgccatgagggctgagagaggaaagccttgtatggccacaggtattatgtgggtgcaggggagagagctggcaaccctcagagctcagagaggtcagaacaagcttcatagatgcagtttttttaagagaactggcctggcagattctcctggaagccaaggggcaggggtctccacacccagaacatggcagatgcttagcaaatcaaggaacttcaagtactgagttcagtaaagctggcacccaaggcatgaggaaggcaaaagattgtactagaaagataagcagagccctgtggtgaatggctttccatatcatcaagtctaagtcttctctaatctgccacatcctcataaatctgagacagacagccagctcatagccgtaaggaaagtgagggttgagcatatcaaaacaacagtatggtttatgtgaacacacctaagttttacaatgtccacaactaattcaacgtttcaaaaaatgctggctacccctgtgtgagccaaactaacgccatgtgcatgtttcagatggagtctgggggctaccagtttgcaacctctgcaaatagtcaacaggcgcctgcaaagggaactcaccctaccactaacttgcttcttatctgaaaagattttggagaagagctttgacaaatacagaaagagtgtgtttggagacaaattttcaagcgtccccacttggaaatctggttgggagggaggcaaatatatatgttcatattcctatctggatttatatttttacatatttgtgtaatggtgggtgtgttctgcttccttcgtatagtcaaagcttctggaggtggaatccaaaaggaaggtcaaaattctgactctgtagatagacacataatccagcagatcacagctaatgagtacctctttgcatagtgcgtgtagtacatgggtttctgcaggggggtggggttcttggtggggtttttttatgttttaatttcctcatcagccatttaactttatgccatatggtgatggcagagctgtccccacttctgtgagaagaccctagtggttccatgaacatcttttgagaaagcagacccactgagcgtttgcttagaagagcagaagggaggctggggaggatgcagtagccatctccttttcatcttcatctcctagaccttaactcatctgctaccatttgactggcattgtcatctagctcctctggcgtgcacacacacatgcataggcagtgtcagtctgttggcagcacctcccaggacagacttgcgatcccacgggctctgcagtcccaaattgctagggctctcttttgagttaagtgtcaggctggccatggaaacctgggattgggccctggctgccttagtggctttgagtaagagggccgggcatttaatatttgttgaagtgactgagctctcagtgcgctcatttatctgtctgaatagtggatagtaatacttctcagctccatggagataatggtaatgataattaaaaaaaaaaaaaaacaactgtgacccaggtatcagctcaaacccatctccacagaccattcccacattctgggtgttccctgagctcctgtgctcaagctcatgtttgttcatttttcagcacttactccttcccgcagcccaacacgtcgtgtacctgtacctttctctccaccccaagctgctccagttgtagaatttggcctcttacccctagcatgtgcaaaaaaacaaacaaactagcaaacaaaatctcaggcagacaaaatcatccacccaaaaccttgtgtggaacagactttactgaaagtttggagaaaatgaagaattgagagtttcatatgccagcaataaaaagaagtttaaatagaatattcaacacctctcttcttcaagagtgcttgggtcagttctgactaactggggctccagctccctgccaggttccctgctgcatttctatttcttccgattggccagaaattcaaatggatttcactatatttttgcagagcagctcagcactctccacctgcacccaaaaagccagcactttcttccttcttcatagaccccttgatagactctgcaaaaggaaaactatagcatagagatttatttccccaaagatgttaatagcaccatttcctgtcactaaccttcaagccaagaaaggaaaagttgttacatttttgttttcaaaaacactttttctgacacataatactttactatgtatttccttacatttttaatatccttcccacctgattgattaattaattgattgattaagggatcaattaaaaaggcagtgtggccaaaggttaagagcacagactcaggagctctgctgcttactagtgactctgagcaagttacttaagttctctgagctttggtaaaggcggatagtcaaggtacctccctgatatcccagccatgtggttaaatgagatcatgcacattgaggtgctgatttcagaacctggcacgtgcaatggttatttcctttgtctacagtcaatggcagcatttcattttcatccaaattttataatagaatgttttctctatttccaaaatgatttcaggttaaatgggtagtgtgctgggattctggcacaagccagattgcaccttgccccaccaagtagaaactgactgtatccatcctccatcctcaagacagaagccagatggcctcctgtcctcccctaagtagtcttcagtttcatgtatgtttctctgtagtggccttcccactgctgctgttttaaccagataacgaaaaaatccaaggtggttcggaataaccggcattggctgaacttttttccaaccaatgttactagaaacataattgctcagaattaacactctcatcttcagtggaacagaatgcaattgtttgctcttggtttgagtcctcagagtggggctggtagggggcaaggaacaattattgcaactaaattttaatcaacagtttcagtaacaatattgaattaaaaaggtactagctactagttagagcatggcttaacttgtacacaggcaaatcagtcattctgtggtgattaacatctattcagaacagagaatgtattctgggtactaaattaccataggaattaatgcagtatttttaaagggcttaaaatatgttaataaatacagtattgtagcacctgcagctgaaggaaccaaagtcattaaagatggatataattatatttattatggcaaggagctaggtgggcgggggggggggaacagtttaatgagcgtgaatgaaatagaggttctttatttaaaacttcttacctgaggaaactgttccctttgaggagttgagttattgcctgaaatcactgaatgaaagaactatacaaaaagttaatcagggataattttccaacctctggacaatgaacttcagaggtctactggggtcatagcaaaactctccacctttttccctttgaacttaccatggaatccctcttcccctgctgtgccctgtaggatccctgtgatgtctgccactttaccaacttcagtttccactgccttcccacacctgccccacccaaatgccacacccaccttgcagttgctcaaacaatcccttatccaacctcagggcctcagcacatacttttgcctctacatgacatttattttgcaaccacttcaatagcacttggccaggctttgtcctagacaaatgttaaatactatctaatttaatcctcaggaaagccttacagattagatcccattatcatcaccgttttacagatgaggaaaagaagtcagtgaagggctaaggggcttgccataggtcctgctgacttgaagttctcttcaccaccaaagttctgctgcatctttgtaggaccggctactctcatccctcagatctcagctccgatgctgtccctgacccctttatctaaactctcctttcccccaaccccatccccagttgctctgtttcaggatccagtttgttctttgcagcacctgtcacaccattttaagcgatagtctgcatgtgtatttttagttataattttccttctcttgcactaggatcatgcccataaaggcagcaactgtttttgtttgatgctgcgtcctcagccctgttgaagtaactgacacttaatatatcctgaataaatatttgtttaatgagtccttgaactcatgtgttcactatttgctgtctgtagccaataataaatgatattcttaatctatttacctacatagacagatagacgaaaaaatatatttatttttcaaattatctgatgactaaaatataattttattaggaagggtaatcctctttaggaattaaaaattttcttagctgattgatataaaaatggcagtctaaaataaccatttctataagaaatctgggcccttttacatagaaggttgggaattgatgattaaagataacttctatttgacaaataagaaataggagaacatgagaggaagaaccacaggctcaaggtgtggagctggttaagacagggttctctggctcttggtttcacattgtttctgcccatctgccttgcctcttgtcgcctatgttgatagcatctggagaagcccatcagaaacagaggagctttttccggactggctcttgctgctactgagagtgttgtgcttggcaggtcaggagcagtggattgaagctctcttattttcttaaatcttgggggtgttcaaggtgaaaattaactgtctgcctatcctcgtggtgaaatgcatttgaaatgctatttcctcttatgaagaagaagaaaagtaaacaaacacacatcgtgtggaattaaaaatggaggtcccagagctgcatatcacacctacagtgagacaccagccttaaagaaactgcctcatgttcctggcttgccagcttgttgaggatacagtctggctactaaaacccctagcaccacaatcctttacaatataggagacatgaaccacacactgagcatctgattaaagttgggggttctatgcccagagaaaaacaacatgtgtaaacatgaagcaatttgcacattgtttcagggaacccacagacattcttttgtcaatttcgtggatctctagaggcccatgaattccagtttaagaagccctggtagcatagaacacctagtaatgttaattataataggtaatatttattaggcaattataatgtggcagatatctgacatatatataataattatacatttttttcatttagctttcagatgtaacatttgtttccattatgcagatgagaaaactgaggcacagaaaagctaaataagccagaaagtgttggagcctggattagaatccagttggtctgatactagaacctctgacaaaggcaggcacagaaagtttacctaaagcagactttcattagctggcatgtgacaccatgaggaatcccatggtgggaaagagaggctatgcagaacaccttcagagcgtcagtgaaggccacaaagggctgatgaatccatattgcaggtccttcagctcctcatggagaggcaatcaagatggtcccaggatacctcctcttgccaagaattgccttctatcctcctacatattgggggactggaaaaatgcatttccatgtgacttcacatccttaatccactaggctggagctaagagttcttggcattttattgagccaagtattcagaatactttcaatttaagaatgtctatcatcagatgggcagatgggtgctatctgactgtgaaactctctcaggaatatttagaatggactggattgtcagcctattttatgagaggctattagagtgagatgtgtttaattatttctttcatttcttaagagtatacatagtatcctttagaagttgcttgataatgtttttttatcattttttctgctttcttttttaaagagagcaggctcatttttacttaggaatgggtataatctaacaagttagaactaataactaatgaagttaaatacctctctggatgtttcttttctattgattgagctatatttagtatcttgtaattaatatcctaagcacctgcttggttctaggcccctggcataatgaagtgaatcagagacagcctgtggcctcaaggagtttacagtctagtaggagagcaggacgtggaaacaaatcaatgttgtgtactatagtgtgtggcagaggaggcaaacgaaagagagagtggtcagctcaggctcaaaagtttatgactggctgcaaagacagtcctagagaagcagttaagaaaactatgatctctagaacaggagttctcaaacttgagagcacgtctgagtgcctcagagggcttattaaaacacacattgatgggccccaacctcagtttctcactcactgtatccagagtgggtctctgaatttgcatttctaacaagctctcagaggatgatgctgctgcttgtccaaggaaaacactttgagaaccactgttctagcttctcagaggaaagaatatagaaaatgcttgtgttgtttccagctttttatctcctaaattttgaaatatctcatttcacctctgtctgtcttgctctgtgttgtgagtttccttgtcaatatgtgtacttctgttctctctatgggaagtacagctccgtgttcttctgcaggctgtcttcctctttttcttcttcttctccttctctcttccttctcctccttcttcttcttgtacctaactatgacctctgattagtaggaatggcttatataaattttgaattgtatacattcttgtggatgcaggtctgtgagtatgagtttattctgaaaccagcactgtggtcagcattattcctcacaattgatcatgtctcacaaaacactttggactctgggtagacaattaaataaagtagccaaatggaagacccactcatgcatatcttcaggtcctctgaggtcttatagggcccatgttatattcctagtggttgcagagcatgccaggaaagaagacgaccaccaagcaagcctaaatcagctgcaaaagagttcagcactttttttttttttttttttttaagaatactgcagcctttcataaacagagtcacgttttggccccaatgcaataaaaagtataaactcatgtcagaaaacaataccaagttcccacattaatgaatctttctcctttcttttattcttttggtccattttgcacaggaaataagaaccttgcggacagaaagatcatcatttgtcaatccttttgcagcaattttcccaacagttctttcaggtctaaatgcttttaagcatctgtcagtgtcatataatagccttaatgggaggaaacaacaacaacaacaacaatttgctgcataaggatgaaatgagtgagtggctctcttcttcctggactgcagtgaaaatgatggtcctgtccatatgtagatttccacatgcagccgtgcagttattgtttgcactcagaccttaagttgtctgtaatttttatgtgtgtaggaatgatgccaattgagagagaatggacgaaaaaaaaaaaaaatatttagcatccctgagatgatataagtcaataaacagcttgattactaattcattcaggaacaaaaataatggctttctaaactgaaacgaccaaatccaataactaactgtttgtcagggcagtaataatggtatttgtatctcttttaattggctttaacctttcccttcatgtgtgcagtattaaaaaattaaagaggaaagtatttagaggcaaagatttacggcactgcgtggattacatgcttttaatgaggtcaggacaataaaccatctgagcagaagctgctgcccaatgatgaattattcccttttacaatagatagactacagcaagcgtgtgtgcacacacgcatgctcacaggcccacacgcttgtctgtgtagaccatgtgaaagacccccagctttgctgttgagctaccacaaggtgtttccagttacaaggagtgttcagaaagtatcaaaatacagagctgcaatacattatgtaaaaaacagaaagttgcagagcaaactgcacgatgtttatgtaagatgttaattcattatgtctgtgcatgttagcatatatgtgcaagtgtggatggatggatggaggcagggatggatggatagagggatggaagaatgtcagtaaggatggggagaggaaaacaggaaagaagaagaaaagtaaaagaggaaataaaaggagagagagggaaaggagggatggaggaaggaagaagaaagaaatatatgtagagagaaatattgataatttggaagcatacacacaggagtgcactggagccagcttgtactagcttgtaaaggcccattgtgcaatacgtcttctcaattctgtcatattcttaacttacaattgtagatagtgacagtatttgctgcacagaaatcagcaaatgctacagatcagggcttttttttcctgcagagccaatttctaagcctttatcagcacatcactggacacccacaaaatcattcagagtggttctatctagaaagagggtttagtacagaactaaaaagggtacatggtaccgtttttagaactagaaggatacccttttagtagaaaggtatgtgaagccattatgttgggaatgggaaacaagacatttttcctctttattttatacatttatttattatttgtaatttttattaagcatttattattattaagcatccatcaattttataatgaaatattttattttattaaaatgtatccacaaacgttattaaaacttgtttagtaataatagaattaatcactttactttaggagtcagttacaaatccttcatacaaggaaacaaatttcagacaaacaataggatcaaatgaccaaaggacttcagactcaaccagaagtgtgtcctttgatggtgaaaatatcctcaatcttccagagcaaaaggaacattcaaaaagtgttaacatagattggtccagaagagtagagtgttcaaagtcagatcccatctgatgacaaattctagtgaagaaagtcacatggctcctccaaagcttatctcctcatgctcattggttgacccgaaccttatcgcagtctttgcgtaatcagcggcctagatttagcagtgtgaaacatctctaacaaagagaaaggcaccacattccagacactagagctgcagtcccattggaaacgcaccatccttgtgggccagccagtctgtcactaactgaaaaaaatgttgacgcttcctttttgccactttgacatggtgtgatctctaatcagcctcagtaagcaacagagtaaagaaggttctctgtttccccttccttcccaaatctttcccaattccagatgatattctacttatgacctcattgctctcatttcctacagactcctgtaaatgaaagtccctgactagaagcccatacctgaactgttaaggaaaatagatgcctcattttacaaacacaaactcattcattcaacaaatggttctagatgcctggctgtgggttagatatggggatacagtggcaaacttgtcaggcaaggaccttgcttttatggagctgacattctagaaggtgagacaaacataaacaggtaaaccaatgaaaaatatcagagaatgagtaatatttgaaaaacgagaaatagggggatgtgatagagagtaacaggtactttacctcctctgctttagagtggctagaaggagtcacatttctgaggaggtaaattttgaactgagatgtcagtggcaggaagaagccagccatgtatagatcttactacaaaaagtaggtcctggctccttttatggggatttttcctacactcactgaggccttttaagacacaagtccaatgaatggtagactgtagatgccttctttatttcctggtgactatttcaaagcaagcttaggaagtcttcactgctgtaagtacctttgaaaaatgtgcaaaattgggatccattgtgtatttgaagctgatttcatgtgcttaaatatcttgaaggttgtttactggttagtgctgtgagtagcattgtttccatgaaagaaagaaagacaaggcaatcataagttcaactgccataaactgggccatctcacagttgtgtctgtacaatttctttttttttttttttttttttctttttgagacggagtctcgctctgtagcccaggctggaatgcagtggcgcgatctcggctcactgcaagctccgcctcccaggttcatgccattctcctgcctcagcctcccgagtagcttgggctacaggcgcccgccaccacgcccagctaatttttttgtatttttagtagagactgggtttcaccgtgttagccaggatggtctcgatctcctgacctcgtgatccgcccgcctcggcctcccaaagtgctgggattacaggcatgagccactgcgcccggcctttgtgtctgtacaatttcaactaagggacaaagtgttggagagaaagatgttataggctttgaatcaagaaatatctgggttcaaatcctcgcactgcccctgagcatggtattgaccctctctgagcatgtagtactctcaactttaaggtgaggttataaaaatgcccacatcatagggtcatggtgaaaatgaaataaggttatgtttatataaagtgcctggctctgagtagcctgaagcatctacttagagaaggttctagaaatgttgctgaacggtgtgattcaccagagtgagactatcatcccatggggacagggagaattcatttatctttgcttcagtctttctgttgaatgcagagctgcaatttgggacttgatgttgcagcaaagatttcctgattgggcaagaaaattgagaaggcagctgtcattcttttagtatgatccataacaaaagaaaaaagagattgggtactcagccagagataaacccattcctttaatcctttacttattcaagagttgccctctgcccctcctctgcctgaatcttttcccctcttcttttagtcctttttagttcttcctggagaaccagaaataaagcttagaaccaactggacagagtccttgaattacatcacatgagcagtgcaatttatgcagcaaacttcattgcctgagagtagaattgtaaggacatgcatgaatgctgactatattcctaggggtaatggaagctgcatatgaatatagtaactaaaaaaaaaaatcaaaaaccttggaagacaaataaacatggcagaagcagcaagacaatgtttttatgttttcacttttaattgactaaaaatatcaatacaacatattccttggacagtcaccccaacacccctcccctttttaatggaaactaggaggtggttgggaggaagaacactcaattgataaaacaacagttacccctgggaagtgcaagtagaggactggaaaggactgtatttttttaaaatacacatccacattgtttgatttttgttttgaaccagcctgcactacattttaaaattaagaatataccttttttaaaactggtgggggagaaggaagaaagagttactttctacacaagatagcaacgttgtttttaagtaagttttattaacaagtgacaattacttttttatgatacatttaagatagtgaattatgaatgactgaaaatcccctccagcctaactgagaaccattatgtctggtaattgccactgatttctgcaaacagtcatttttctctggcctgttaacataatttaaatttttaattgcccttcataattgtctattggagttaacaaacagtcccattcacctaagggtttccgaccaggccctacctccaggaactcacactggaaacatctaagaccacttgagaatgccattaggagtttgtggatggtccaattgaggtggcagcctctgtgacaaattgtgacatctttttaaggacccatccaactatggaataatatatttttggatttctgtatcaagtttgctcacttttgctttgtagctacctgacaaaaaaataataaatagagaaaaaatgtcacacttgtaaccatgttcaccaggactttcatcacattgccttatctgttgcactgggataagtgtgaacattctgggagaaggacaggtgccaagtgttcatgtactataggactcacaggttaattaaatcagtgacatcagagaggggggcagaattaacagtaaagatacatatttatctcaatatatgtgtgtatatacccaactcagaaaaaaatgatcataaagtgctttagtagttttgtagttacataaactacaaaccggctatctcagccggttctttgactactttgcatactttgatcatgctcggttttctgagaggaggcactggaaaatctgcttttttcatatagttatataaactactagtagtatataaactactgtcattttcctgagttgggtaaattcaaaaaagtagaaagaaaaatgcaaagaaaatttcctataattccatttatagtatatatgtatgcctaagtacacacacacacacacacacacacacacacagagatatatctggatagtgttttataatatatttctcacatgatttactattcttgtaaaattttatttgtaaggactacatgtgattcaatatgtagtttcgccattggttatttaagcattccacccctgttggatattaaatttcttggtttctaccattacaaaaagctgaaagagtgagccaccctgcatattttgtatacatcactgataattacctcaagaaaacatcctacaaggtgagtgattcaggagtatgaacctactgctgaatcaccctccaaaaaggttgtagatcaaaatacgctctctcatcagtatatgagagggatgacttcccatatttttcccagcactagatgttaacatttattaaaatgttggtttcattactagtctaaaacatagcattcattcatttctaaaggttacattaatttgaccaaaagatgctgacaaacatttttatgtattaaggagagcataggtatacattgtgaatggcatgttcaccccacctcatccactttctattaagatatccatattcttatttgcacagttaaaactttaaattctctgtgctttttaaaaatctcttaagattgctctgactcaagactaccaagtaggtgttcagtgccaaagaacaatagactccaaccacacaactagttcccatgctacctgaaaaagggcttggttttttttttttctgccaccttcacgctcttacgcatttgcagtaggtgcatcttagtgcatctacttagcgcagcatatgaaaccacaaacaaaactgtcccagggaccttgaagtctgtcttccacttcccagggccccttcatcctccttttggttcccctcagaatgtccaagtgaatccctttgtgcatccccacctggtttagtattgaggcaaatgggaaatgcccagaagaaataccgacttgaaccactagtgtgaaatactaactcacagcaattcactccacacaagttggcaacttctgacataaagcaatggctgataagtataatgacgaggaatctgatgcttggtgatacaacagtagccacagaaatggtcggcagtgaatatctgattacctggctcaaatctatttccaatgttgggatctccagggtccatttaagtatcttcaaacaaatgttccagccgagatatttatgggattctctacaggcagctgactggctgctgtgggaggaagtccaaagctgagatatttgtcctagcttgaaaactgtcagtactatttgtatgaatgcgttcaaagtggccatgtttcttcataactttttggactagttcaacagggacatgaaagaaggacactaaactgattcctacatggaagcttccattgcttactgtctgcttggaactctgagggtgacatttattataaaaatagcaacagttagttataattgctgacacattccatgctttcaaattgaaactaataatctcattactcttatttccctcacctcctcctaaaaactcatatgatagcacatttttctgtgattcctatctcagccgattctttgcctactttgcatactttgatcaagctcggttttctgagaggaggcactggaaaatctgcttttttcatcacctatacaggaaaaaagaggattctataagtctaaagcaaaattatagatcggggtttcaaccgtgaacttgggtttgttctttttaaagcttaaataatgaatgaggacttctttgaggaagtgtggctttctttggggaaatttataagcacctgatggctgagaccgcagggcgtggagtcagaaattggttcaaattctgggcttgctgctttctagtttagggtgttattttgagtgaaataggaatagggaaatgggttgttgtgagaatcaaatgaaatgacacaggtacacaaagcacactcaatgagtgttgataagtattgtcattgttatgattaaaacttgacaaaaatcctttcgtttaacactcaggacatctgtgagtcgggtgtttactggttcctctgcttctcaatgacacccacattcccagttgattcttacaggcccagtcctgcttttcatgagaatagaaaggaaaaaatatgggatgacttaagagatgccagatgaatctttgccccgaaggcaactgtttattcagctcattcaacgaacaaataatttcactgatgatttattgttttcctcagtgaaattttccttcatacatccataattaaaaagggtgcagaacagtaaatcggtgaacctgtcatatgacatttgttagcatcgaaaaccaaggcatcatagcttttagaaaagaaaaaacgaagaggttagataggccctgatgtatggatttttttaactggctgtcatttcagaaatgaaaaagtgtgaggtgtctgtgtgtgtgtgtgtgtgtgtatgtatgtatgtgtttaaagaatggagaccaaaatgtaaagtgaatgtaatgccctgtcttccaatataatgacctaatttctattgatattgaaaatataccccttattagcaatgagcacatgcagtgtttgcagtttctctaaggaaggaataccagtttttgcttatttgttttattttttagtgacagaaaattttccaatgttaggaaaaaaattaaattacctatctaattcacaagctttcctctcttttttgagatggaattttgctttttttgtacaggctggagtgcagtggcacggtcttggctcactgcaacctccgcctcccgggttcaagcaattctcctgcttcagcctcccaagtagctgggattacaggcatgcgccaccacgccctgctaaatttttttgtatttttagtagagacggagtttcaccgtgttagccaggctggtctcaaacttctgacttcaggtgatccacccgcctcggcctcccaaagtgctgggattacaggcgtgagccaccacacccaacccaaactttccttattcaaggccaacccagcaaatgctttgcccataaggaagggctaaaagtggcagcaagtaatcatttgatctgagggtctgattatagagaaataaaattttaactttgacagagacttcagagccaaaaaagcagagcttggcccctgactttaatgctaagcaaacaaatggctttgggatccaactctacagtgtgacacatggatctaataatgatacttgtaaaaaatatcatgagagagaaatgatgggagaaattcaaggaacacatgtatttctcccatacagatcctgttataactgaatgtcactctttggcaaattctgcagacataaaaatgaacccgatgcaaactgaattcgctaagttcatcctggagcacctaaccgcgtctcccctccttcctcccccagccccccacaatgttaactgagaacctgataaatcagcaaaccgtctagaagcctcattaaacctccaagcagtgcctagtctcacaagagagtagcattttgaaggagacagggagcaacaacagacataatcatgaggaagaaaaacaccagaataaaagaaacatcaataaaatataccatgcaccattaaggaccacctcgagataagatactcagcgtggcagtaaagatcacaaatgaattaatgtcaaaaaaacaatgtgtggtctataataatatgtcagactgggttgaaaatcacagctgcctagggaactgtgcagcactcccagccctccgtttgtggggtaattgtgccagtgactcttaatgctgctgacagagaccttgcaacatcactttttttcacacaacacacccaatttgtcggagcaaccacatgccatctaggcaggctgtccattcattggaagaataggtcatttttatgtaaaaattgtcatcctcattttttttttttgagatgggagtctcgctctgtcaacccggatggagtacagtggcatgatctcagctcactgcaacctccatctcccaggttcaagtgattctcctgcctcaatctcccaagtagctgggattacaggcgcccaccaccatgcccagctaattttttgtatttttagtagtgatggggtttcaccatgttggagcaggctgatctcgaacctgacctcaggtgatctgcccgccttggcttcccaaagtattgggattacaggcatgagctaccacaccctgccgtcattctcatttttgtaactttaacattttgatataatttcaaaattacataaatggtggaaaaaacacccttatgccttttacccagatttaccccttgtgtatatatatgtgccactttgccatttgcagtatcattctctcccagcttccccacacaagcgtgtatattattttttaactaattaagggtgagatccccatgcacatcgtgcctctttacctccagacaactcagtgtgtctttcctaagaagaaggacattctgttacataacccagtaaaattaccaaaaccaagaaatttagcgctgatatcctatattgtctagtccttggtctatattcaacttttatcagttgccccaatagtagccttcatagacctttttttctagtccagggttcatttcaggatcacatattgcatttagttatcttttccctttcgtcccctttatctgaaacagttcctttacctgcacttctgtttttgcctttgtcttttttgattgttacatttttaaaactttttattaatatgttttatatatgtatattcatatatgtatatatgtatgtatatttatatgtttttgtctctctctatatatacacacacatacatgcagttaacttgtattttacacattgtatagccaaaagaaccgtgaattctttttgaccaaattcaaccctgtgatcctagcacatctcataaccatagccctaaggctcactgctcttactgcccagacatcttgctgccatctcagaccaagaagctggcgtcattgccatctgtagtactctaaaagaagcattcggcctcatggacactagatagtgggatgatattgtttgtctcctcagagcagagctttacaagctgcctgtgattaaaaacaaaaacaaaaacaaaaaaacaaaacaaaacaaaaaaaactttaggccaggtgcagtggctcatgcctgtaatcccagcactttgggaggctgaggcggttggatcacctgaggtcaggagttcaagaccagcctggccaacttggtgaaagactatctctactaaaaatacaaaaattagctaggcatggtggcacatgcttgtgatcccagctacttgggaagctgaggcaggagaattgcttgagcctggaaggtggaggatgcagtcagccgagatcatgccattgaactgggaaatggaccagactccatgtcaaaaaaaaaaaaaaaaaaaaaaaaaaaaagaacccttttatcccccagttcctcagagaccatttatatatggctcttctgcacaaacccaggtagagtttgcaccccatgtgactccccattcaaggttgccattataccactcaaggagctgagtctactgagcaagtgctttgcttccttgtggcagtgtcaagctactatagaagtgtctaacccttagctctaatctcctttatttatctcatcaaacgctgattggatgaggccagtggcgcacacttagccgtgctgggctaacacagttggctcctatcagttagaattcaactgaaggcttgcatccccatggagcatttctcattcaccagcctgttttaggacacgatgaaatgcctcctacatagcacttacctcaattcgcaacaacactttgatttttgagatgattgtattggtatctagtaccatgacccaactctagggtccgtgaaactcccacaattttgcctgccattgtgtcctcaatgcccagtgcacagtagacactcaatacataactgtttaatggaagagtgactgcatcagtagtgacttctgacaaatgatgaaacacaataagaccatgggctaactcgaaatacgtttaagcccaataaaattacatttggcataagaagatagggatcatgcttgctctgagaatttgaggacgtttttgtttgcttgtgtgtttgttttagatttaaatgagggaaatcgcacttttgaaagcaccaaactgtgtcttacatatacatagtagacacttgaaaagcatccatttcgaattaatcattttgagagcttagcacaaccttagcagttaaactgtctgttactattttcaagaaagtctatacttgtccaactgtatttgtttatttgagagtcacatttaaccaggacttatttcactctgtattcttaatatttgtagggttggtgggggagggggtacaaaataatattttcctaaacaaatagagcctgatttattcaggaaaatagagattatagatggtttgcaggaaaaagaaggtttgaaaacaaaacctgtgagcagattgttttcaagtactttaataggctcagctgcttcctctcctccacttttcttttccatgaatataataataatgatgataaaggtttatgctggacccattataacaatagggactatcaccaaagtattctaaaactctctttcaactataggagatgatcttcagagaaaacacttgaaattgctactttgtgttatcaagctctgatgatttggggtatattgtttcttctgtgtggccctacttcaaattaaggctggataatggtaggcaaaacagtcagaagcatgctttcactggtgaggcatctcttttggctgagttaatctttatagtgaagatatacattgaaagtatatgtttccttactgcctgtacagcttagtttgctcagtgtccaggtggctttagttatgacttatgactcaaggatagcattttaggagaaccagtgggaaaaaaaagtagtataaatgtaaatgtaaaagatacagctcattctgtctttgaaatcgttgatgtgaaaagagctcaacagtgttttatttaaacaaggtcggcttcgaccttgattgacttgcagtaaattgcctggtacaagaggcaaaaggaaatggagagaaaaatggcaatcagcaccaaatgtttcacatattgattgacaagcaccagagatgtgctagagtaagacaaattggccaacagggcccatcttgacagctcttgagatgggaaaattgttcttgttaatttgctgcaggaaccttgtcatttatggaatgtgcacgtgagtgtctcctaattgtgcaaacaaagttcagtttcctacacagccttgttgtgttattgggtttggtaattctttggtctgaatcaccaggatgcatttgtaaatggcttttaaattgggggacaaaaggggaagtggtgcacctgctataagatggcattttcaactgaaatatagcaaattacttggtggacattttccgtttaacaatagatttcagacaaactcatgtgcataagctctccttccatctgtctgccatgattctcttctgccgtactggatctaattgcctttatctcaatgcaggtttgagtttgggggttttcaggtatgtaaattttattttaggagtttggtagtggccaaaaaaaaaaaaaaaatccttcgtagacttttctatcttcgccccttcagtatttctatctttctcttttagtcttctcctaacacttctctaatatcctcctccctctctccctctatgctgaattagtgaatgtctgttatcacccaggtacctctttacacctctctctgtaagatgcactgtattatggaccagactgccaaggagacccatccagaagccaacgttcagtcttgtttgtcattttttccaaattaggtaaaaatgcattttcatttagggtataatttaaattaaagcattgtcacagacgtttttgttttaatgttttacaagtagaagccctcaccatcattattaccccttcccccgagtccccccctcccgcgccacacacacacacacacacacacacacacacacacacacacaacacggccccactctctctctctgaatttttcaggccattactgcagtcttgcttgggcaggaatggaaaggtctttattttcatttaaatgggctgtatgaaaaataaatcttaacttccaagacctgttcttaatcaccttcattaatgtcgcagctcagaacaatgcatcactttcctactgtctaagaggaagatccagactcaaaaatattcatgatttccatattactttgtacagacccctttaacattaacttgttccagtgttgggcaggtcacatagatgcttaaaacagctggcatatggaataaaatatgggaatagtggggggaatatgtaccccactgaaggcattcagtgtcataactacagacagacaaatagacagaatattgtggaagctttagagctgtagggtttgtgatccctagcctagacttaccattcttaacctgttttcaaaaacactcttcgctgattatctcattttgtcttcaaaatagccctggaaagtaggtgcatgagactccattttccccatttcacattgaaaacagaagcatcagaaagtcaactaaacttgttagatggaggcagggaaaggaacctggacagctggcccgactgctcctacagtgacctttccacttagcattctctcatccatttgatgtcactcaacagctgcttccagcctcatccttcaccccatcttcttcgcaatgcccaactctaaaatcaccttctctctccagttgtcattgacctcaccttccccaggcagagttcactgcaccctcttctgggttgcaatgtccctgaaagcaggtccctttcatagtagctaccaggttgacaatgcagccacctatttacatgtctatctccctcactgaagtgtggattcctcaaggacacagactgtgtctggttccatgtcactttccttgtgtctggcactgcttctgccacgtagtcagcccccagtgaatattggttgaatgaatttgaagtgttagtaaacacacactacaacacaacttagaaaagtgctcagtccagagttcccatcctaaatttcttctccatctgcatgaattcactgtgcctgaatggcaagtcatttcatttcggaattatcctgaatcagaaaagagaaggcaagagaagctctggccatcagcagcatgcggattgctagaaaatgtttatccccaggaagcctagaagtgctggggagtcttttttagaatgctcaggtgttgtttctgtgatgccaagaatcttccaaaagattgagatgaagccacagagaaaaatgcttcaatgtttcaataacattaaaaatttaaatgctagaatattttaggtttctttgatttacaaattaatacccccaaatatgtatataaacattcccaaggctgaggttcaccaaggaccaatttattgaacaagaaagcctctttggattctccttaagtggcaccttttggttcacataaataaacttgtcttcccctcttctacctcctctgaaagaaggttgtgtgaattgaaactgcagaatcatattccaaagatcgttgtgcgttatcctgaggacaggaagggcacagcatcagagaatcttccttttggattggaccacagaagtcatttcaattgattgattgattgattgattggaaatgggatctcattctgtcacacaggctggagtgtagtggtgtgatcaaggctcactgcagtctcaacctcctgggctcaagccatcctcccacctcagcttcccaagtggctacgagtatgcaccaccatgcctggctactttttaaagatgttttgtagagatagagtctcactatgttgcccaagttgatcttgaactcctgggcttaagcgatcctcttgccttagactcccaaagtgctgggattacaggcatgagccgccatgcccagcctcaccctatctttatcccacataaatgtcttttctaacatcctctctaagggccatctaacatctgcttaaatgcctccacccacagtgaactcacttccacacaagaaagcccatttcatttgtgtactgatcaaatcactagaaaatctactattctattaacccaaactcattttttctatcacttctattccttggtctctgttatgccctctgcaaataaacaaatcaaatgccaacctccttgcacaggactggactgcatagcctgagttgaaccttcccctgtacacacaagaccctgtctgtccaagtctccagttctcctgagaatcctagattccttcataccttcacctcactgaaagttagcgcatctccaccatttgcccatttacttctgaacaccttcaatacagatgttcattttgaaatgtttctgtatctatgagtatgttctgactaaatctcagagcaaaactggaagaagtacagcttcttttcattagaactttgacttctattcgtggtttatttgggccaaacatattaatctgtgtctcatgcagagattatactgatataaaactccaaagcctttttttatatttgcttccgttcagtcatattttcccatctactactaacagttttatttttcttttaacctaagtgcaacactttacacttaccctttagatttcagtttgggtaatttggacatatttggatctttattattttccagaatatatgttcattcttctagctttatgttccctacagataagatgaccgtttctctccttatgtgtttctcaacatacctgctgagcatgcccaataacagagccctgtggtacatcattaggaacatgtagagaaatagacttcagtggactacaatgaatggctgagtaggtcatgagagctgagtggatcgtgagaactgaataggtcatgagagttcttcaaagtgttaaatagtgaatgcataatagagttgccatagatcttacccttcaattgaaaacccaagtgtccataatgatcagctaggcaatatgaatgaatgaaataagagggcatggtggggtttgtggtaaagtggagagtgcatatgtaaatcaaagccactaaaattcaattaaaagaaaaaaacactgttttactgctttggcaaatatatatatataaaacatattatatattttgtatgtatatatcttcatatatacacacacatatatctatatgccaaatgaggccagtgggctgccacagggccaactctgctccagagagcagcattagaaccaaggaatagacttgtatgtttctactatgtagagccatcctcttaatgatttctcggacagtcattgctaaaaagctactgctctaagcactttttctccttgggtagttgttgagacattggttcactctctggtgacttttttccagagctgacagtatcaatgttatttccatttatggttgatttaaaaactgtcagagaggttggtttccttgatgaaaaatttgggaggctaaacgtcttccccacttctacccctttcccaaccccctgctacgggtgatcctgacactagattagatggaccacttaaagcaggctagttttttgtttgctttttgttttttgggtttttttggccacattgtatattgtgttagtttcctattgctggtgtaacagattaccacagacttggtggtttaagacaatgaaaatggatgatctatcttacagttctctaagtgagaagtctaaaagcagtctcaatggaataaaatcaaggtgtcaacatgacagcatttcttctggggacaccatgggagaatctacttccttgccttttccagcttttataagctgcctgcattctttggttcatagccccttcctcacatcagtccaacatctgcttctgtggtcatatctcctagaccgctaaccctcctgccccctcttatctccttatctcaagatctttaacttattacagctgcaaattcctttttaccatgtgcaccaactaccagagacaggaaaaaaaattgtttttccccactctcacacttctgacactttattctgatgaaaaaataaaatccaatcattttttctctctccactcacactcaacacacagaacacttcacttctggttaccatcatgttcaagggtttctgcccaccagcaaccaatcagttctccagtggacaccagctgggtgtccactacttcaattcaattctgacactatctacctggaggtagcatcagatcccacaggttaagggcccagtccctcaagactgctcccacttcagatgttaatcacaagtcccatgttgtgacttgtgcttctaaatgacctggtataaatcagaggacccatgaccccttccttgggttctattaatttgctagagggattcacagaactcaaggaaatattttacctacatttttacctacatttatccatttattataaagaattttacaaaggacacagatgaacagccagatagaagagatgcatacggcaagtaagattgaaggggtgtggagcttccatgcctctccaagtatgccaccctccaggaacttccacagattgagctatccagaagctccccaaatcctattcgttttgttttttatggaggcctcagtgcaaaggcaggattgattgcatcattgtccgtgggtgatcaactcaaccttcaactcctctctcctcgctggaggatgggctgaaagtcccaacactctaatcatgccttggtcttctggtgaccagcccccacatcccaaagctatcaagatgaccccagccaccagtcgtctcatgagaagacaaaagactttagaagacaaaagacattcatatctccagagataccaaggattttaggaattgtatgccaggaaccaggatatttcacaatatcacagtaacatgttcacagggtccaggaattagaacctggatgatttggggaccattactgtgcacaccacatactttctgagctaccacaaggccaggttgagagaggaagctctccactctgtaaccttcattctaacaggccctgtgaggctgtggcagagtggagttaggggattcattaaggaaggggattccactaggacttaggtgtactagaacagactcgggactgtactagaatataaggcagagagagaagacattgttcaaaatttaaatcctcccgagttcaaaatttaaaatgagaaatttttaaatgagaaaattcctttctttctcccacatttaccccagagatgatgtagcccagcttctgagagtaagcaaagcaataaatatgaaacaggaaacgctggtaaataacttcctggggactactctggaggatgggggctgcaaagctaatactttcttgatattttaagggaagctcctctccaaaccacctgggctgtgacaagaaggaaagaaacctggaccctcaaccagtatccaagggctggcttcattttttccccaattagcttgcaacgagttaatagtagctctgtagtgctggattcagggatttgtgtgacatagataaggtttggcattaaaaatgctaaatcattacaactctgaattttctcatgttcattcacgaagctgtaatctttcccacctagtactatcactcttagggtgcatgaatcactaattattgccctaatcccaggagataaatttctccaaggaacccagcagcaaagagcaaagccttgaaacctacttatgaagaaatgtgtcagccgtcttggagatttttacttcccaacttggaaattatgttgattggagtaagtggaagcttaactggggggttgttgatgtgtgttatcatctgggggtggtggcagaggggataaactgtgagagagagccaattttatctcagtttgtcctctgactcatgaattctgagtcctgcaatggagttttttgccttgcaagaaaagctagattaatgcttgtgtgcatagtcattgactttataaaaaatcagattacaaggaataattttagtgtatatttatatatccaaatttatcataatcaccaaggattttaagcaagatttttcacggtttcatgcactattgaaatatttggtaaggggagaaagagctgttatccatatcctttctagatgttattcatcttcttgttttaaggtataaaaattttccctgaaagcctctggtttgggccttggatgtagcaataccagagcccgagggtagacttttgactataaagaataaaaaagttccagggcttaagctttgattgaggacattcctgtctttgtgggaaacagcaacagaaaaaagaagtcctgtagccaagacttgcttgggtttttctgctgaggaccgccagagattcccgcagctctcttgtttgggaggaagatggggaggaagaaaaggaaataggaatgctgtgttccttcgtcttcccttcatttctcccatgtaaaaaataaagtagccaaggaattattgtctcttttaggaatgcctcagactgttagagttatatcaattgatactgtcttaatttatcctataatttttttaaaggaagaaagataatatcagctctttattgcctatgtctgtactatagatgaaatgtgtcacactccttaattctctcccacattatcatatctttgataaactcaatagagaaccagtagcagaggatgcttgaaatggtttttaaattatttcagaaaggcttccaattaagctattgggaaatatgtgtgtatatatatttgttaaaattgtaggcagttgacttgcttttcaacgtttgtaaggttttccaagcttgaaccacttaagtcaaaagtagaactaataaaagcacaattgaacttaatatattatgtcaagatttacagtaatcgattattgtttttcagctatgaagatatcattaagcatatgccaagcaatcagcgcatgactgtaataggttcatgaaggaaaggctttttctaatcgttttcagtggtgtttttcccaagacagcaacagcttttataaaatgatggttatatctcctcattatggaatctaatctccccaaaagacattcagcagctgcaaaacggtagcatcttttagctgtaaattgttttttattatttatccctatttaactaaagaagaaacggccatcagatgatttaacaagacaagaatttagtagttttaacatttgacagcacccaattgttagcccatgcattgatctctttagatcttggcttaatggtaattggtgtatttttgctttcgtgtctctatgtactgtataagctgagtatgagtcttctaggaaccaaatctgcatgatcggctcttttatatttctctttaacatgggatttgaagttgtgtgtactcgtagaattcaagaaattgcagaattagacaaaaaggaatacagccatcctaatgtgagtccaattttaatagtgggtgtcattatgagctgaatttgttacccacaaagtgatagaagaaagtcggaagatggaaacctctgtttattggtattatgatttactggtgtgcatcccatcacaaaggaggctcttcagtgggacacaattttttgttcttaagaaagtgatcgggctctgccaggcgcggtggctcactcctgtaatcccagcactttgggaggccgaggcgggcgcatcaggaggacaggagatcgagaccatcctggctaacacggtgaaaccccgtctctactaaaaaaatacaaaaaaaattagccgggcgtggtggcgggcgcctgtagttccagctactcaggaggctgaggcaggagaatggcgtgaacccgggaggtggagcttgcagtgagccgagatcgccccactgcactccagcctgggagacagagcgagactccgtctcaaaaaaaaaaaaaaaaaaaaaaagaaagtgatcgggctctatttgagaatgttctgtggaatttaaaaataacatggcactaatgagttttcaaatcgctccatgggtagaactctcgtgagacaaccagctaatttaaataaataaggttctgtgaccccgtgggagcttacaggggtgagacatccattttaatcgaggctcagtttgagaagaggaaatttcactcataacatactttcaagtggattggctgcaatgtgattttctggcgatgtttcctttgttgctattttaaggcaaatgtttatgtttctttacaagacttggcatattttactggaaaggttgaagtaatttctccacccttaatatggcatgcctttctagaatggtcactcggaaccaattaagcaacaatttcattccatagactattgcaatttgcttttcacttattctgtgcagactgaagttgtatattcatggacatttcccatgtaagttttagattttccactttgtagatgcaaatacttcttccagttttgtgataaaataactcaacaacagcaaaattcaaataagaccacaaaaaaagtcttattaagctttacataaatagctgcttccctatcatgaaaacaactgggaacattgtactgttgtgaatctacatttctacttattcagtaattgtacccctagtgctgtttaccatttcatttgtattatttatatatcaaccaaagggtatgaacaccaaaaaataatttcacatcacctatcttccatttctttttattttaaaagccctgaagatatagttctcctataaataatgataaaaagatgctgtattaatatttcagcaaagatctccatctactcacatactcacaaataacatattctgtaatatatacacttacccctccctaaattaactgtgcctggggcttgcaagaaaatcaggtcaagctaaaggagaaatcagagaacaagaccaaaattaatttactactctgtaccacatgtgaatatgagtttgtagggggaaaaaaaggcttattttttggaccatctctatccctgtatatgttgagcacttttaactctgaaatatgtgctgcgtcttcttgcctggatgaaggtgaaagttcaaccctctctgcttagatttttattaaatctcattaagtcagctaaaaggagctgcctaccttgtcagttctgttccaaaacatctaaaagccctttttgtacctctttattgctggaggtaaaattgtgaacacaaccataatttgcctatctgtctgagaagagttttctaagcaacaattggcatcattttcaaatatttggaatggttttcaacccagttatgtcgtatatcttatgctatgtgttaaagcaagcacattgcatatatatgtaaatgcggtaggaaggatgcccctttaaatatgtatattcatgaaccattttgggttcctttctctcaaacccacattaacccatcagtcaaacatattgccattaccttcaaaatgcatccagattctgatctttgtcacttttgtcactatcaccctcatccaagactcacccccactcatccctgacctggatggattattcttatgggtctccctgcttctgcatcccttgggtttgttcttaacacaataacaaaagtggctttgctaaaccatatgtagtatcttgtcactcctccctcagaaccttctatcagctttccgtctcacccagagtaaaagtcaaagaccttgcagtggcttctgaggcctccctcttctccatctctcattccactccaggtgcactcacctgcttgctgttcctagaatataccaaatgtgcagccagctcagagcctgtgttggtgctatttcttgtgcttcccctagacatcagcatggctccctctctcacttccaccaggtcccgttcaaatgttatcttaactgggaggtcttccctgatgaccttatattaaatggcacccacctcttgacctctactctgccattccctactctccttacctttctctacttttcccttgaaaacacacacacatatgttgtgtttacatatgcttatatgcatacatatatatatgttcgtatacatgtgtctgtaaatatatttatttatgtttaatttgctgttgtttttgccgttatttatgtgttgattgccccttctctaccctccagaatataagctcccagaaggaaaggactgtttgctttttacttcataaccccagtttatataatagagcctgatatgtactagacactcgaagaatatgtgtcaaaaatatggaaggaggaaggaagaaagagaggaaggaaggaaggaaggagggagggtgggagggaagggaaggagaaaggaaagaagggagggagggagggaagaaggaaagaaggaaggaagggagggagggaatgagggaaggaggaaggaagggaggaaaggagggagggaagaaggaaggaagggagggagagagggagggagggaaggaatgagggagggaggaaggaagggaggaaggaagggaaggagggagggagggagggaatgagggagggaggaaggaagggaggaaagaaagaagggatggaggaaggagggaagggagggaagaagggagggattgttcaagaatctcttttcatggctggtctaggaactctgatggaaattccctgttagtccttttatcttccacacagtcacttatttcgacttcacttaggctgggtacaaactattttagtttggtacacatatgccacctctttgcttaaacaaacaatgtgacccgttttctgggatcataggagaaataagtgggaacacagaggccaccattcccgtctctgcttggacattgaccagtcacccctcctgcccccactttgccaaatgagctgaggaaatgcatccttacctcccaagcaaacattaattactgtttgcaccacgctttgagatccacagatgaaagcagttgtaaaagcaaaatgggttattatgttgggaatggttatagactcatttagctctggaaacccatcaagcaggaatgttgaatcatgaaactagggttggccaaatattacacttgttataattaatttgagcttaagcttcaacacagtgacatgtttcctttaaataaagttaagtcctctaaggatgcatgaatctatatggatctcgattttcagctgggaactgaaatttttcagatatgcagaatgcagaaaagcaaatgtgtctctgacttctggtggggcagggtgaatatctgggcagactgcttatttttgagacataaataatcttctgtctccttttccccacggggctgtgagagcagtgttcacaaaattatggggatttaggactggaactgaatttaaagggcctacaatcctacttcccactgaatgccaaaacattgtctacagccttgctgacaagagccgctcaggactgctgaaataatttctgggatgaggagcttgttactttgcaagggtgctgattctgatgttgttcaacaactgttgttagaaagctctttacatgtttatccatttttgtcaacaaatatttattaatcactttctgtgcacatgtactttgttaggagctttgggatatggaaagattaaaacagtgcagattccgcaaccacctagagcaatgccctggcctaggagagaacctgaaaggtggtagttattcaatacatatgtgttcattgaatgaactacagagtggattacattctagcaagaatgatacagcacatgccaaagaagccatgataccaagtggaacatgtataaaggagaggtatagatacatgcaagatttatcaagctgaatgtggctctttttcgtagccaaattcagcttgaatttcgctctttttccaaaccagcttataaatgtccattctgtttttcataggacatggctaaattatttgagaattgctacaacgtcctttacctctcttccagggttaagaactgcagggcctcgagtgtattaaattatttctagtacacacatcaatctgaatttcttcccctaggcagctcagtgcctcaactaggctcttaagaggtcagcctagaatggaatacaccaaccaattcagacgtgttcatacaggcctacagtacattgggtctctctttcctatgatctggacatgcttcccataccatctcatactgcatatactatttgttcatggaacccttgtttcctgggacatgttttatcttgagaaaacccaatatttcaaagaccatagtttggaagataagagtctaatgtcatatgtgggttggttttattaggggggaggggagcagagtaattattttacacatactgcattaaaattatagatttatagtccatttatatcattttctatgaaggcagattttcttcatccttatttgaattttgggttttctgctcatccccaaacttaagtactggagaggagtgttatctaataaatagagccttagactcaggtcactaacttactgtgtggtccagaaaaagctgcattctctttctgaattacatttttttcatcagcaaagtgaagtggttgatcagggatattatctaaggttccctctaaagctaacattcaatggactttctccgtagctttctttgacttcatctagatcattctatgacttttgctaatctcagggacagagctatcaactagaaagcagttctaaacagaagcatagcaaaagcaagacacagcaggtcaacctgagccccatcttctaaggcttatttagcatgtcagaactgcagagactgggaagaaaatgtgagctaagagccacaacagcctttgttctgcatctgtaccatgtcttcataagacgaggaagtctgcaagtcttcataagaagaggaagaagctgggcatttttgcatgtgcaaaccaatgctgacatttctgtcacatcacttctaccatgatgggttttacaagttgcccacatgaacatgtttgttcatgtctgaaatggcacatcattgtatcacctcacatgcaaactcctcactcactttaagtctttcagcatttctaccctggttggtagtggcttctttcctggcaactatgattatttgaaaacaacgtcaagagaaggctcgaaggcgccgcgggctggggtcggtggcttagggagcccgtccggccatggtggccgcgggtggtggttggcgcggctgcgctgcggcccggggcagtgcggagccgggacagtcgcggcgctgacgcccgcgggcaccagctgcagatatgaagcagagccgctgccgcgaccgaccgcagccgccgccgcccgaccgccgggaggatggagttcagcgggcagcggagctgtctcagtctttgccgccgcgccggcgagcgccgcccgggaggcagcggctggaggagcggacgggccccgcggggcccgagggcaaggagcagctgcctgccttggcctcccaaagtgccgagattgcagcctctgcccggctgccaccccgtctgggaagtgaggagtgtctctgcctggccgcccatcgtctgggatgtgaggagcccctctgcctggctgcccagtctggaaagtgaggagcgtctccgcccggccgccatcacatctaggaagtgaggagcgtctctgcccggccgcccatcgtctgagatgtggggagcgcctctgccccgccgccccatctgggatgtgaggagcgcctctgcccggccgagaccccgtctgggaggtgaggagcgtctctgcccggccgccccgtctgagaagtgaggagaccctctgcctggcaaccaccccgtctgagaagtgaggagcccctccgcccggcagctgccccgtctgagaagtgaggagcctctccgcccggcagccaccccatctgggaagtgaggagcgtctccgcccggcagccaccccgtccgggagggaggtggggggggtcagccccccgcccggccagccgccccgtccgggaggtgaggggcgcctctgcccggccgcccctactgggaagtgaggagcccctcagcctggccagccaccccgtccgggagggagatgggggggtcagcccccccacccggccagccgccccgtccgggagggaggtgggggggtcagccccccgcctggccagccgccccgtccgggagggaggtgggggggtcagccctccgcccggccagccgccccgtctgggaggtgaggggtgcctctgcccagccgcccctactgggaagtgaggagcccctctgcccggccagccgccccgtccgggagggaggtggggggatcagccccccgcccggccagccgccctgtccgggagggaggtgggggggtcagccctccgcccggccagccgccccgtctgggaggtgaggggcgcctctgcccggccgcccctactgggaagtgaggagcccctctgcccggccagccgccccgtccgggagggaggtgggggggtcggccccccgcccggccagtcgccccgtccgggagggaggtgggggggtcggccccccgcccggccagccgccccgtccgggagggaggtggggggggtcggcccccctgcccggccagccgccccgtccgggagggaggtgggggggggtcagcccccctgcccggccagccgccccgtccgggaggtgaggggcgcctctgcctggccgcccctactgggaagtgaggagcccctctgcccggccagccgccccgtccgggagggaggtgggggggtcagccccccgcccggccagccgccccgtccgggagggaggtgggggggggtcagcccccccgcccggccagccgccccgtccgggaggtgaggggcgcctctgcccggccgcccctactgggaagtgaggagcccctctgcccggccagccgccccgtccgggagggaggttggggggtcagccccccgcccggccagccgccccgtccgggagggaggtgggggggggtcagcccccctgcccggccagccgccccgtccgggaggtgaggggcgcctctgcccggccgcccctactgggaagtgaggagcccctctgcccggccaccaccccttctgggaggtgtgcccaacagctcattgagaacgggccaggatgacaatggcggctttgtggaatagaaaggcgggaaaggtggggaaaagattgagaaatcggatggttgccgtgtctgtgtagaaagaagtagacatgggagacttttcattttgttctgcactaagaaaaattcctctgccttgggatcctgttgatctgtgaccttacccccaaccctgtgctctctgaaacatgtgctgtgtccactcagggttaaatggattaagggcggtgcaagatgtgctttgttaaacagatgcttgaaggcagcatgctcgttaagagtcatcaccaatccctaatctcaagtaatcagggacacaaacactgcggaaggccgcagggtcctctgcctaggaaaaccagagacctttgttcacttgtttatctgctgaccttccctccactattgtcccatgaccctgccaaatccccctctgtgagaaacacccaagaattatcaataaaaaaaaaaattaaaaaaaaaaaaaaaagaaaacaacgtcaaaataaatcctttctcattttcacccctagcaatcgctcacttggctatgtctatttcagggtgtctgcccacatctctctttatttactccttctctcctttctctctcttctccatagattttctcatctaatgcaaaatgtcctcaagaaggtgggcaaaggcctctcagggttgtagggggtggaaggagaaagaaccaaccatttcctagtgcacgataatgtttcagtaccacggagagcggtgccgggcgtggagaccagggaaaaatctgtcagccttgcgggtggttttcaggcaccatttggagccccacaggtagtggaaatgacaaacgtctacaaagaagctttgcagtaagaaccactctccccagagcctaagagccaagccttacatcgtcacatgcgaagaacagattgcatctgggcccgggtgcccgtcctaatgtcagcctgcttggcatttaccttcctttcccaggctgacctatgaagatggggcaggctctgggggcattgttctagccatgcaaacgctgtggccattgtgtcagcatggaagagctgccggttcctttccagctcaacactgtaattttatcaactctggctcagagaaacctatatttataatgctaattagaagggcacacatttaatttgagtggaagactatttgtatctcgctgagcctgatagcacagggctcaagcgacagcagtcagaagcaaagcaggcctttctgccttctccaagtatttgaaacagggcttactcttgccaaacaatttctctgttggattaaaaagagagagcaagggagagtgctgaatatgctggagctcagaaaactttgtgtttatctcctgcctgcataatatatttctctgtgcactgagaaaacatgcctcttatgttatctaattgtttcctgacacatttagcaacatttcacactctttaaagtgacattaacattgctgacagtggaggtattttcattagatgggctttgaattttaggcaggatgcactgcaggtcttcaaataggcttgtaaaaagtgaggaaggcattatttatgaaaatagagacttggccaacagtgccctgtggatgtgtattaattttgctgactctagtcaatttagagtatgtgtgtgtgtgtgtgtgtgtgtgtgtgcatatgtacatgcatttgtgcacacacacacatataacagcaacttgttgggagccgaactaaaacatcttcattatccagcataccactaggctccgtgagtatcatggaaactcccaaaacatctctccatccacatctttttagccataactaagcaatgtgctatttcagacaaaaatcagtcactttgcacccaatcctgaggatgagtagccatgtggctcatgtatataggcagcatgattatcactctcccagtgtaaagttaaatcctcctccttgttttctcccttcatgcttctttgtgccccaaggccatttttcttatgtcttcagctgtctgccttgatgcatagttttccccggagagtgtcctaagtgagccttcagagaagagtaccttgaaagcacctgcctctgcggggcctgaagagagacatttggaggttcattctgaccttgacgaagaaagtaagccaggcttggagaaggtgaggaagatgcaattcgggttgtgaatttctgctagggcacaacctcacatggaatctcgacccaattgttgatctccatacttgtcatgagaatagaataatatttagacattcaaagctgaagaagagagctcgctgcagactgtctagtcatcttgacactactaccatttccagtcagccctcctgccctaccctagttaaaattactcttctctgtttgcatctccaacattgcaatgactctatgtagccatacaatgcttaattagagagctctgagttcatatcttggctttgcgcattacttactgtataacctttgtcaagtcccgtgatctcttcaagacggtttgctcatctgtaaaatagggagaataatagtaactgctagatggtattgttggaaggatttcgtaaattacaaaccatgacgtgctaaacatactgcctaaaacatttgtgagtgctccagaaatgttagtaaatattagtctcttccatggcaatatgggccctcttgtgactgagacaatgtcatcacatttctttaaagtactgatgctggccaggcacagtggctcacacctgtaatcccagcactctgggaggctgaggcaggagaattgcctggggtcgggagtttgagaccagtctggccaacatggtgaaatcctgtctctactaaaaatacacacacacacacacacacacacacacacacaaaattagccaggcgtggtggcatgtgcctgtaatcccagctaattgggaggctgaggcaggggaattgcttgaacctgggaggtggaggttgcagtgagctgagattgtgccactgtactccagcctgggtgacagagtgagactctgtgtctcaataaataaataaatattaaaaaatactggtgctgttatgtcatagtacaataagatggatggcatgtgttgactgaggcctacagaatgtaagaagtttgttgtgacaagaagctagcagctaggtagccacaataaagaaccctgatctcctaactcctagcccagtactcttcctaactgtacgctagtggagatttttcagatacaaggcaatgatgttcgaacaattgttcagggagggtataaatcaatgcatatgttatccatgtcctaacatcttcctaacaacctagacctagtcctactctcatttacattttcaattctaatttcacaatatttataggtctttgagggggagcttttcatgctttatattggctactggtgggtagactcccaaggcatataatctttagcatcttatcaaggaccattcaatgaggaacgggtggggtactgtgagcgtgggcagcatagagataaaacagtttgagcatctgctgcctagagtgcatgttttatctttgtggtccctaaagcacatagcaaaacacagatttacagttgagaactgtttgctatctgcagacaaagcctttgaaaaggaaagcttccaataatgagaatgaaaacaattaccatttgcagagtacttcaccatttgcaatgcactttcatctatgttattatttaatcctcagaaagtcctgtaaggggaatagaacacctatctcttaccttttttatgcatgataataacacataccatttaattcataaagtttacagaattgtctcatttagtacatttaaaactagtgaagtacgtttccacacatttcacttacctagtagttgaacacagaaaagttagatgacttgcccaaggtctcccagagaatcagtggcagaatcaatatttgacattcaatctgtttcaatgccaatcacattgttacatcagcacttggtactttgttattataaaacctaattaaattctctgtgcactgtggcatgaggtctaaaatcagaaaacctcggttccaactcttcttcccaacgaacttatcccctctgcagttcactttcttcatgtttaaaatgggaaaaagattgtacaacctactcccaaagggtttgtgtcagattaaatacaataatatatgtaaagggcttggaaataatacctggtacctcataagagctcagtcagtctgagcaattggcaatattattgtttctatataccaggaaccgcaagaagtgaacataaaaatgagtaagatgaattcctttgcatcgtggaacatatgttctctaagggagccttttgaaaattgtttcggcatcggcatacagttccttttaatctttctctagcagttttccccccaactaagctcttacaaaatagattctaggacggcaagaaaacagctcaatgtatcttctgcatattactcagcacagacagacaactcagtaagtgacagcattgcccacatagtttaacgccttcatctgaaattgttggattgtcttgggttacatttccccagtagctcctgaaggtgagaagctttcataattagagtcaagagtggaattgaatttctctctctctcttttatttatttatttttttgtagagtgttgctctgcagtccaggccagagtggcacattcagggctcactgcagcctcgacctcctgggctcaagcagtcttcccacctcagccccccaagtaattgggagcacaggcgcacaccaccgagcctggctaatttttgcattttttatagagatgggattttgccatgttgcccaggccagtttcaaactcctagactcaagtgatcctcctgccttggcctcccaaagtgctgggattacagtcgtgagccagcatgcccagcctggaatcaaattttatacaacggttgcgttctaaagtctgaaaattaaccaaaaaaatgtggtcgcgctaccatgcctgaaaatcccttgcttctcttggagactgacatgttgtcacttaataaatctaacagccagtttttcctccaaggagcaccaagtgaagtagtggcttaatattctaggccacttggttaaggaaaaaaacatacatttaaattcagaatcaactcttcttagcaagatacttacacactgagagagacacccaaaacctaagacaacagccatagcagccaacagtgaagtgaatgccatgagtagttgatatacatccatacatgttggtggagtaaattgttataatcaaccaatcatggtgctatttattatgtacaggctctgtactgggtgctaggatacaaagatgtgtatagtgtataacctgtacccaaagtcactcatagtctcaagaatcagccagacatttaggcaagtacataggctaacatgtaacaaaagcaatgatgaaagtatgtcctgggtaccagtgagtgtggtgatcagaaaagacttctaaggaaggttgttcttgagatgagtctttagagtgtcttccaaaggtctctagaaggtgtttgccagctgggcgtggtggctcacgcctgtaatcccaggactttgggagaccgaggcaggcggctcacctgaggtcaggagttcgagaccagcctggccaacatagtgaaacttcatctctactaaaatacaaaaattatctgaatgtggtggtgcatgcctataatcctagctactcaggaggctgaggcaggagagtctcttgaactcatgaagcagaggctgcagtgagccaagatggcaccactgcactccagcctgggtgacacagtgagactccatctcaaaaaaaaaaaaaaaaaaagtatttgccaacaaagagagagcaccttccatgcacggagagagatatgaggagagaatgattcatattcaaaaggacagttgtttcggcgtgtttagagcatagggaaggagggagtctggcacaagataacatagagtttaaactatactataggcaatggaaagccttgggaaagttgagagaaggaacatgacctgagcaaatgtgtgcattcagaaagatgttagcttttgtatgaagggaaggaacacagtgaaggaaaccagtaaagggaaaggtagaacaatagtctaggctatgctgtccaacatggtagccactagccggatgtggctatctaaatgtcactaaaacttaatacaattaaaaattcagtttttcagttgtgctagccacatctcaagtgtccaatagccacatgtcttaaacactagggatgtagaacacgcccatcatcacaataagttctgctggacagcgtcaatctggacaactacacatgaccaacataatgtttttccctttgagaggatctgggaggtgtaattaagctgcatgtgtcaagcaattagaactttctggtgagaaggtatttgaggatccattgccttttggaaaacaggtgtgtcactgcaggtaaggtgggtttgtgtctttgcaagaggaagctgcaaagaagcactgcatttcacctcatgaagatgaaagggctagcattagaaaattacagaaattattttaaaaacagaccctactctccatctatagcctcatctatatttgacaccttctgaagtgcaatgctgccagggagatgtgatatataaatatgcatgttgttggtgagatatagaaacgacacccaaatgcatagggtctcaaactgtgaagatagttcatgcttgagctcctcctgcaagaggccctttaactggggccggtccaacagcatgccacccttccaataaattatgcataagagcttgttcacaattgggatagttttgccagggccatctgaaaacgatttgttttcaagaaaatgcttaactgggctttcgtgggttcagtgaagtgtgagtgaagagggcaattaggtcttccacagtaaaaataaaaacttaaagcgagatgatgtggaatagaacaaacccagtcaggctgatatcgtctcattgagaagacataagaggtcataatgaaaattcctcaggtgaggttgaataacctaaaactgaggtggaacattctctgaatctcctgcctccataaaggccacccaaccctctcttgtcaaacagatctctctcgcctctggggaaaagcatgctgaaacttcccccagtgacaattagacttgctttgaggaaattttgcctctttctgacttaaattccccaatggtaggttaagtttgttttcttgctgttttcttgggtaggggaagaaggctgactgaatcaaatgttttacttctaatatctgcccaatgcttataaactggaaaaaagagcaacttaaaaattgatcacgtaacataaagtatacttatctaaagccatcacacgtagtaatacaggatttctcaacctcaatactatcgatatttggggctgaataattctgtgttgtgggaagttgtcctgtgcattataggatgtttagcagcacccctgtccctacccaccagaagccagtagcaccccaaccaaaaagttcccacacattgccaaatctcccctagggagcaggattgccccagtggagaatgactgagctagtctgacattagcactaaatatagcctgctatcagaaatatagaaggtaggttaatagctttatataaatacataatatgatataaatacaaaatataaatattagaagtaaaatataaatacataatatatatctgtatttaaattttaagatgctgaccgggtgcagtggctcacgcctgtaatcccagcactttgagaggctgaggtgggcggatcacctgaggtcaggagttctagaccagcctgcaacatggtgaaaccccgtctctactaaaaatccaaatattagcctggcgtgatggtgcgtgcctgtaatcccagctactcaggaggctgaggcatgagaatcacttgaacctacgaggcagaggttgcagtagccaagactgtaccactgtactccagcctgagtgacagatagtgagattctgtctaaaaaaaaaaaaaaaaaaaaaatcagatgctttatttgttaggggtcattttgcattctgcaataatgattgatactacagtctccctacctatggtacagtcatgtatacacagcaggtgcttgtgaaccagctggaaccagtaagctgaaagtctcattatttccatctgggtcccttgtccctactgtctgtcaaacactgttctatgggctctacatataacatctccactcttcacaacaacatgtagagtagctgttaatatcatcagagaggctcagagaggtgaactgagttgctcaaactcccaaatagtagagtaagtggaagggctcagtctgctggactctgaattctgtgttctctccattcctcccttgggctttggaggaagataaaactggatgagttacaaagttggggatgaattacacagcacagagatagaaataaggcaggtatgaaggaagaaataaacatttgtaaaagacaattacgtattacatctgttggagcccagggttttatttggagcagggtagaaaatgagaatgggttgggtttccttaatgaaaccaactcataggtgaatttgagtgtaaggcgactctaggttgaggaatagcccattgaagtttatggcaatatgcaaacctgagttcaaatcttgattcttacctttgggtatgttattcacgtcccagagtctctatacttgttgaacaactgacagtgtgggtgataagtgtggaaggggtataagcaaaatcactgaggctggtgttcagcacatcaaataggctaaacagatagatatgctttggcttaacccacttttccagtggtggtgaatgcgatgagatggagacagagagtctagctggcattgttatcagggcacctcgcagcttctgcactagcaggcctggctgccatgacccagtgctccctcaaagcccgtggtgaaggcttgatgaagaatatcttgtcacacagccctctaaaagctgcacatgcagaactacacagaccttgaaaaacccgatgcactttcctgcaaaatattcttatggtcttaatggcaaggagaaccacgttaaaaaaaaaaatcattaaatgcaaacaaaaggagagcaatatcccaggtattgaaaatatttttatttgcatagaaataatgtaaatttttctcactttttgaccccttcaaaaataggggcttcacaaaccccaaagatttagagaaaagtagatactttagtcaagcatctgaataaatagcaggtattaggaaacatcattaggacaactgtttaaatcctcttgcttaaatgtaagtccttttgcaatacttaactttaacacaaaagccatgtttttattaagttcttgaagtcacataggattttaaagttttgactcaagttcttttttctctccttacaaattatttttttctgtgtgagtggggcaccatggttatttccaggaagaaccttgtttctgcccaggattaattacctcctctgggatgacttctattgtgcattccagaaaaggactcatgagtttgggattcacatcttattcatttgttagcacttttgtctaatgtggaacatagtaaaatgaaatactcaaggcttgggctttggagtcagatgacttgggttcaaatcccagctgtgctccctgctaacagcatgatgttaggaaagtcagttcaactaagcctcagtttccttacctgtaaatggggaagacagtcttactaagttcagagaaaagtactgaatgttaaaagaatgtgtatacatatatatatatatatgtgtgtgtatatatatatgtatatatatgtgtatatatgtatatatatgtatatatatacacacacacatatatagtaatatatatattactagaatacttagtacttagctcagttcttgaaataaagcaagatctatatatatatatatatatgtgtgataatgaggtcattgaacttattattttgaatacaattattcctagtactttttttgttactgttatctgagcatgtctctttgcttcatcaaatatcctgacatctcattgctacataaatcacttatgcattgcctacacagaacattctaatatctgcttgccattaatctgttgaataaaaaagaacccgttgttttaagtgaattttgggaattgatctgcaacatgccctctgtcataaattcgtgaatatattaaaaagggttgggcagagcagcaatttcactaataatatttactgctttggggatggagaggagattgtagtcctttggtcttggggaattaagtcaggatccaaatcaacttaaagagcaaaatggttctgtaattaagacaatgggagtgagagcactatggtttcaaccacagatggtgtaggataaggttttcaggtatgactgaaatggatgatgagtgaggacctggagcatggctgtcaaataagcactgtgatctgctacctctccccactccacgtccatgaaatttctaattgattatgtcactgtttcctgccaaatccagggcttcctcacagtccttctcaacacagcattccacacagccactaccaatctatcagagttagcacaaaactggctatcggtactttaatcaggaaaaaaaaaattcatgagttcaaactatcactaaattgtattcattaggagacagataaattagaaaaagttggattagtccccatatttaaggtcatggttaatccaatcacacagataattagtttgactttgatttacatggggatcttgaaaacacttacacacacacccacacatacacaagaccatatgagtttaatgaaaaagacatattgctgcctttgcctgtttcctttcgttttttaacagatcagttgaacctggttttctgtccatttgctggagactctatactcattcaaaatggaactttcaacatagttggagagtcaaggggcttcagcagtacataaagtgggaacaaggtgaatgtctatcacctggttacctgcccatgccacactgagcatttctgtaagaaatcaaaatttataaagtgagcctgtagaagtttcagttttctcccctgtactttggaacctgtttgtgtctgtacagatggtctctgtcagttggaatagtcaggggggaaaatgtagcataagtgaacaaaattagcaaatgacatagcaaacagaaaacagcataccagggctggcatgatggttcatgcctgtaattccagcactttgggaggctgaggcaggtggaggcttgagctcaggagttcgagaccagcctgggcaacatagtgaaactccttctatacaaaaaatacaaaaattaaccaggcatagtggcttgcatctgtaatcccagctacttgtggggactgaggtgaggtggaggttgcagtgagccgagatcatgccactgtgctccagcgtgagcaacaagcaagaccatgtcaaaaaagaaaaaaagaaagagaaagatagaaagaaagaaagaaagaaagaaagaaagaaagaaagaaagaaagaaagaaagaaaggaaagagaaggaaggaaggaaggaaaagaaagaaggaaagaaaggaagaaaaaaagagaaagagagagacagaaagaaagcaaacaagcacgaaagaaagaaagcacgaaagaaagaaagaaagaaagaaaaagaaagaaagaaagaaagaaagaaagaaagaaagaaagaaagaaagaaagaaagaaagaaagagaaagaaagaaagaaagaaagaaagaaagaaagagtataccatttgctgggggcagatctagggactgagaaatttccgaagtaatggtaggtaccagtaagcagagttgaaggagctcccaaaacatgggcttaacgtgggcagaaaaataacaggaatcagacaattctgtgatgcgtattctcaatacactgtagtaaccccaatgctttcattgtgttatgactgctcttctattgtctgtatttgtataaattaaacagcagctctctctgtactatatgaaatgaattcatgctgaacaaaatttcaaaaagttcatgtaaagaataatttcacagcaactatcatatcaggctcctggaaaattgcacttgaacttcagttccacctcagtcactcaaaggaatttaaaaattggcttccagccatccttgttcttcaacatgcagtttcagatatgcctcaataacacaaactttaaagcctattgattgtgagttaaaatctgttcctaccagagcctcgctgctaagtggacgtcaacactgacttcacagtgccttggtcaggattcctctgagttcaggagccttgaagaaggcagagggtaacactgctatgaaggagccactttgaactttataacaaaattacaagaaaaactttgaactctgtcggatgatagcggctgtaaatggttattcaaagaaatgtttcttatttgaaatctggagtcccttgggattgggagatgggaacgcagaaacgtgatctgctgtagatcactctccttcttttatgtcacttcttccctttttttctcaccattctgtttaggcaagcatcatgtaaatggttagagggtgaactttgaaatagttaaacccaagtttgaatcctggcctctgctgcttaactatctgtgcggtttaacctctctgggtctcagtttcctcatgtatgaaatgggaatgtgttatttcattttatgggaatatatgataattctaacctcaagggactgttttgaggattaaattagataatacatataaaggaactagcacagcgagtggcagatagttattgtgtaagaaacatcagcagttaaattactaattataatgatagttatttttgttagaaggagacctgggatgagggaggtattgattaaacattagcactgattctgatcaaactccatcgtgttcagtgtaccttttccagaacacccagcaagaaagtcatgccttatatgaatcccaaacagccatgaatgaatggagtttttcaagtcaaactccatttatcaactggtcaatttcaggaatgatttgtctccatttctattctgttactgtacaggagcccctaacatttaagctttaagagtatctcatctcctatctctgccacccccatcctcaaagggtaatgggccagtggtttgatgcctctgctgctgttcatcctgttttctctctccagaagtcactttcttcctctttggacgtttgctcaggtatcacctttcccaggaatccttatttgactctaaaccccaactcctacctggccaggctgaaacaagtgtctcttttctctgtccccacagcaccacgtcattacatgccgctattctgctttttatcatgtggcactgaaatgacacatttacctgtctgtctcccactagactataagctctctgagggcaggggtggtgtcttacttatttttgtatcctcaatgtctagcgaagtgcagatacattttattgaaccaaatgaacccataaatagcattaaattcactgaataatgaatcagaaaatacaattataaaagcaacaataaaaatggacattgatttgaggtgtctgctgatgtctctacatcagcagtacatctaaaagcaggaacacacatttcttctgtctcaggtacttcttacttgcattgcaacactcaccttgtcctcaagtttgctttctcaatgttctgtccttccttccacacccccagatttaggacatgtgccatgggttgcttctcttggctcattttcctgaacttcccaaatgagcaaaccagcaggcaagcaactgcaaaggccccaagatggaaggatgaagcaggcaaaagtataggtggtgattgtcctcacccagcaatttggctgccaggagctccctgccatgtgaaggagaggatgcagcagcctctgtgtgggaggacaacttcttgacccaagggccgctccatgtcactgagcaccttctgccggactggctgctcctcctcaaggctagagagtctgtgcttttctttgtccgaaaaccacagttatggtgtcccaaaaaccacataatgaagagggtggggacattggccaactctttgggatgccaatgcatcaccctttccatcactcttccacttctacctcaaactaatgagtctagttttagagtaccttatttttggtcattcattcagcagatgcgattctttaggaaggcattggtgatgcagggggtgaataaaataaacaagatgcctgcattcaaagagtagtaagggccatgaagaaatgtaagcagagtagttgcctagagcaggcagatgggcaaatttcaagaagacaaacatggaagggttgattgaagagaagaagtgagattgtgaatgttggcaaggtgttgtagttgggggttgggggtggtgtcctgcatggaggggacaggaagtgtgaagactctgaaggtggaatggcttggtgtgttcaaacaacagaaataaagatgaccatattggctagagaataaggggccacgtggaaagtcgtaagtgttactatgagagtgaggtaggagaggcagctatgggctggagtactcaagacaggtaggtcatcataaggagtttgggtttccttctgcaagcattgggaagtcactggagtgtgctaagcgggcgaatgatacaatctgattcctcaccttaaaatttcattctggctgctgtggaggtaggactgggacaatggggagtagatggattatgtggcaagaatggaagcagtgagaccagcaaggaggtagctcagagagagataatgaggacttagattaggactgtagcagaggaggtaaaagaaactggatggttgctagactgattccatttgagctgtgtacatggatatttctgctcatgtcctttttctgaaatatgcaactacctaaaatatgaatttagacttttggagaaacatcaaaccactcttttaaaaaagcacatctggagcagttcatttctttttttttttttttaatatttatattgtgagctggtttcaatgtaactttcttggggtgctctcgtgacactcattgctgacctttgacccctctgtcctctttcccaggtcgtcccattccacctacatcctcgcctagtctcctcccatctgctcagctgcctagctcccataatcctccaccagttagctgccagatgccattgctagacagcaacacctcccatcaaatcatggacaccaaccctgatgaggaattctcccccaattcatacctgctcagagcatgctcagggccccagcaagcctccagcagtggtaaggaaactccgtggtgtctgaatgtgtggtgtttcgtgagtgacattcttgattctccaccaaaatgacaatgctgaaacaagggctgggggaaggtggtgtggggagcatcagggtgaaatgcatttgtcattttgtggcatggtattttcaagatacatctgtagaaggttgaagttacttaagaggttttgcttatcttaacaggatttgggcctccttcagtggaaggcatttgcccattgctacatgtgtgagcatgctggtctcaaaggtgaagtgcagagagacaccggcatattgaattttgtattactatggttctggtcatagctgagtgaccctggacaccctcacaggcccaatttgtgtgtatctcagatccctggtttgttttttgttttcttgttgttgtttgtttgtttgtttgttttggcttttaacttctattccttgcttgtttagatgattttgaaattacaatgtgttccgttgacatcagtactgaatgtcttgccaagtctgaagtgtttggggggtgacctctcctgtaaccctttgcttgtgacctcactagaatttgacaagttggtggtgtggtactatggtaaatactgcctctaaatccatagttcttattttggttttctcattcatggaacagggaaactggacccaagatcctgtcccacttttgaagattttgtggccactgtcttagctcccaatctctgaatcttgggtggaattgccctgggcccagcgataatcatgccttattttgatttctcctgttggtgttatgttcctgtgaacatctgaacgtaggaacgggcaataactagagtataagtgtccatggcccagggagagacatttgcaaaaattaattactcctgacctaaaggcttgggagttatcttctgaactggtcagtcatgaggttaattagcatatcccatccaaagcaatacagagctttccatgccgagagtgggtcttgatgcgattgtgtttaggctccatccaggagtatatgccacccaccactggcctcaacctctacaattagagaggacctcccaaatacatttaagatgactcattctggaaatggaatgatggactgctacttaggatggcccatgcccttcttcatagccaggcctgatatatttagtaaactcatattctttttcaaaaaaaattacctaatcaaatctctcatcagatgagcaatccattgttgatattatgaaggcctttaatctaccataaatctttattagaactcatcagagcttctagtttgagagaaatgtgattatggcactcttaaaatgacattacatcattggggtgattggtttatcatttggagaagagacatcaatcataactagcataaccacacagtaaatgaattcaacctttctaccgcggaacaatgacactgtaattgctcaaaatcaggcttaaaatgaaatcggaaaatgctctttcttcaaatatgatgttaacttaatggaatatattatgaaaaatcatgtttgaggaaattctatataattaaaaatatgtggaaatatattccctttttactttcatcagaacctgattttagctacagagccctttttttgctgcagagattatgttgcatttaattgaactaccttcgcttatgttttgctgctttttatttcatactatgtaatcgtgatgaatattgtattatgaaggacaagaggcttttgaaatgaggtgcacctgctgatagctttttaaaaacagacaattattagggataaaatgagcttttaaaaactatatccttttatgcatatatggatacccaggcaatgatgatttccataagagaggtcagttcatatcttgaggccatctggaatgttttcttagcaataatgcagtaagtgatttcctttcttttggacagtgtatcagattgaaacttgttgatagggtatttatgtcagctttatgcctaatcaagacctcattttggtggacacaacagatctgtgtgttcagagtcaaacttgtccatttttcgtcactcacaccaatttgttcagctcacttaagactgatagcaatttaagctttagtaacaggagaaaatgccacagaaaatttaagggtccattttcatcccaaacaggagctgtgctgatatgatttcttcaactgagggagtgaaggcccaattgtgcaatacccttgttttcagcaggtacttattatcagagagtttgttaaagctccggtcaacaggcagtcattagaaattctggactctggcttagctaaaatgagagcaaatcgagttcgagtatgcgtgtgctcacgtctgtgtgtgtgtgtgtgtgtgtgtgtgtgtgtgtttcttgtggaatgggtttaaggtccagggcaaattggggattctatcaagatttgaatgcagttgtcatgaatttaaatttgacataaaggattgaaaattgagtttgacacggaagatgcaaagtgcagagctatgtctgagtgttttgaactgagtctgataaaaggggctgaatttttcaggaggtgtcacagcacaaacaaagtggccttgtgtttgggtgtgttgtgtttagttggttaattacacagaattttttaaatttgtctcttggcaataaccctgtgttctgagaatctggtactactttggtctttgtctctttcttaggtgaaataaaacactttccaacacatcagcccatacacgacagtaaaacattatttcctgctctcctcttatagttgctgttattatttgatgttggtgaagcccatcattaggagggtcacagtacacaattccttcccgaggagcacctgttctatagaaacaaatgggacataaactacaggaacgaaaatgtttttccccaacatgaaaaactcctcaaagcaacaacaaagcttcacctttatggcttgagtgtcattattttctatgacagtggtgcattctttagtgaatggtactaaaaccttgccacctttggagtcaaattgctctaaccctcaatctatgccaatcaagtagatacccaggtacagttagtgagatgtttacgggagtggtgtttctctcccccttaagcattttctttcaaatagctgagctccagcgagtggctcattctgtgttctgaccttctgccagagcgggttgctccagatatgtttcttgtatacagaagcataatttcaaatcctatggaataactcatctggaaaaaaaatctagatcccagcagcagcataatggaggcccctgcagatggaagaatgagactaccttccaaatcagaatagggtttgcagtttgctctcagcatatgatgcagaaaatatacaggcaaccacattatcttctaaaagcactggctttcctctacctgtgaaacattgaggttttttttaaagtttaaataaaggggctttgaacactcattagtagcatcaaactatacacataagaaatgtagtaaccaagatgccctagctaggacatcttggtagatcttatgtggcaaaagagctgtcccagtcagagagtctctgtttgtaactgagcacatgaagggtgccctaaccctttttaaagagcaatgccttagttaattctaaatgaaaatagtatatcaaaatcagcaggctttggggttgcctaggatcaataagttgcctgtctaatttatctggcatcataaaacaaatgagattcattcattcattccttttttgcacctccctcataatatgtaacagcttataaaaatcgttactttttttatttttgagacaaagtcttgctgatccaggctggagtggcgtgatcttggctcactgcaacctccgccccccaggttcaagtgattctcatgcctcagcctccctagtagctgggattacaggtgcacaccaccatacttggctaatttttgtatttttagtagaaatggggtttcaccatgttggccaggctggtctcgaactcctggcctcaaatgacccacccgcctcagcctcccaaagtggtaggattataagtatgagccatcacccctggccaacagttgttaaaaaaaatttttttcagctataattagatgatacaataaaggtaaaggaaaaatttaagggagaaagtatacatatatgctcaaatgtataaagtcctattccattatttaagatagagaacttgattttaagcttcctagcaaccaaagcaaaaagggaaacatagggaaaagaagatgcataataccccatgagataaaagcaaatcagtcatttcagggaaattctgggaatcctcacaatgaggccagaaagaagtttgtcataaaggagctcatgtgtgtatccagatgactggattcttagtaacatcatataatacatatgctaatttcctgtcaaaattccttgtaacctcccttaaataagacatagagcgcactttccatgtaaaaacaattctacaaatgtccaatatttgcacagtccaagggcaaaacttgacttgatcaatagaaaaaccttagttcttataaaggaccatgtaaattgcatgccctataggcaatagacctcaaatgtcattgctcataactgaatttttatgggaattagcagactttgaggttaaagtcaccattcaggacctgaaaagcagatgttctgtgttacagattcgtcctgacagcctcatagaggttagaattgacatcctctcatgaaaacttcaggacagcctccctcactcatctggcccctaatatccatccatggagatggatttgggatgaggaagaagtcaatatttttaacttaatgaaacttcttctccttatatatcttaggttttagaaagaaatttttctctgagatattgtaaattttcttgcctccctaagcagattatgcacattgtaatttaatttaatttaggattccctgaatagctcacagcagttattatgcacattgatgattgtacagtgctgataatactatcttgctcttttctacaaaagccattgtacatcctgtggttgtttatcccacttctcctaatgttctgcattgtaacttcttattgtgctctttatcagcttttcttcctcctcccagcttcactccgttcttcagggacctccactgcagtttctctggtgacagattcatagtagacactccgtaagtatttgttaaataaatgaatgagtgtctatagtaaccacctttatttttcactcttgattttggggtcaggatatcaagtgcaaacatcattcactttcccaagttggatttgtaccgcacataagccactttgactccaggttcttccccaagtcccttggatgtctggttcagacattcagagctacctgcggctccttcctggcatccaggcagaggtttggttccagctgcctctcttctggacaggttcttgtcccactgggtagtacaggctaagtccagcatgttatctttgctgtggaggtcacagaaacagccatccctcttgccccaaatgcagagccacacaggacttgggctatcagctcatggccctttttctccctcaactctagttagtatgctaagtactttacatgactttcttcatgtacttgtatttagtccctgccacctcccaatgcatgaaggattatcatcatacccattttctagatgacaaaaccacggcacaaagaggttaagtaatgtacgaaagtcacaaagctggaaagtgaaggatttcggcttcaaccttaaccttcctaattgcagagacttttctcctcactcctctgttaactgttaacctcagaatatttgtttggctgattgagatatacaacagacagtgaaagcgttgtattaaagggcatgggttacaattttttaaagatttcttaaaacgaaatacagcatcacaaaataccctttacgcccactgtttggcaaacacacatatccccagacacttcccctggagattctgattccctaagctcaggaggggctaaggaactctgcatttaccattcccttcaggtgaagcatgtgctctgacaagtcttggaaccattaatgtagtgggaagctctaaagtgaaagttggaaaacttgagttttcttcacactgctcctgattcacagcatgatttttgtcaagtcattcaatcattgtattagtctgttctcacactgctatgaagaaacacccgacactgggtaatttataaagggaagaagtttaattgactcacagttctgcatggctggaaaggcctaaggaaacgtacaatcatggcggaaggtgaaggggaagaacagcaccttcttcacaaagcagcaggaaggagaagtgcaaacaggggtaatgccagatgcctataaaaccatcagatctcatgagactcactcactatcatgagaacagcatgggggaaactgcccagtgatccaattacctccacctagtaccacccttgacatgtggggattatgggaattacaattcaagatgagattttgagtgggaacacagccaaaccatatcaatcaccatgaacctcagtttccctatctgattagattgagcattggcttaaaaggcctctaagctttcttcttgttctagtattctgtctctgtaagctccttgcatctggctggaccaagctgtcccaatgttagaggctccccaactcctcctctgtatagtgtggatttcatcccaatatctgggacattgtcaaaactaaggcctacacagtcatgcaaagcagatccttgtaacttacatgcaaaagttgagaagagtggttttggtatgctataacacttggctgaaaatgttgatggcaatcccatcaaggagagaaagtacagctccaccaacacaaacctgggctcccaaagaccctcaccctggcctcctaaacaaggtctcccacctcaataattgggaacaaatagtcctcaggactctctcggcattgttaacttgcctagcaatgtaccaaatagagatcagacttttccttcttttcctttgtgccttcttgaaacagacaaatactgcacatgtgcacgtgtgtgcacacgcacacacacacacacgtaaatgtgtagtttgtaggtccagcaatttccagcccaactagggtcaggaccactcttctgcaccatggtgcaaatgagcacacaatcaagatggacaggtaattcctttggagatgcacagcatggaagtgacagacggcagagaactgctctttctcagcaaataatcttgatattgacaaaattctcagggtcgataggcattgtgtacattctacctctccatttctgtccctggcttcttggtacatataaaaagatgtcctaggcaagcccagagactgggaactacaagtgatatcttaacagtttcgtgccctagtaatttttacccagaacttcagcttctcgcaaattcacttaaagagtacattcaattctaactagcttcctgcgtaatattcaatagtaatttttaaaagtgtccccagtcccttgttagggatgtctcaattcttgggttgaatcaaaggatttcattattttagcagtgggtagtttcaacagaaattatagccccagccctgggtacatctcttagacccatacccaaaataatcatgaagagtgtggactctgacgtccatactacatgctttcaaatgatagctcagccactttctaacactataatcttgagcaacttacttaatctatatctcagtatttttgtctgtaaaacaacaataagtgtctacaagtcctaaagctgttataaacatttaaatgacattccgatacatctaaataccgttaaaagaggcttagacaattgaagcaatgattgggtttgagagtacttgtttcctaatttaacaaacaatgttctattgtgggcaaatatatataacatgaaatttaccatttatactatttttaagtgtagagttctatggctttaagtatgttcacattgttatgcaaccatcaccaccatccacctctaaaacatattcatcttcctcaacagaaactctatacccattaaacactaactcgctttccctcagcccctggcaaccactattttatttctgtctctatgaatttgtgtctaggtacctcatatcaatggaatcacacagtacttgtccttttgtgatggatttatttcacttagcataatgtcttcaagtttcatccatgttgtagcatgtaattctacaggacagaattttcttccttttaaagctgaaaactattcaattttccttatataccacattttgtttattcactcctcccttactagacacttcggtggtttctaccttttgtctattgtgaataatgctgctaggaatattggtgtacaaataattgtttgagcacttgctttgacctcttttggatgtataaccaaaagtggaatcattgaatcatacagtaattctatacttaattttttaaagatttgacatgctgttttgtacagtgtctgtaccactgtacattcccaccagcaatacacaagggctccagtcactctacatcttctccaatacttgttaccttctgtgtttttgataatagctatcctattggtgtgaaatggtatttcttcatggttttgatttgcatttctctaatgattagttcttttcatgtgcttattgcctgtttttatatcttctttgaagaaacgtctattcaagtcctttgcctaatttttaatcagatcatttgttttttgttgatattgttgagttgtaggaattctttatatattctggataccaattgcttatcagataggtgatttgcaaatattttatcctattgcataggttgtcttttcattctttgatggtgtcctttgatgtgtaaaagtttttaatcttggtgtggtccagtatatctatttttacttttgttgtctatgcttttggtgtcatgcaacaaatactgttaaaggcttattctatggcagccattgttctaaatttttacaaatggtaattcatttaatcctcaccactgagaaagtgaaaagcagctcttgattctgggaacagacctgacaataacatctaggcttaggtgcattaggagctggcttgtcactcacaactaggttgtagtgttctcctactgaacataaacaattttacagaacccaagcacgaggccactccatggctgtggtgacatgaaataagatgacaagaagaccacaccatgatcttgccccaatacagacaaaaccaaagtcactgtccaaaaaacaaaaatacaaaacacccttctctctaggctaaaatgggtgattactggttttttgttttgtttttgagatggagtctcgctctgttggccaggctagagtgcaatggcatggtcttggctcactgcaacctccgtctcccaggctcaggtaattctcctgcctcagcctcatgagtagctgggattacaggtatgtgccaccacgcccagctaatttttgcatttttagtagagactgttttcaccatgttggacaggctggcctcaaactcctgacctcaggtgatccactcgcctcggcctcccaaagtgctgggattacaggcatgagccactgcacccagcccacaagccctttctaacattcttactgaagctcccttctggctccccttgtgtgtcttctccctcatagcaatgagttaatcaactgtgtttggccacagtgtgctcctgcctggtggtgttttggctagaggacatggacaccattaagctgtgaattgggattattatccctgttgtacaggtgggaaaactgtggcacagtgaggttaagtaatttgccataggatacatagttattaagcagtacaagaacttgacccaaagaaactggtctccagagtgatatatagaaatttaagtgaatttttaaaagacaattccagaaaaaatatatatattcaagaaataaaatgtagtcatcatttaccgcatggcccagctctgaatagcatttacatggccacagtaatgtaaacattgaataatgacttagctattaaatcagaaggatgagaggatatgtgggctgggcagatagaggaaaaagccaagacctgcatcttttatagtaagaagttacaagataatgcaagaagttactaaataaaatggaaaatgcaagaaatagcagcaaagcatgttatttatagaactggagataaataccaaaataattagctataaaaaggtaaatgtggttgctgctgggaaggaagaaattggcggtgatagaagaagattgctatttttgaactgaacgttatagaacgatttaattctttaaaccatgtgcacttttttcttctgatgaaaagaaaacatttacatgagattgggcaggcaaaacacttagtacaatgttaaaaccccaaaatagtagctgtttacttctctcaaatatattttattcaacaagtatgtattgatcagggccgatgtgtttgaaatgacatcaggtgctgtgaacctcagtagttaggcattggagcacttgcgtcaaacccacagatgggtctgtatctgcctctgttgattagggagccctgtggagttgttggggctttagctctttttcccaacacagcttaggatggcatgagaacagagaagatatcatgactactattcctcctcatttctaatccagtgtccatctaagcacaggtaccatcatttcctcagagctttcccaaccaacactgcccaactagaacttccctttttcagaattacagaacagctttatagtctgccttattcaatttagcacctcattgcattctgatttgtaatattctcttggcatttcatgcatgtaagtcacttgtgtcaacattaaattgtcaccacttaaagacaagggtcatttctttggtctttttgtgtcccttagcacatggtgcaggtagagatacgctcaagagctagatccttattgatctaccttaagaaggacaatgttagagtggggcaacaaaaaggtggcagcagcccccacccagtccttcagatttgggcctgttgactgcaggtcactgtaacatttttagatctgagaccatctgtgattgtggatgtgatcacatttagaaagaacagaaaaaataccacagggcatgatgagaaaagaagtgtgtttgtctaacctgcgtcttccttgggaaggacagagaggtgtgaatccaaaataacagttctttcttcatttgtttagtagctgctgtcctgagttgatgttgccttggaaatagttgctttcattgataaatgttttgtagggtacagctacaatcctagggaatgcatgcgcttagtgtatggattcatttgctggagctgccctaacaaagtaccacgaactaggtggctgaaaacaactgaatattattctgtcacagttctagaggctacaagttccaaaccatgctccttccaaatgccctagggaagagtccttccttgcctcttctagcttgtggtagctgccagcaacccttagcattctttggttgtggcagcataactccagtccctgcctccaccttctaatggccctcttctccctgcgtgtgtctgtcggtctctaactctctctccttatagggataccaattattgaatttagggctcgtcataattgtggataaatttatttgaattaagtctgcaaataacttcacaagatccaaataaggtcacattcccagctatcaagagtcaggacttcatatcttttggggaaacacaattcagcccacaacagaatccaattgaatactcagcaggatagagcaactagaaatagctccctatgtcttctctattattgaacccaccatgctcgttgactgcattcaccattagatttaagttctttgaaggcaagcaccctgtttcccttgtgtctcatttcgttctatgcatttagctaccactgagcctggcacatagcaggtgctcaataaatattaggtgaattaacaaatagtgcatgcagtcaaaggatggaggaaaggtatgcagagggtatttgcaatatccaaagaatggtccaaaaaaaaagtggaggcagaccctttctcacatgctggctccctctatctgcagtaggagagacagagaatgaagaaggcatttctggatgatggcatagtgcaacatgaatggcaaagaaagccagaagcaaacagagaaaaccaatgtagttaatatttaaactctagaatccaaataaactagttaaacatagaaaaactgttttgtgtggtgctttaaaattctagctcaggcctttcctttgattcccccagggccaataccagctctctcttttgtcatttccatcagatcttttgttttacgatttctgttgcttattatccttattcctttctggtgtttataaagccaaagatgagggggcacatgcattcttgatactgaagcatttaggcggttatcacttaaattaatgttttctgctagagttatattttagtggaaaacagtaattgtttctaagacagcatcttggagttgaaccaattctatcagtgaacactcaaccatgggaagctaacaataaaatgcagtgatcaatcgttcttcttttctctcttccactccaaaggcagacttcacatctctttgctttaaaaaacaaaacaaaacaaacaaaaaaaccacacaaaaacaaaaaaactaaactgatgatagagcacctttttaacacttcagcagaacagtttccccatagaaaatgacccccaaatttatctttattgcgacttcccacccctcaccctcacttagaatttacaaagatgcctttgcgtaagttataaccttgcaaacctctgcttttgaattgtgttgatgtccactgtggacggagggctgtgggacaggactatcttcctgcatgccagctccccgaataattccacgatgcaattggtggcattcacacttgactaggatcgcatttcaatctgttccatctgattggataccgtgttttcttcccgtctgtggtaatggagcactcgttcccagttcccaaggttattttcatctcaatgaccttttgcatctccctggggagcctgaccattacccacccccctttcactctgtctgcttagaatattgctttacatgtcgctcttcctgtagtaaccactgtctttgatacattcctatcagcgattttgttcctgtgggagcagtgatctttaccagtttgtgactctccctctttctctgtgggttcttctcgtggtcttacagctcagttcaagcaatttgcttttaaagatgaaaagagataggctgggacaccacctgtttacgacattaggatgctgggtttctgatttcttttgctaacctgcgtgccttctcgtgaagactaaaaactggttagaatataaaagatggaggatctgttgtgaaaataattcacagggaggggaaaaagtcatattacactaggcagacttggccttttctgccgctctttattgatctcaaattgctgaaagggttcagaagataaaaagaatctgtgaaacaaagaaaggaaaccatggtgaagaaagaaacggccctgatatggtggcagccagagaatccgtctgagtcctaattctacccaaaactcacggtgtcccctgggcagacccttctcctcttgggccctctgttttgtcttttgtagtgttgggaggctttgagtcagatgttttgaaagttcttttccaactttcaaatatcatgattctaggaaaagactgagaactaggcacgacacattattccacttccaatgatgtgctgagtcgccgaatctgtcgcctctctttaaaaacacacagaaacaactttttcctcccaaagggaggaaactaaagctgttgcccctttctggattggtgatgataatgatattaaataataatcatcatcacttatgtttgtgtaatattttctatttcaaggaacaagatcatgtcctttcctttaggttgcaaacatctgacccttggtcaaaggagcttgcaaaccagtttgatttgtcctgcttggtattatttttaaaattatgctttatttaggtgacaatgttgaaaaaccaagagacgtacataaacattcataattctatccttcctgaaataataacatgcctagtaatacctacctgcattatgtcatggccacaaatcactagagtccagtagagactgcccgtttgagatcaggcatgatcttttaatttattcatgtatgagatttgcatggcctttgtagcatttgtatcttcaatctcagttatctagcttgttggcatcaatgatgatgataatgataatgatgatgatgttaccactgctaatgtcattaacaataatctccatctccatgttggcacaccatctttacttttaggaaacactatcatgtgtattacctatttaaatccccactacaaccatctggtgaggaagatgtagaaggtattattatctctacttaacagataatccatttgagggataaaaatttcaagtgacttactggtggaccatatttagtctaatgatctcaaactttccactatcaaggtctttttaaattttcttaatgtactctatgttttgtaggacttggtctacctattcacatgtatttaaaaaaaataggttgtttacttattttgtgttacatgaagatatatagatagataggtacctctaacctctactctcaatgatgtatttgtttaccaagtacagttgtaactgctaatagacaaattttgtggttcctttgcacaattactctcttttttgtttgtttctttgtttgagacagagtctccctctgtcacacaggctggagtgcagtggtgcaacctccactcactgcagcctcagccttcccagttgaagtgattctcctgcctcagcctcctgattacaattactcttcatttcagtgctttcctagctggacttcttaacaagtacatacaattaggaggaaggaaagcttaagtgggccatgaaaaggtcaggtgagttttagggatcctggacccaatatccttattacatagctggggcttatgctgacccactaagatcagtgctaagggagttacaagcagaattcaaactcaagtttttgttactgtttttatgtttgacacgggagtatacagcatgggagatcacctcacctctggctctgaggttggtactcagaagctgtggactgtcagcatattttgattaaacacctatcatgtgtccaccatgtcacaggtgctgggcattgcctgggtctgaagatctatcatcgcatctgagccaggtccttggcttccttctggcattctgtttgacactgatgagttctgagaccttgctggccttgacttgcccacttcctcacagcagcacaggctcagcatgagatcctcttttccagaataacccagagacttcctggacttgattgagttgtagcttgctttggaaaagattccaacttttacaaagtgaaatttcctatgctaagcaaactctatttatattttattgtattctgttgtcagatgctgcaagtacttgaaaggagcttgtgatataacatattcttgattgtaatatagcattgtaagcacattatggactgaattacaacatttcatgagaagaaaagagaagtgctacattaaacgtacacattattcataaagcttctaattccaggaaaattaaacttgaaaaaattattttccagaatggatgatctgtagcacataggttcttataagtcaaatacagttccttataaatacatggaagatatgtgcccaactcatatgcaggcctagagtagtaagttttgcacaacctgaatcaaattaggtcagtcttctaagaaacattcccatgttacaatgcaaccaaactttaacagggcctctaggcagaggagtggttttcctctcttgggtggagaaccaaaaatgtagcactcttcattgtcaaggtgtatagcaaagcatagatcatgaggggagagcttacacagaatggcatggcatatgccatccagaatccactgtgcagctgcttagggataggagtgtttccattttcaaaaccacataagtttcagaggtcaagcttagcaaagcagcttgaaaagtgtgtacttagtaggcttggggaaaagttggaagcccatgccctcattttgcctcgattatagttctgcaaaaaccctctcttaagagctccaaagtctatgccttattcccttccccatttggactattgttaccctgggcaagttctttaattaacttctctgtgttttagtttcaccatttataacacagagataattatacttcaagataatgtgtggaaaaaaatacctctccattgcacaatgagaagtggacatgcaagttatcatgattgtttattaatagcaataacatcccacatgaacagtggaatcagcactcttccccacagaactcagaacctttgtcctgattaactcattatgactgacattaactctgagattttgctggcggcaatgtggagggagagtattaccttttggctaggtttcttcttgtcctgaggtctttttattcttcatcggcacctcctgtaagtaactgggtttgggctgctcagaaattcctgtctgtgataaataagggaaatttcagacaggatggtaactccatagctattcaggccaaagagttggtagaccattaaaaacaattcacatccttcatgttctgggtttaaatatgcatatttccatggtcttactccctccaaaattggtcagaccagttcaaggttggatgacagatgtgagcaaatcagcgtcagacaagttgagcagactttaacttcctatattgtagtagaaaattcctctcataaaacaacgaggcgcacgtatcaagacccctgctgtgtccaattagacttctttaaaaaggaacaacctctttaactctgtgagtttctgggggctgtttatcttttccttttggcttatcacaactcttaaattaccttggcatatgcttcgttgctagtattttcttgtattttctttttttccgttgccacaggaaacaaacaaaaaaggtttttttgttgtttttttttttttagtaagaggcatttcaagaacgtgttagagggagaaagaatgttgcttaatgaaataaagaagagataatttccaaacgcttttaaaactacatagtaggacaatcattcaagtatgggatgcacccttaagcaagattaggtcttatgggtgacagaggaactaagtttggtgtgtcagccttgatttcttattaccctagttcctgcgcttcatacaaatttaagatccaagcaattatgcctaacgtgctcttgaatacggtaaaatcatgcattttatgtagtcagtaataaaaatactgcagtcgtttttccatccaaagatacagtcccattatgaataatgagtcctagaaaaatatagcaaggtagtccaatgcggcagcataatcatttatgcatctaccaaacctctttcacagttcaagaagtttaatagacgatcaattccttgagggcagaagctttcttatttatctttgtatctttgttacccagtaagcaccattcctggcacatcaaaaatcacagatgatggatggatggatggatggatggatagatgatgaatggagaaaaaatacttccctcttttggtctttgaagtttctgggtattaccagtgaagatacagagtatagggcaaggttctcatacctaacaatcaggccaaaccagcacgtttaataaaatgttttttcattgcccttagaataaaacccagatcgtttattgtggctagtgtgatgtgatttggccacaggctaacattcataacttcagctccttccattctccttttctctccccactctgtgactagacttctttgcattctttggaaacatccaaactctttcctctgacagccttgtacttcctgttccatctgcccagaatctttccccctatctttccatggctggtatggtcattcactatactcaaatatcattccttggatacccctgccccatccaaatttgttcccctcctccctttcagtatcctcaacacccaacagtgccctgcacttagtatgcactccataaatatctgttggatggttgacaaattattgtgcatattttgcaaatatttaatgttactattgtatatttaacttaaaaattactgaggtttttcttcttcccaaactccaattaaaaagcaaacaaccaaaaactcaaaacaaaggtgaaaatgtttcttttgttttattctcgtaacttactagaagctaagaggttgcctcttctactcaccctggaaagaaggaaggaaggaaggaaggaaggaaggaaggaaggaaggaaggaaggaaggaaggaaggaaggaaggagggaaggaaggaaggaagggagggagggagggagggaggcagggaggacggaaaacttagaaaagactgaattaaacaaagcttaagaaaaacagagtcgtaaaacttctcagggcctttaacatgtttatgtgaactgagactttctattagaatagaggctttacttctcaaagttatttgaccagagagcatttttcctcctcctctccctcctcctcttcctctccccctcctcctcttctcctcttcctcctctccttccttcttctttctcagagtacttttgagactaatctttgatggcatacattttgggaaacaataaagtaggaaccaccatctgctgagcattttctgtgccctaggcactgtactaggcattttaagtttgtcacttgctttggttctcgtcctttcattaatgaaggaaatgagcctcacagagtttagctaacttgaccaaatgcatgtaaccatcaaatcaagcacagcagctacgatttgaaccattgctgcttgattccaatggctttgatcttctcactgctatgtactacttcgcaaaatattacttctaattaattaaaacagaggttctcactctcaaatacatacaaagcttataaaatacaaactcctggaccctatgccagatttatttaattcactatgtctgagttgggatccaaaaatttgcatttctagcaggctcccaggtgatgcctgtttctctggcctggggcccacattttgagaaccattgacttaaagccctgcgattcctgtttaatgatctttgcaataatgttattagaagcttaagaagctgaagactttttcaattagtttatactgcctttgttaatgcagagaactagataacagggagctcaacaattcatttcaattccacaaatgtttattgagcatctactgttatagacgttatgcaacatacaggaaatctgagataactaagaccaggtacttggccttaagggtactttagtctagttaatggcagcatgaggtggatgaagctttaagaagaacaaaagcaaacagatggttgtgagtcagcaggtcaggcagtctgatagatgtcgacccagtgccagcatggcacatcgcggccctccccacctgggctagagctgggactggggaaagccttcccacagagatggcacctgattggcatcctaatcatgatcagtagtcagctggggtggaggattttaggaaatgccagcagcaagtgcaaaggcttggagagacgagaaaacatggggcctttggggaaagcttgaatagctaaaggaaagactagcacacagatgtgtccagatttaggttagcagaggggaatgactggattgaggctggaatctggctgtgaaggcccttgtctgccttccgtggattatacacaaaagtcagagcaatgtttaagagaactcatggttgagacatgtggcttccaaccattcttcaggcatgcattcctttcataaataactttgcaaccctactggctgatgagggcggtacaaagaggattgaaacactgaatctgtcctctaggaagagaaataaaacatttacaatctaaaatccaatacaaaggtggaaatgtgcccttattaaaaagcacggagacataggaagaagtcctggaacagcaaagagggaaaggtcactccatttatgataactctggtaaaagagtcaaagatgggaagcaaagcaggtgccattatcaacctcgcaatacctttatggatatttttacagatggttctcttagtcacctcaaagagtgccaggatagaagctgggaagtggaaactccgaaagctgttagagaggaattgcctttagaatcacgcttgctttttcctcgttgctaaaacgtccagaaaatagctagcatgtgcgtttccccagcctgattaaagagtgcatgtgcaagcctctaaataattgctgcatgaatctttataaccacccgaaatgagcttaactcggttggtctacgatggcagaaaggcttataatgtgaggctcatcattctatcacgcatcaaagaatgggaggcagaagccctgttccattctcccctcgcttcctgattaatccacacttttagaatatgagtaagggctgactgatgagctggtttagtttagctttgtaggatttttcctccaatttagcaagcaatgaggacccgcactatttctactctttcatttggctcttaagtctcatttgtgccattagctgaactggtaccttttttttttccctcctgctcagaattcagagacttgtccttctcttgtaattataaagtgctcacaatcaagacagccctggtaaacttttctttttggcacaaaaacaatattagctaaagagctggttgtaacacagatgcttagaaaaagtaggaaaaaatcaggtcttaaaaagatttataaaccccattccagcttgtattcatcatcttcctttcttgctatacaccctggagaataaaggatgctatttacaatgatccctgtcaggagatgttgaatacagacttatctgcctgccaggtcacaattacctttaaaatctaaatgaaatgaaggaagagaaaccgcatttttcccagtaatgggatattccagccatagtctcattggcacccacagtctttgcctcatttgtgagggctgcctcaggtttgtcaaagggtccttattttagaagaaagatatacagatatatagatatatagattgatagctaagtaggtagatataggtaggatggtatggagagaacgaaacagagaactaagtttatgagcctgggaatttcagttgggtaatccgtagtaaattgttttttttttttttttttttgcatctgctgggcaccgggtactaccttaaacattggaagcagcatgaactccagccccttcgtggtgggcaaagtgattggagaggcaagagatttgcacacagaagacatgacttccccctacctcctgctgatctgggtttgtcattgaagagccctttgctatagcattgcttaggactccttagtttactcaaacctaatgaaatgtggttttcctctccataaaccacctttggatgttgccaatagagagaataatttactgctatggttctcaaattttggtcctcacagacaaacaacatcaccagctcctggaaactagttagaaatgcaagtcctcagcactctacctctctcctttccctggacctagggaattggaaattctaggggtggggcccataaagctgtggtttaaccagctttccaatgagtctaatatatgctaacgtctgagaagcactgatctagtagcttggacttgcttagctatccctttaagcttaaattggcagcctaggccagtcactggaatcacctcaggagtttgaaacaatgtaaatgccgggatgccaacccagaaactctgatgtaatagggccaggcagcagcctggacaccacagtgtttaaaagctgcccagatgctcttgagaaagagttcatatggaagcaagtgtaagaggagctgggggagagagactggagatgtacagatatttagttgattactgcaagacctaaaccaggctctcagcattaaggagaaccttgcctaaggctaagtcactgggtataggagttgccagggacttcatcaggaaagaaggtagagagccataggctggatgaatgtggagggaaatgagaaggaggagtcaaagatagctttgagttcttgagcatggctagtgtgatgagcccttcttaggaaaagcaagaatggggattgggagggaaggagatcttcgtttgagcgggggatgggaaataaatttgaatctgaaaaggcgtggattggctcgatggtcatatccaacagacagctgaaactttgggtctggatttcagggaagagaggcaagagggaagaaaagaatggaagggaagagaagatagagaggaatgaagggagggggaagaagagacaatgagaaacactgagagagattttgcatttttaaagcctgtgacaagaattccattactgaaagaagagcatttgctgaaaagagaaaagaggagaaagaggaccgaacctccaataatgcctgcatgtgcaggggaaaaaatagaaagagaagaagaaagcaaaaggggcaagagttaggagaagagtcacgttaatgtcgcattatcaaagctaaagaaagagtaggttgggggatgggtgcaggaaaggtcaattgccagcaataccaaacgccaaagacaggcaaggagggtgagatatttcaggcaagaagaaagcttgcaaagtcatcatgatagcatagtaataataacaataataataataattggtgttcacaatggatttatcgtgtgccacgctcctggccaagtgccttgcgttaattcaacaacaactctccaagtattaggtatccccattttgcagatgaggtaacagagattttaggtaccctgcacaaggttacacagataaaacgtggtggagtgaattcaggaagtccagctcccgagagacacctgacctctctgtggaaaccagagtgactcatttagagggcaacactcagtgtgggtgggaaaaccagtaggtgccggaaatctctgtccatgtggatgaaaacatctccctggttgttccagacagagttctattgcacaggaagcagattccctttctggagtgaatgttgctgggcacatgaccaagtgcccattaggatggagcgaaagaacggcatccgactcttacaaaaagttgacatctgaacaaagagaaataaaagcaagtatgttaaattaatttgaaaggtcttgtttaaatccactcacgcaaagacgttctcaatttaaggcttttattctaccctaacctcagttagttagtgtggcagctcagagcacattctggatgatgccaggaaaaattcatttcacacctgaaatgcttagatctcatgccgtttcttacagtatctttctgtctgtgccctcaacccactaaaaaaaaaaaaaaaaaaaaaagggggggggggttttggaaaggaaaggaatgatatctttctccggaaacattgcactgaggcaaacgttttccctttggtgcattaggaagcccttagatgagagaagctggtgagctatgaaacagcattgggacttctcttgcaattaaaaaaaaaattatcaaagcactttccatacatgaaaccaccgtcagttatgtgggggaggaattattatctgtgtatcatgaaggtggaaattacggtactgagaggttaaatgatattcccagcaggcaagagaagaaacttttccaggcttggcatgaggacctctctgtttgtatatgtgttcccattagggctgctctgatgatccaaataaaagttgggagtgggggtaatgatttataagcccaaggtttttaaaacatcatttctcatgtttggaagtgaaagttggctgtgagaattcatcgaaaatgagcctggatagatgaggctgatgcagattagtttttgaagtggaaggactggaggattggccttgttttcaaacggctaattttcttgttaatcactgcgttggttaataaccacctagttatgaccgtggcagagaaagactgtctgaaataggtcaagccttcagtcagcctggcgtgtcctgtcttgattgaaggctcaggaagcaggaagactggagtgattggggtgggggggtgaggtgggattgaggccttgagaggagacagcagtgaccacctgggggacttttctgtgggagattgacaggactggatgtactcctgaggagtcctgcggggtgggggacaggaatgtaaaaaaggcctgagatgtcttttttggaatatgtgtgccttttaattccttgaattttttttcattaataacatgaattagatatgttttttcctacattctaagaacacgacagaataattggaatatgcatgtgcaatttaagaagacaatgaaaaccacccaaaattgaacacccagagatgatcactgttacccttttgatatataacttccttttctctttctctttctttctctttctcacacgctttttcagtttatcttaataggtcctgactgaattgttagcacctaccacggttcctagcacatggtagatactcaataaatgttgatgtaaggatgaaaaaaatcatatttatgatttgtggtatagaattatataataggtattacctaattctagatcattacatatttttacagttttcaaataccaggctgagctattacctaaggacacttctatcatatggaaacatacagcaccatgaaccagcacgcagtgacactgtggtctagagtttgggttctgaagtcagtctgcctggattggaaaccagactccaacacttaactagcagttcttaatctgtcaagtaggagcaatactcataacatctcataacattattgtgagaaggaataaattagtgcattgaatgggcctagcaccacacctggtacagtcataattgcttggtaaataatagttattgatattatagtatgtttttaaatattatgctagagcaccgtattaatgttcttccatcatgctggcacatcgcaatttttaaaaatctacccccttttgacaggcatttttgttgcttcaattttttgttatgtaaaatactaaatagatcctctttatataagaatttatttgcatatctatacttatttccttataataaaattgtagaggtagaaatataagatcgcaggcaattaatctttttataactttatatgttgccaacaaaatgtgatattagcatagaaagcaacggtgtatgagcgagtctgttttcccatatcctaagtaatcgtcctatcctttgcacattttatgcaggctcattttgaggagcaaatccccttccatttcttgaggccatcttgggttaggctaagtggaattctgccaacatgcaacagatttttaggagcaggttctgggtgtttgtgcatgagagtggagtggggagtggggtggggtgcatgggcatgtaccctctgtcccaagaagctgcagtgagtatgaaagataccagactttcaccctcagtaaatctaaacactcaaagcaaagtgtaaaaagtgctcgacaactgttataaaggatttggaaactgtcttctcaaggtgtggactggggttggaatctggaaggctggctggagaaaagaactctgcttctgtcattggtgcagttggttgccttgtcgttttaattaccttactcttctcaagatcagattcaaggccaatccagcctcctcggcccctagcttctgcctccgcgacacagataacataactcacttcctaactcacttcctggggctgccccagcctaagaggattaatccgtcctatggagttacctcctcaggaggaaaactgataagacggttgtaaaactcctgggagaaatggaatgagttgtataaataaagtgttatggcagccgactcatcgagaatgagacccgatgtcacttaaatgttttgtcactctctgtatcttatgaaggggaacctgttttcatattgcaatacttcagctctgcctggaaagtgatcgtgtgtgacagtttgcttttgtactcccccactttatataaaaggagcaggacatttaggttggctgtatttgttctgaacaggaaaacaaatctggcatttttacatattattctgtactcctgggaaaaacagctttgacagcctaaggaaaaggcagttcaaatggtagtgattcccatgaacgttttgttgcactttaagtaaatctaccataaatgataagtatttgagatgatggatacattaattagcttgactcaatcatttcatattgtatacatatatcatagcatcactttgtaccccatgaatatgtacaattataatttgtcaatattcaataacatttcaaaaacaactagaaaacatatatataaaagatgccttcatgcaagaaaagagtaaatcttatatttggctggatggtgcatccattcagctaataataattgtacacctaccccaagccagcactgttataagcattgtgagctcaagagtacccaagaaagatgtggcctctaagctcacgaagcttctcttctaaagtgaaatttaagattttggagtaataaaaatataatgattaccaatgtgagagcgatgccagaaagagacagggtgctgagctagacaatcacatgaagccgcctactcaggtagaatggaggaaaaaaaggcttttgaggtgacttcttagctgaaactgaaaagtgaaatttcggtcacccatgtgacaaggtttgggtggctggggtgggggtggagggtggaagggctattttcaggtcaaggaaacagcagggaaaaggatctaagacaagaagcaggaaagttcttggttgtgttgaggaactaggagaaaatgtgtgcagctccagtgtaaccaggcagatgagaggagtttgaaaggagacagaatagtaggtggatgtcacaccagcagcatcagcagcatctgggagtttctcagaaatggagaatcccaaccttagaccttctgaattttgattatcaagtggttcctgggaaagcacatcaatgttggctaagtgctgatgcaagccatggcaagaggcttgggtttgggatttcactgcagtggaagttattggtggatttaaaatgggatgtggtgtgctcaaacacgtatttaaatatcactctggctgaatagaggattgcagagtggcaagaattgaaatgggggactagttaggaggctgttatagtaattcatctgagcggtcaatttaatctagaccagatgacagagaatttccaagcattgctatgtgcctgggaaggttgtctgctgtctcatggttattggcaagcagaaaaatatatgcctatttatgccccccaggcaggaaaatagaaaattgtttcccctaaattagatactttgtcttagaactcttggagagtcaataccatcaaggggctggattagctgaagtacactgtgtggttaggagcatgggttagaggatcatcagagctgcatccccacctgccaccccacatcctacctggacaatggtgagcaatcacctagactctatgtcttggtttcttcattggtaaagaagggataaagatagtacaacactgctttccttagtacattgatgtgtgtgttaattaagaaaatgcacttaactagcaaagtaatttaataaggcctctataaatgaagctattaatattagtaatattatttcacaataacaataagtacagagtccctaccacacgctggatactgatcgagcttgcatgcttgtatgagttacaatgcccagccccgccccacacagagattacgtgctaatcagaaaacagcatcagaaagtgattaaatccacctttttatttattttttctcatttccccctgtgtctgtcttgtattcagaaaactcagaacttaaagaaagcccaatgtataaaacattttttaactcccaattcatagacaagttaacttaacccataaggagggtgaccaacgctgccagttctctgaggactgtcttggtgctgacactgaaaatgcctcatctcagaaacccttcagtcttgggcaaaagggacagttggtcactttgactttagggtctgtggttgagtcaaaagagcttctttctctcagtttaatagccacagagtacgtatgaaatcttggacaactctttaagcttcaggttctttatctgtaaaactgacatatatatttcaggatatggttataggatagtcagacagcatttcataaaacacatgatcagaaatgttgagtccaaaaatgatctcacggttgcaactattattactagggcggttgtatgtggaaaaatcagaggtaaaaagaaagaaacccccaaatgcgaacataactgtttcctagaaaccctctgtcgatgtctattccatttcccgacagttcggaatacacaggtagtctaaaaaaatcaactttcaacctcatcgttttgtggctgggaaaagggggaaataggcactatttagaaggtatttgggatagatggagttaccacgaatgaatcttcattgggatgggagtttagacctgttgaatgaataaaaatgagccatccttgaagatgattatgagaagctaagttcataccagctcgtaacagtggcacgctgtcagtagctgggctaaggctgagatttttcaatgagagcatctggcttaaaaactccacaggagggggctaggggtagaggaagaaaatccaagaaatccctatgagacctttttaaatttagcactcaaggcactaatataagaatataccagtgtgtggatgagaaaacgagggagtctttacaaataggagaatttgggatatctgtgtttgagaaattcttttggacaaaagtggagaaaatgacattatctgtaattagaaataataatgtgtaattggttcatttgccatatttctacagttctgatttagttgaacaatgtgatcattatgccaccagctttcaatagaggtgtcacaatgaaaaataattgcaatattccacaatattaactgcaccctaattgcaaaagttttgaaatataattaccatgaaagctaatgcgacagggaacattaagcataattagtgttttttaaaaaaaggaaaaactgttaggagcttgttattgtctagtaaggtagcttcaaattagctggctgtagagcactttcatctagcttttctataattttcattattagcacagactgtaataaatttatttgacatagctcacacctgccaaccctgcaggagataacttataatgtgcgccagccccaagatttcccactgaacctgtcagagcttcctacaaggaggcagccaggagtgaggttattttaaaaaaaataaaataaaataaaaaccctcaattgcacattacacagttcagatttaacacttaagctgtgttttaagtaattttcatagaaagccaatgctctaggaatgcaattaagaacctcttgtgggtggtgctaaacaatcaaatcagtgaacatttcaaagaactcctaaggtgcaagcctgctctccagtgactagcaagccgcaccagggagctgacaattagcccgtgcacctgtttgcccaagtgcagcccctgattttctgagaaaggcaccaaccctgaactcagtggccaccatcaaacccctcaatttcttctttgacaaaactactcaaggtcagcattttgaagcaatcacctgcacctcctacccactctggcctcagcctgtccataatgaggcttaagagtcaggatcttgactccacatagaccatctgatgaaggcaaggagtgtactctgggtgggtacacaactccagggagcgccattcacgttgttttttatgtaaagttgtgcattggggggtgttcaatgtgaatggtgccccctgttgtttcttacttctctttttttaggctctctgctaattggctacgttacatccctttgattaaaaaagagagtcaggaaagctaaaaaaagaggagggagtggggaggagcagatatttttgagacctgacatagaatctaattaaaagagaccctccatcctggatgatgcagcagacgacatctaaaataaaggacgcaggccgggcgcagtggctcacgcctgtaatctccgcactttgggaggctgaggcaggcggatcacctgaggtagggagttcgagaccagcctgaccaacatgaagaaaccccatctctactaaaaatacaaaattagccgggtgtggtggcgcatgcctgtaatcccagctactcgggaggctgaggcaggagaatcacttgaactcaggaggcggaggttgcaatgagccaagatcgcaccgttgcactccagcctgtgcaaaaagagtgaaactccgtctcaaataaataaataaataaataaataaataacataaaaataaaagaagcatagcaacttaaaagagtacaagtttgaaatactatattccatacatttacatgtcaactttaaaaactcacagacccttgtttacaaagcattgtatcgaaaggtgaacattgtcattttaaatgtggtcactaataacactaactgattaaaaggtccaaataatagtagccaggaaaaattaataactttcttgatcaagatggcctttctgccttagtaattttgtttagatcaccctaaatatatatatatatatatatatatatatatatatatatatatatatatgtatgtattatcataaattcttaaagcatatttatagagctaagaatttatggctgggtgtatctcatgcctatagtcccaacactttgggaacctggggcaggaggattgcttgaggccaggagttcaagaactgcctgggaaacatagtgagactccatttctacaataaataaattataaaatatatttaaaaaaatttaggaagttatgtattccatcttgtctctggcagccccaccacagagataaaagttccacgaaccttgcattaataaccatgcagccaatttgttaaaatgatgatgccctaacttaattaaatctgatagagctgatgacattgaacctcttaggggagataaagttctccggttaataaagacaccatgtttatagatagataaccataagagagccagtcacgtgcccatatgcctcagtttcctcatttgtaaaatgaggacattcaatttgattatctctgtctgtctgtaaaatcaaagtgagtttttgactagagcattccttctgattgcagatttaatacttctggccaattattggttctcggaatcactctgtcctagactttctcttgttagaaccacacattctgttagtaacagatgagcctaaaaatgttgtctggagacaattggcaggacctcagcaggctgtaaatcctttcaggaaaaaggatccgatcctccctttcccctaccctcccttcccctcgcttctcctctcccctcctctcctctcctctcccctctcctcccctcccccctcttctcctctcccctcccttcccctctcttctcctctcccctcccctaccctctcttctcctctctcctcctctccccttccctcccctcccttctctttccttcccctcccctctcttctcctctctcctcccctcccctctcctcccttcccctcccctctcttctcctctctcctcccctgccctctcttctcctctctcctcccctcccctctcctcccttcccctcccctctcttttcctctctcctcctctcccctcccctccccttccctcctctcttcccctctttgcttttcttctatttctttttctctctccctctctgtttccctctctctctccttctctcttttcccaacacagtcctcagcatataggttctcaacaaatatgccctgaggaaagagaaaagaaagtccaagcttggcagttctccagccagagtgtattgcttgtgtaaagaggaagctaccacagatcagagttaatctttaggtctgcacaccatgggcatcatagaagctttccttagttcagcatttgaggcccataatctgctgaatagagtgcctttcaatttatggaaaggggtcatatattttagtggttatgcatgacttaaataatatttaattcttattatgattcctcagtgtgacatttctgctgaattttatattttcgttttcttttctctctcttttttttttttttttagtaaaaattgaaccagttttattctttttcaaggaagagaattcacttttctaaaggaagaagaggaaacaaactagaaacttacagcatatattttttatctttggtgacacacagaagtttgctttgttttttactttctcctgtgtccgagtttacagttggacttttgtaagggaagtggaccaaatgtgtggtccttgacttactttcacggtattaactacatttcctttgttctgttgcataatgtaatcacttgtgtttaatctcccttctatagggaatgatggattattaaaagtattgctgcaacctgtgcatgtaccccctaaatctaaaataataataattttattgaaagtattgttgcactgccactgtaaaattactcaatgaaatctacattgtcactactcagatattgcccttcatttataattgtgtggtcattaattcttatttgtcagtacattttaggttaagaggttttttacagccttaagatctaatctttatttaacaatcaatcatcaaatctgcatttgcaaagattagaaatctcatttttaagtaaaaacagacaaagagttaggatttgaacccaaagtttagaggactgtattatcacccaaatgcctagatgttaccatgcaaatcaaaaataaaattttgaacaagtagttttattttgaagagagaaacataaatatagaacagacttatctcatggataaaacagaggatagactattaaagtcatgtgtttagggagaaattatgccttccaaagttaatgcctggctttgaaattgtgagtaaggcttttttttttttttttccagcataaacacatctagacaaaatgtaagactctgtgtcaatattttttttgaagggcagattgggcttataattatataatactgacctatgacttgtctcttaggacttccacaaaatgagattttgatctggtacttttggatgtgtaatttatctatctacaatgcaacacaatgaaaatgttctctcatggttttggaattatcttcattttggcagatacaggcacatgtgctacacacttctcattcttgcacccagggcagacatcactaatcgatcacagccctctttcccactgggaacagatggagcctgtcaatatttctcagcggtcctccaggcagctactactaatcaatcagaattggcatgcaagattaaatgcccttgccattcagggcaataatcacagaaaatgacaatcacacagatgtgagtccctggggtagccaaaattccaaaacctagtataattgcctcttcaaaatgtgattaaatatcctctttccctccatcacaagcaaaaagaataaagtcatgcaaagtaggtttggtttgggaggaaaaaagaaaacaaaaaaacaaacaaaaagaaaccttctagcatctgcatttctttgtggctccaagatccgaactgttcttacacaaaaaagacccatcattgaactccactaacttatacctcagttcttatttatttcctccaaaaaactaacctttatactacagttttactattattaaatcactcttccatggagcagatgtttctgaacgcttttttgcgttctttgtcttgaatactcttactaaatagtgtccttccacagaataaaaaaattcctaatcttgaaggagttatatttatagaggaataatttatcctaagttacattaaaataagtaaatccatggcagcacagttaaattcataagagcaagaacctatcattactctcagattctctttggatctctgctaaattgaggactatacaatttatgaatacatattttttggttaaacaaaccctaggaaaaaagcgtatttatgcatcaaaaacctgttattaagagctcaaaaaacgtaaacttcttattagaagatttgatgtttttttcaactacaacaatctcaagaattaagagtaattttatatttccttttgtagtaaggtacaatcatatcatgttttacttgggatgaatgtaactatctatggttttaattgttactgtagaatggagttgtttcacaaaaatgataatccatgttgtagagtggttagtgaggtgagaaactcaagggccgggcacggtggctcacgcctgtactcccagcactttgggaggccgagacggacggatcatgaggtcaggagatcgagaccaacctggctaacacggtgaaaccccgtctctactaaaaatacaaaaaaaatagctgggcgtggtggcgggcgcctgtagtcccagctactcgggaggctgaggcaggagaatggcgtgaacctgggaggcggagcttgccgtgagccgagatcgcgccactgcactccagcctgggcgacagagcgagactccgtctcaaaaaacaaaacaaaacaaaacaaaaacaaaagaaactcagatgacatcagcaaatatctcttgggcacctaccctaggttacacattggaactacaactggagtgctttgggttagttccaggagcactggggcaggagtactcaccatggcgtgtagaaataagtaaattccaacagtcattcacgcagcgaatatttattggtgttagctgtgtgccaggcagtgtccttgtcctccaagggcactaccagactacagaaatacgtacaactggggatggtggcttactaccatgaataattgattttaagtttctcttttacaataagcttccttttttaattaacaaatatatatatatttatgatatacagcatgatattctgttatatgtatgtaatggatatgtccataatgttatggaatagctaaatcaaatcaattaacatatctcttaccttgcacactttttttgtagtcagaacacttaaaatctactcatagcaattttcaagtatataatactttgttattaactataatcaccatgttgtacaatagatatcttgaacttattcctcattccaattgaaattttgtatcttttgaccaacatctacccaatctccaccttccagcccctagtaaccaccaccctactctctgcttctgtgaggtcaaccttttcagataccacgtgtaattgagaggggtggtattcgtctttctgtgcctgtcttatttcacttatcataatgtcctccaggttcaggcttactgtcactatgacaggattttttcttttaaggataaatagtattctgttgtgtatatatgccacattttctttacccattcatctattgatgcagacttagctttctcttgaatagagttctttgggagcagaggccaggctttcccagttcattgttgttctccagcaggtagtacagtggtagcacatagtagtcactcagtcgacacatgttaactgaatcaattatacaacgggagtgggaggaaggagtgggtgagtggaaagtccttttgcacgttgcttttgcagacaatgagctcctgaagggaagggcacaagtctgttattcctgtgccctgagatcctggcatctcatgggcatgccaaaaatgtctgtggaatgactttggaggtaaccaaggaacagttagaggtcagttacgtgttaggatgtgaagcaaagggaatggtcaaagcataagaaacttttagaacactgattttgaatatagaaattcaaaatacctttccttctcccaagagtaactagagagtgggggtaatttacttaatgtacacattttgtccatcaatattccttgtgccagccactggtacaccctgggcaaaggcaaggaaaggagaaggtattcccagatggaacaggaccagccaagcagcaagaaaggttcaggcaggcatgatgtgatggatgacagggctatctcttaaaaggcctgggggcattcattccatagcatccctgcattccagagaaaaaaaactatgcagcaacctcagcgagatagagcagcattgccataatgttgagaaccatgggggcgctcacccaagctccctggccagctggttggtggaccattttaactctgcatccacctgcctcttctcctagtacaacctggagtttctgactacattctaatgggctgacttcatcctctttgcatgggatttcagtgtgttgactttgtgccaaagatcagtgggttttataaactttgataaagcggtaaagaagcaagtttcacatactgccaccaatcatattttcatattgggcaagaagaataagtttaagtggtgttacaaagcatatttatttatgcagacgctctttttatccttttctcgacaggatattggcactacatttgaaacagggagaaaaaaagcaacatgttcccatttctcaatctctttactgccaatttctgaattgagactagcttcaagattttgaatatcttcagcattgatctactgctagtttctggtggagaaattgaaacaatagaaatctgaaaccgagatagacagcaacttgcagtgtacatttcctctcctgatgcttttatagacagaaaggacagaggggttatatctcgttctccagcttgtctggccatcccatccccaggaagtctatttactccagaaactactgtgatgcccacctaactgccatttctgtcgattcctgtccaagctgcacaactgaccagctttgtaacttaggtgaagttatttaatttctattgcctctgtcttcttatcagtaaaatggacatatgcacagagtttagtacttaaggttgttgcgaggattagaagagaccatgtatattaagtgctgctaagaatggtgcctgcgtctggtgagcaatcaataaatgttagcagctgttgttattatgactactctttttattgtatgtgtatagaagggaaaatcacctgtgtgccttaaatgggaaggggaggatagtagagtcttcccctgtcttcctatattgactgagcctgggggacctctacctctctgagttgacttgtacaagttcagcattacttccctgcaatagttttctatggctgctatggcaaattaccacagtgatgtggctttaaaaacacacatttattatctgagagttttggaaatgagaagtacaaaatggtttgatttgtgctaaaatcaaggagtcagcaaggctgaatttccttgcctttttcagcttccaaaggacgcctgcattccttggctcatgtcccctcctctgttttcaaagccaacatcattagactgagtctttctcatgctcctgtctctctggttctctctcttctgcatccctctttcccttataagaacgcttatgattacattgggtccacccagataatctaggataatctctccatctcaacgtcagctgattggtcgacttaacctcatctgcaaccttcattccccctggccatctctattcatttctcaggtctgcaattgcaaattaccactgaatgggtggcttcaaacaacagacatttgttgtctcacaggtctagaggctagaagtccaaagtcaaggtgtcagcagggccatgctccctgagcctctcagggaggatctttccttgtctctccctagcttctggtgttgccagagatttttggtgttccctggcctacagctgcaacacctcactctctctctgcctgtgtggtcacacggtgctctccctgtgtctctctgcatctttacgtggctgtcttctcataaggacaccagtcattttggattacgagtccacttgctcaggtatgactttatcttcactagttacatctgcaataaccttatttccaaaaaaggtcacgttgtgtggtcctaggggttaggacatcaacatatctttgtggtggggagacacaatttaactcataatatcatgcgagttaacatattcacaggttctggagatgaggttgtggacatctttagggggccattatcccacctaccatacctcccttcactcccgattgggatgagaagatgatagtgtagagtggatggagatagtttttccccaaccttgagatgctaacatctcaatgtccattactgcaaaaaaaggtagaccccaaatgacacatgcagcacagctagacgtggtattgtcagaaagggttgtagtccacaggagtagggaagggagatggaaagacaggaaaacaggaagaaattaaatccctacaacatatggtcaaatctcatcccaactgagctttcatgtaaggtgtctgaatccgttcttggaagtgtcttttcccctcctgttcgctaaaatttgctccatattgaattgcttttctcccctacacccccaccaaccaccagctcccttcagctggcattggcctctgttcctctgctgatatttgaagcatgtgggtgggtctcactttcccagcaaaatcttttgttcccctgtatcgattcaccaattatcacctcatccccattctccaatccctccccttacaacaaaaacaacaacaaaaattaaaggcataaaccaaaagaacagaacaccttcagccttcatagcatccctgagagagaaaacctatgtattaacaagaaagatgatctgtatttctttttccctaggaaaacatactcagcattttatttcatgaaaagattgtatttccttgattgggagggtaattactcttccaaaatagacttgctgttaagtaatcttgtccatgcaagtgacatggtatatgagtgagaaatgtgggcaataggtatatttgattatccacactgctatcttatctgactgaccttagagaagttatttggtctccttgggcctcagtttccttatctgtaaaatgaggattttaaaaagggcctaatttataggtttgtgatgaggattaaagaagctaataacagatatcgtgcacgtgccaggtgccgggtactgtgctcaacacttttcatggattatcgcatgagtttgtgttatgtccattagcgcagggtctgaggcttcgccagcagtcaaagaaccgtcactatttttgtgagtacgtggcttgctttatccagtctgccgctggaagcaaaatattctttctatcctggatgtccagtcttggaaccagctccgaatccattgaaaggcccctggtgtctctggggggttggtaccttcagacgttattgtactacatttttgttcaatgagtcagagccaaaggacttggttggtgaaaaatttaaatcagatcggtgagaagcagcaatcttcatctcccccactgctcggtggtgcacctttgccaccaggtcagggaaatcatcaatcccggggagcaactacaaagctgtttccagagccaatttcctgctgaactgtgtgttatactcttagcaacattccaaaaattatactcacttcaaagccagctttgatctggcccccctccctcccttctcccccagcctttgccgagaagcgcatctccaggagtagagttcaccttgaaaggctgagacgcctgtgagcagagctcggatcttcctgagaggaagggagggaggccccagaaccaaaaaaaataaaaaataaagaaaagaaaatccgtgggaggcctcacttattctctgtggcccactgcccttgccttggcagctcagttccttcttggggtaagcaaaaccatcagcccaggctctgccctccacagaacagcagcagccgcagctgatctcagcattgttgccctcacgtggttttggtgttgttgcttaagcagggagctgctttgggtttctcactcagagctgcaatgggaggtatgtaaccatcacccagggctagggcaggaaggaaaagcttgccctgaaggggaggtactgtaccggtgcctttcagggaaaggcctttgtttgatactgtcaggcatcagatgcacctgataattttttggaaggaggaattcttgcagcagctcatctttccttcattttacccactccctttccctcactcctagattacaatgtggaaactgaggtacactaagagacttgctcaccaaacaagatgcctgtggattccagagtgattcgcaaatcccagttctagcccaagagaaaattccctcagaagccgagcaaaaagaaaggggcaattagctgcaaatgcctcatgcatggatgtggtgctggagtctcggggggttgtagggattgggcgctctaaacccagtagatgtgccgcactggcttcatttgtgagttgggaatcctggggcttccctaggcagggagtttttaaaataatagttaccaagtttaaggaatttatttccacctatttgggagtaggagcaagggtacgtaatgacagcctggaggaggagcaaagcactgccacctgcttgcttgtgaccttgaaaaccccacctcacctgtctaagtcttagggtccttgcccaggaaatggggattttgtggtgaggatgagtgataaaaatccatgtaaagcacttctccctgtaactgacacagttcttgccctacaagttcatagttgagttggagtgaatcaagaagccttcactgaaaggggtctcacacttgtctatctccctagtatgttgccttgcatttgatggagattcaaagtgcgttgactagtttgagtgaccttcaaggtaatagttcaacatgttgacaaaagtctccataagggaaccttgtgacaaagtattgtgtaaaataaagaatctgtgtaaccgctccaatattattctattattattattattggttagtgttattattataggttattattattactatttttggctataaaagacaacaataacaacaatcactgcttactgacatatgacatttagtacagtgcttagcacaaagttagtgctccgtgaaggttaaacaacagtgagaaaaaaacactgcctgcttttcaaaacattgatttctacatgcagttttagccttgcatctgtgagatcatgacgggtttatttatatttctctttttatgaaagcttagcggttgtgttgagtgaatacaaacagttaccataggtccttaaaaaggagctctgagatgtgtattgagcgagcgctgaacattttcaggatgtgactggttccctggggcccactgcatcaggctgaccattctgagaattaatagccaccctgacacttgaagcccatcaggaatgagatgcttgcctcgtctgggaggacggtgggacacgtcaccacctgcacgtctccctataagctcttacctgccgaattagcaagctgcagctattatgttagacagagccacagctgagcccgcagtttgatttttgtcaccataaaggcaggactggaattgacactggagtaattaggaatgaattctcagatcttgacttatcaagcacactgccagggagggagacaggagccgtgtggcagtgttttggaagctgagatggtgaccttgcaggctgacctcactcttaatctttctattagagagaccagtaagcatttggccagcacctcctgttaggctgacaaccagagcagttcgtttgggattggatatttttctccttttttttttttttttgtagcctgtaggcacttagaagaaaaaggagcaggagaatgaagccaatatgggaagcaaagttaccacggggacaaaatgttcttccgagcagcttgaaatgagcataattttggagaatttctgcaatagcgagttaattcataattgggtttgctgagcaatcaacaatgtgttgcttgtattttcatatgctgggagcatatgactccgtgtgtgcactgtgtgtgtattataatgctccagtactttgatgcttcactaatgtgcaatctctatttcttgcttttgtctgggggcctctcatattacgtttagattgtatcctttatcatcccaaattgacatttatgcttttacttctattgtttccctagcttctccctggtatggatcaacaatttgttttaatctgtgtcacttctcttatctccctcgacacagaggagcagtcattttgcaccgccatccgcctacagaggttgtgctgtcgagagtgtggtggggtccctcaccctctccccactgtctaaagtgctggcgaatgttaattgcttttccagttagtttataagaatgcagaaaccgctgaatgcagcttgactggttttgatgaaagtaatggaatgctagtgcctatgaataaataaatctgatttacatagaggactattgtggtattgggtaggaagcctctgaatgcaagcaaattatagtttaaggacacattattccttggcttttattctaagtaaaggagaagagctcaggtttccttgggttcccagaacgggaggcgaagaggtaaccccttgacctaagaggaaaaatgctttctgagagcagcgttgatctgaaacttaagggggatgcattttgtttggagagaagctgtagatctaggtctcacttcctgaaatccccttacagaaagcatatagaatagcaagtggtgaagaatttatgagaagcaaactgaaaatgtatgagtgcctatcagagtgctttggtgaaataactggagaacactcttagaggaagacgggatcacaactattatgactatcacgacatccagttttatttgtgtttcctaaattcccacaagagtgtgtggccactagaaatggaataaatcaagacattcttttttttggacgagaaaaggcaagtgtggtagaagtaagaggactcacatcagggcatctgcatttcggagtgcctgaggattgttctgggatgagtccatctggcaggaaaggagatgggaatagagaggctatgggaggcacaattcaagtagatgctcagactaaaaatgcaaaactgctacgtttcagaagtgaccctattggtggcttctgataaatgaatgaggattaaacgccaaaattaaatcacttaaaaaatatttgtatgggccaggcgcggtggctcacacctgtaatcccaacacattgggaggccgaggagggtggatcatctgaggtcaggagttctcgaccagcctggccaacatgatgaaaccctgtctctacttaaaaaaaaaagaaaaaaaaagaaaaaaaaaatcaaaagttagctgggcatagtggcgggcacatgtaatcccagctactcaggagactgaggcaggagaattgcttgaacccgggaggtggaggttgcagtgagccaagctcgtgccactgtactgcagcctgggcaacaagagcgaaactccatcacacacacacacacacacacacacacacacacacacacacaaatagcatgggcaaggtactattgtagatgctgagggcacagcagcaaataaagccaagtcccagactgtgtaggacacttacattctcacacccagctcgcagcaaattataaactctaaggagataaataattgggggagatcttgaaacttgactacaggcttaactgggtaagactgccagaaaacaggaacagttttctgtgtatttagtgccattcataacatgacagcatccacagtgactaagcaaacagcccagaggagcaagggtgtgagttaggagttgagtaagaatcagcgacaataaaaatgaacacctgacatatttttcccattctagggtcctctgtctataaatatgtttgaaactaggttattatcctctctcacccatgcttatctcccaaattcttcttaatcatttctcgggtcctgatgatatattgataggctatggattaaatatgaaattactgcaaatctcaagcacccaaagatttatggactgaggcttaggccttatatcaaatcaaccatctaagaaaatatatgatttcaccataatattaaaaattactggcagcgtcttcatcttatccgattggtgttgtcctgatgataagctccagtaagcagagagagaagttgtgtgataaattatggaacagacattgaaaaatatatttattacatttggatgtgcaaggatttcactcgctgtgtacagaaaaaaagagagtttgtgttgtaacgcctactttggttccaaatattctacagtctctaaagactagctgatcttccgttggcctcattcgcaggagttgagttcctagatgggaaaactgtgtagtgattacaaatgaaagtatttgttctaaaagtaagagtttcctggtcaatgtgaagaatatccacagagaggagaatctaggtccatgtttctcaaagtgtggtctatggaccagcacattgtcagtccccgcgagcttttgagaaatgtatactccctgaattaaagtcagcctcttaacaagacccccaggtggtacataactgtttgagaaatgagaaaaacaaactatgatagacgggaagccagacaggaagagagaagttcttaatgtatctcagggagggtgctcgatgggaggcatgacagaaattatattaataataaaaataaaacaatgaaaatcatggttaatgtttattaagcacttatgaacagacattgtacaaagattacttgacctcatgaaatcttcatgaagacagccctgtgggaatactagtattaccccaactttacaaatacaaagatgaaggctgagaggattatagaactttctctggctaccaaagcttgcaagtagcagagccaggatgcacaatcacacttatctgatttcttacacatttcagtgaagtctcatgagtcagaaactctagtggacagggccagccatattggagggaaatgttgaaatatcaagaaaaaagagtcatgaagtaggaactgtctttgtacataaggagaaaaggaaaactggcaaaatggtcttttaggttctactagcatatgcctccctttgaaatccccagctagaaacctgcagtcatccttggttcttccttttcctcatgacccatatccatgagacttctgatttccatcatgtcccctccttagtgtacactgactgtgtccctggctcttgaagtgcacctgctgtcgtagttcagacttcatcatcagtagctgggtcttgagcaacatcctccaaattggcccctgcagctccatagtctcccttttccagcccctctatcatgaatcaccatatctccctagaacccaattcaaccatgttccttttctttctgactctgtgctagatgctgataaaacacacatcctgccctcaaggaagcaacaagcccagggaaagtcctcacactctgccttgtctaccactccactcccatctcaccttcctctctctgtgcttgcacacatcactcttgtatttgtcttcatacatatcccttacaggtgagcagaaatcaggcgcagtccttggttctcagccacttcctgcttctcctcagtcactctctttccactgcccaggatgttccctcctccttaattatcctgtgaacaccaacccatccttcaagggccagctcagctgtgcctgcctctttgaagccttgtccttagccttacctcggtgtaagcagtcactccctcctctttcagatccatcagcatttgtcttccttgtttattgctcctcctagaccaggatgtagatagattcccatcatgtccctggaacaaagaaagggcaaggagacagtagaatggcttacaggccgaaaacctgaactttcaaacctgtttttgggtttaagacagtttagatgcttccccccagtgcctctgtctcttatactctaatcgaggccatgagggccaggtgcagtggctcatgtctgtaatcccagcactttgggaggccaaggcaggtagatcacctgagttcaggagtttgagatcagcctggccaacatggcaaaaccccatctctactaaaaatacaaaaaattaactgggagtggtggtgtgtagtcccagctactcaggatgctgaggcaagaggatcgcttgaacccgagaggtggaggttgcagtgagctgagatcgcaccactgcattgcagcctgggcaagagtaagactctgtctccaaaaaagaaaaaaaaaaaagccatgggaagaggttatagaatgttttcaggctttaatttatgatccaagcacaccacctggtctacctgccacctctgtgccaacagccttgtttgcatctgaatagaaataggattaattgatgcataaataatttaaattacctgtataatctcagaacctccgccgctgaggtagaaagacggcttgggtgacttcaaatcagaattatgtccccaggggataggttgtcagattcagtccacacttgaggtcctagtcatgtctggtctgcatggtaaatgaatgccacatgtattagctcattgatttctcctagcagccctgtaaaataaatgttttaacttccattttacaaataagcaaatcagggccctggatctattgaatactctgcccacatagctccctcctgcacttgaaagtgggagagttgggcattaactctcgggaaggaagcctagtatctcccactgtcttatgttgtcccacccagaacgaactctctttcccggccatcacctttccgtcaaatgttctcagggtgcatgtgcgttgaaataaagagataaggtgtgactgtcaagcagaaacatgccagaataaggcatacattaaagtctatcttaatgcttcgcaattgtgcccgtggtgtgagcatgcttttgtgtttatatgtgtgaccagttgtcagtgctgacaaagagtgtccaagtcccgggtctccttatttctgttttcttattgcttaaatagaccatatggaggacaggatgcttcattttagctcagggatctggttgcatcgtctccccacatccaaacatcagtcccatatttgtcttcatgcatattccttacaggtgagcagaatcaggtgcagtttttggctctcaggcccagttagctgaatacagatgacacgcaaagtgctcttgctgactcctctgtcagtgtcgtggggaccagctctgatccatttctgtccatgagcgcttgccaggaaccattcaggcgagtcaataggatgcccattgatgggccaaacgttgtttttctcgacaggagcatgcagagtaggcaagaatgtccaactggctgcgtctgacctgtcagccaatttttatctctccaggcaatagctttaaaatggtaaaatatctggagttcatgacataggttagcacttctttcaactcaaggtggcagcagcatgaagaacgcattcatcaaaaccaaagggactccactgaaatggatacatcagaaacatctgaaacttatttcccagcaccctttgtcaaagtaaagtgggaggaccacctgcattagaagcgcctggagagcttgagattgcacgtcttgtctaaaggttccacctagaggcaaaacctggggctttaatgaggtctgacttcatgtctaatccatattacaaaatgtgtctcaagatcctctttctaccatgccttcaggtagaaagggaaaaaacacttaggtatcatttcataagccccagaatgcctaagattacaaagactgagaacaccaaatactggcagggatgtagagtacctcacatactctacatgtggtaggtgtataaactggtacaaccattttggaaaactgtttgacattctcttatacagttaaacatatacccaacaatcccactcatcagtattgaccccccaaataaaaatatatgttcaactgtagatttatgcgtgaatgttcatggcaggtttgcttctcagtaaccccaagctggaaataaatcaaacgtctatccacatgtgaatgaatgaacagacttgaatagcatcatacaatagaatactattcagcaatacaaaggaataatctactgacaactcaacagcatggatcaacctcaaaaatgttatgctgaatgaaagaagtcagacataaaatagtacttgcttatcattccatttatataagttcaaaacatgtaaaactaacttatgatgatagaaatcatgggtgtgacctccagagggttgaggattacctggaaaggggcacgagggaactttctggagtggtggaaatattctctatcctgagaaagccgatagttacatgggtatatgtatttgtcaaaacgtttcaaattatatgcttaagacactgctggtgggagtgtaaattagttcaaccatcatggaaagcaatatggggattcctcaaagagttaaaagcagaattaccattcaagccagcaatcccattactgggtatataaccagaggactataaatcattttatcataaagaggcacgcacataaatgttcatcgcagcactattcacaataccaaagacatggaatcaacctaaatgcccattaatgacagattggatttttaaaatgtggtacatatacaccatggaatactatgccgccatgagaagtacaagatcacgtcttttgcagggacatgcatggagctgaaggccattatccttggcaaactaatgcaggaacagaaagccaaatatcacatgttctcacttataagctggagctaaatgataagaacttatgaacacaacgaaggaaacaacagacgctggggtccacttgagggaatagggtgggaggagggagaggagcagagaagatcactattgggaactgggcttaacgcctgggtgatgaaataatatgtacaacaaactcccaagacacgtgtttacctatgtaaaaaaccttcacgtgtaccctcaaacctaaaatgaaagttaaaagaaaaataaaataaaaataaagttcagggttgagtatgatgaacctgaatacaatttttagaaataaaaataggaaagaaagacccacgtaaagatgaaaatgaaaatcacctgtattcttcccacacagaaatactcctctttataaattttgttgaattcctctctgttgttttgcatatatatatataattaaatactcctcaacttgtcattgtaaaagaaatgatttctatatgtaaacttccccttagtttttaaaaagcagagtgggagagaaatgggcatggctacaaaagagcaacaagaaagaccttcttagccaggcaaggtggctcatgcctgtaattccagcactttgggaggccaaggcggacagatcacctgaggccaggagttcgagaccagcctggccaacatggggaaaccctgtctctactaaaaatccaaaatagtagctgggcttggtggcacacacccgtaatgctagctacttgggacgctgaggcaggagaatcgcttgaacccaggaggcagaggttgcagtgagctgagatcactgccactgcacttcagcctgggtgacagagtgagattccaccacacacacacacacacacacacacacacacacacacacacacacaagaccttagtgtcttagcgatgggagttttctgtatgttgactgtgtcgacgtcaattccttagttgtgatactatgatatcattttataagatgctagctttgggggaaactggacaaagagtacttggcatctctctgtcttatttcttacaactgcatgtgacactacaattatctcaaattaaaaactttaattaaaacacaacaaaatttggtattaacagcttggagtttgatatttttaatttttaattttttggccagcttcaggttttaatttggacttcttgtaggtagcccattgtattcgtgtgtatgcctgcatttgtgtgtgtgtgtgcacatacaagtcttatgggagagagagaaaaacagaggtgttttaaaatttactttgatttttgttttgatttcccccacagataggggctcataatttaaaagtcaccctttccatcaggctgggttcatcggtctaaagtcaaaaatctctatgccactttctacttcttcccaatgttttataattccaaagtgtccttgctatacaaggagccttcttcttgaatgttacattattctactgacattgtagagtgaatagtgcctgtgagcatcttggccactgagttgggggagatgtcagccacatgtgattctgcacatcttccaggtaatgcagcggtgctaatgtagtctcctggatgcagggacaccaacggggcttatgtcactcccttggtggccttaagtgcataaatcaatccttatttttatgccaatccatacagaaggcttccttgtgtgtgctgcacatagggagggagggcaggatgcctccttgagcaagtggtttgcattcgaagaaagcaagcagtattggaaactggtttctgggtatttttgtttctttatttaaatcccctaggaaggctgctctggcttggacagaaccagagtgaggggactcattagctggagtgaggttggtgtcaggaaaaaaacagagctcctgccttggcttgcctgaggtcgcaggacgccacccttgagtctccatttctggcccgggtcctgagtgcctgcccaccctaactctaaagcagacctagcctggtggagcctgctatagagaggctgatgttctgaaatacatatgccaacgatgataaaggcatactgtaggaagactaaatgcttttttgaaattattttggtagggaatcaccagcattatcccagttaacccaacagtgtccaggaggtgggttgatacagtttatttcattcagcaaaaaggaaaatcagttaatcacaactcttcctcctactcttcctcctctccctccttcttctctggggtatgggggcataataacaatggtaagacaaatgtaagaattatctttgtcatttcttgtctctcctattggcatttccttaccctctctaggagcccccgaaatgtctatggttcccatttcattctcactccaacatcaaaacctatcaattatattctcaaggccctcaaaaccccaagtcttaataggacattggatgacaatgagtttaatttgataacatgaagctttagcaaatttgaagacattcatttcctctaggcccataaaggatattactaacgtatcccaggcaccatgatagagctgtgggagagagagagattgttaggcagatagctagagctttggtcttctcaaaattgcatccaatgggaaaacagcacatttaattatttagttattactgaaggagggcgatatgcttatatcatcccctggcacagaagagacaccaaaatatgtgttaaaagaatgtgtgggccaggtgtggtggctcacacctgtaatcccagcattttgggaggccgaggcaggtggatcacttgaggtcaggagttcgagaccagcctggcaaacgtggtgaaaccccatctctactaaaaatacaaaaaaattagctagatgtggtggtgcgtgcctgtagtcccatctactcaagaggctgaggcacaagaatcacttgaacccaggaggcagaggttgcagtgagcggagtttgctgcagtgcactccagcctgggtgacagagggagaccctggctcaaaaaaaaaaaaaaaaaaaagaagaagaaagaaggaaaaagaaagaaaaagaaaagaaataaaagaaataaagggaggaaggaagggagggagggaaggagagagaaagagagaaaaagaaagagaaaggaaagaaagaaagaaaagaaaaaagaaagaaagagagaaagaaagaaagaaagaaagaaagaaagaaagaaagaaagaaagaaagaaagaaagaaagaaagaaagaaaagaaagaagggagggagggagggaaggaaggaaagaaggagggaaggaaggaaaaaggaaggaaggaaggaaaagggaaaggaagggagggatggagggaggaaggcaggcaggcaggaagaaaggaaggaaggaagggagggagggtgaagatcaggatgattcctagactgtttaaagagcatttgagaaatgcctcttagaggatgttacagcctatcttgcttgccaatgaaattgccctagtctagaaaattctgagtctatgcaaaagcatatgagtttctattatgttaccatcagaagaagatagttccagaataccctgcacattcccttttctttccatttatcaagttctgttgaagtcatctgtctctcttactaaaggaccaactcctcaaggataaggactatattttagatattaccatgttattagcatcacaatcaggctcaggcatacaatagatgcttcataagtggctgttgaatttatggaatattatttctgggtcattttccagaaagattgcccatagaatggcttgtcaaagaagtggactctggacctgaaggactctaagagatgttcctcagtgatcttatttcagattccctcgaattgctacatgggagagtggattctaatcaaggtcagccatgagccacaagcaaaaatagagactgacaaaattggtaggggaagagttaggaaatttttccttatggctcagggctatgttttcatgcaagataagagttgttgtgcctcagataggagcacaagtgagcagttcagctctgcctctctgccttctgtcctcttcatgcaccaattctcaagacaacactgttatcttgccagaaaatacagcccaaagcattacagatgtctggtacaagcggaacccatattaatggttattgcttaaagaagaggcatgctcagatctctttactgcactccagggaaatcgcagtttttactttcttccagagcagaccagagatgtaaaaagatcaattgagtttggcctatctcagatagagggggctttcttagaggtaatttgaatggtagtcgtgacatggcctgagacacatcctcacaaatacagatttcttaacacttattattttttttaatcaaggtgcttagggatgcttagacataaatgtttcagttttctataggaacaaataagttagtgataatatatgaagaatcaatgaagaatcgtttttaaaaaggcatttttagtgtctgttaacaattgacttatggtttaatttaaattagctgagcttttcttagaattttatttatttatttatttatttatttatttatttattagagacagggtctcaccctgttgcacaggctggagtgcaatggcttgaccatagctcactgtagccttgacctccaggaattaaatgatcctcccacctcagcctcctgaatagctaggactacaggtgcatgccactatgccagctattattttattttatttttatttttgtagagacaaagtctcactacattgcccaggctggtagaattttttttaattcttagccagtttctgacagagtgaatcatttctaaagaagagaattttttttttttaaaaaagcatgatttcttttcaaggtgccattaatggaattaaactgaaaatgcattaaatgacatttaaactagccccaaaagagttattatttttgctctgatagaaaatgcccaatttcaaacacttattaagcaatgtgtgcacaccgtatagttgcataaggtttacaactttgtcagtgccacctttagccaagaggagttatttgcctttaattcttacaaaaaagcagaagatcgcaaactagtgcagcaccattctgaccatgccttatgctataagctctggaaataagataacaccctttgccccttgaaaagcattgccatttgtaatcatcccaagtttccaactatagagattgtcaacagcaagaggaacttttaaattggttgcctttgatgaaaatgaaaatgttatccatgaaaaatctctaggaaaataaattcaggcctgattcctgctatgcaaacagatatatacagtatcaccctgaatcagcttttctcatcagaaatggagctactgtactttattgtgatgtcagagattgaactggggtgagaatgcacttctgataattaagatcatatcgggttgggaaagcctaattcctaacagaagataaagagtctcctgatggtatagactcaaaaggcctgtaaattgggccatataatagtcgtagaatattgggatatgtttgaaattccttattgctgaaatgtgcagataataccagaagggagagcaccccaaccccataaacccattggaaaaaaaaaaaaaaaaaaaacaagaaacatctcttggagcaggcaggtggtgtatcatatgttccccgggtggagaatgagcttcttgcctttaaaagtaattgattttatagcgaaacgtgtcaagagcactggttttcaaaatgatttcgttcatgtgtgttgggaaataatatatactgctaattgcttcagaaatagctggattatttaactttggttttgatgggatttggaaggaagatcttgagcccttatgccttttcccttatcgcagattaatagctgttttgaagctgtgtctacttctgccgttgcagagatgaaatctgcatcccctcactttcttgtgtagggcactagctacagtgttcttagttcaacctctatgagtgttctaaagatagcagtgtgacatttctgtttcaataaagcccaaatagtaggcgagatataaaacaccagagaagaaaaaagatatgtttgctgatttcaccgaggtccgtattgagctgcctaggtgaacagttgtaagtcgggagtctgactgcaggtgcaggagggggagagagtgttaacttctgtgaggcatcatctgttggctgcttagcagcacacatcttgctgcaattccatcgtgaaggtctcagtcccctacagactaatggtgagtggatgtaacatgggacctgcgaaaggaaaggtggttgtttcttgttctgtggcttttctcctcagttgtgtcttcaatgagctaaagtgaatgtgctgatttacagtctgtatttgctcatggtagctgtctcattattaattattcagggtcttcttccatcttacacacatgtgtatgtgtgttcatatgtatatgtatgtttgaatgaatgaatgatgaaataaacaggcataattagtagggtcgaatcgttgtccatggtcaacactaattgaccctaccagttatgcctgtttgtttcatctttcattcattcaaacatacatataatatacaataaacatacatacatatgtgtgtaagactgaaggagaccctgttgaattaataatgagacagtgcctgtacctcttcctccaggaagccttccctcatccgctaagccaagaatcagcaatttttttttcctatgaagatccagatagaaaatatttcaggcttcattttgtgagctgcacgcagtctctatcacatattcttctttttcacaatccttcaaaaatgtataaaacattcttagctcggcggctgaatgtggtccgtggccatcgtttgcccgtttgccaaccccaaaaccaaaccaagtgtctcctgtcttccccaccaaccatagcagcctacatgttgtattgaaaagagctaaactctagactcctggaaagggggttcacatctttgcagccccagcctaagcagtggcaagaattcatttttcaaatataaggtgatctccaccttccaattttatattccacctgggaaaacaaggtcatgtgcaaaaaccagcgaagtgacaattcagagcacggtcagtgttcttgacaggcccttgacaactttgactttctgggcgataaccccaagtaaagaaattagtttcaaaaactgccctgtaagctctcaaaatggcttttagaaggcatttgctctatactttgttaggccttcagctaggtgtttgtttgttctttgttaacacatgacttttaaaaattaaatgtttttttaaacaaaaacttcagagatgaacagcaaaaatggtaaggagtgtgtgatgttgtgagcagcaggcctagaaacagcccaaagattgacagcgtgacctcaaggatggagacaaaataaatcaaaaggaaatacacagctatatgactgcatagtacaatatgttttctcttaataggttttcagtcatcaattaaatgttgaattatgctcattatgctctctttaaaaatgcagccaaatttagcttccaatttggaattattatatccacacagcatggttaaaataaaaatatcgagcgtttgcagacagtgagttgggtttgtctgggaagttcacgcatttcgactaattcatttatgaataaattgtgaaaaaaaaaaaggcacattcatgacccaggaccaactagagtgaggagccagggatgggatggcctgggctgacaatgacttcctacctgaggcaaggtacttaagctctctaaacctcagcctcctgatgtgtataatgggtatctccttccaccccggtatggtcactgtgatgattaaataccattacctatgtaaagttcttaaaacaaaagctggcaggtggtaaaagtgctaacaaaaaattagcaattgttattattatcattatcatcaatattgttaatgaataagtgtgaaaatgaatttgacacacacagtgtgccaaaggagatgacagaaaagtgtaaatatgaatatggcgaagacatctaggattgcaccttataggaggtggtacttgatctggaattatcaaaccaattttagaaatcaagttaaactgggactgattcccccagaacacatattatcatggacagctttctttggttaggttgagaaagactgttttgtagaagagtaaaacctgcccacataatattacatcagatcctattataaactttcaaatgttttgaatttccagcaccatatcacattaattgttttatccctaaactatcagagaaagcagcatcgtaacagggtggaacaaatgcatttaactcagaaaataagacatccctcctcctagaaggggaaagattccaatttcctttcccaacattttctttaaaattgttttggcttcagaccatacctcatcttatagccaaaatgtaacctggtaggagtgtagacatccccatttgtcgtcacctttaaaagcaagtacttgaaagggtctgttttcctctggaaaacaagtaccgatgtcaagcctagccactgatgtaacacgatgaaagctgcttcagaggaagaaattggaacgagggagtttggctggagcaatgagacatgtcgagagcctttgggtattaaccagactggcagtgtgatccctgggagggaagacaaagatagcactcgcctgtctgactcagggcataccaatatcgctcgaaccttcccgtcttcccacaaggaaactcggctccagcccattcagggcagccttccagggcctggcatgtgtgtgctcagcatcacgggcagctagcaaagaccagtgcaacggaggaggcttagcttagtacgcgttcggcaggacgggtgtgcaggctgcactgcccttgagtcgtccaggtaggcagaaggatggcttttattgactttctgagactggaagcaaagaaagggggtgggaaagaaaacagtaggtgtcattttagttgtgccctcatgagtgcgagcgggaaaggtcagaacacctcaggggatgaggacagagccagggcaagagtgttccccagaaagctagacagcaatgggacaaggtactgctctacaaaccgagagagaaacagaggcgtgaaaagagccgttagtgcaatggagtgtcgtgaattatctgtcagtgccgatggcactcttgttaggattctcacacttctcacatgttgtcctggtctacttcctgggacaagcttttgtgagccaaagaccctattgtgagcctaggcagtgccatttttctgtacatccctctcttttctgtgagttcccagccccatcatttaggaaccccctggaatctgatggacaggactgatgtgggtcacaggtgccaaaactgaacagacagctatgttaattacaccacacctgtttccccaggttaagccgttgctattggaaactgtgatctaatgaaccgttattgcaactccccttcagtcatgtaacagaccttggacttggagctcagtcccttgtgcaaaaggataaggagagtaatgaacgagagtggcgggtgggaaaatagcatctgtacatggttcctggaggtggtgaaggagagaagttggttccacctgcaggggaagagagtggtccaggaaggtactccaggatgatctgagaactaaaagatgagaaagcctctgctagctgctggcattcatgacacagggactagaacagaccaagtcattttagatgtctccgtaagttgccagcactgtatttggcatcccctccattcctaaaggtgtttttccaataaatccatggcaacatgcagagctgtgccatcgcattaaacaaaacaggtatgattttttttttcgatttccccagctcatgttctgtatctctacccaatatgttgccgagctgtgagcacccttaggcttccatctaaataatttttaaactttttatttcttttaccactttgcactttttgttcccagaatgaaccccttctactattggaaatttcctaagacaaacaagtttctcttcctgggtagcaatttccattgatgaaaaaccgccttgtatgcagtcaggaagtagagcaggttgggaaggtctgtaatttgtttcccatcaactaataatcttattgtgatgagtaatgtagtcctgttaatgtctcaacaaggttatggattgtgctgagtgtcagtagagaagccgacagctttgtacagtgaaaccattcattctcctttctacacagtatagtttcttaaacagcttgcaatagatcacatgagctttagcaaacaatatttaaatgaatgtaaatacaaaaacgattaacgatatgccaataggacttttactgagaggttgattccgtttttgtgttttccagtgtgcttttatttttaaggacatgacaaatattttggaaacagatttaccaagttttcaggctgcctttctcccttgttacagagtagcctcagtgtctctgcctgaaatggctcctaccgttaagcaagtctttcccccatccattgaagcaagtctatcctattcttagcattcagcgtgatgtttaattttattgtggtattatatttttaaagttaacatacagtaaaattggcttcactgtgtacagttctgtagattttaacacaaatacaggtttctggaactgtcacaactgcaggaacccaagacaacccttttgcctcgaaaatttcccatgttctccttttgtagttacttacacaccccagccctgtctcagtctctcctagtcactaatctgtccttgtcactacagttttgtcttcttgaggatgtcatctaaatgaaatcatagcttttgaaactaatttctttcattcagcatggtacctttgcaatgtatccaagtggttgtgtgtatcaatagtccatccttttctttaattaacttctttaatagacaaataacatttgtatatatttatggtatacaccacgatgttttgatatatgtacattgtggaatggctaaatcaagctacttaacatattcattacctcacatacttttcagttctttgtggtgagaacatttaaaatctactcgctcagcaattttcaacaatacaatactttgttattaactctagtcattcctgcttttgcttcatagtactccatgaattatactttgtagtatatgaattactatactttgtttattcagtcacttgcaggacatctggttgttctcagtttttagtgacaaggaataaagccgctacaaattttcacgtgcagattttgggttgaacattaagtcctcatttctctagggtaaatacctagacttgggattattagggtgtgtggtaagtgtaacatcacgggaaactggcagactgttttccagactggctgtctcattttgcatacccaccagcaatgtgtgagagttcccatcatggcaatgtggttagctttcatgaaaagtaaaacatgtatttctagcgtgatactgtattttatcatgagctgcttctggttaattctgtaagtcattttttttttattccctaatgaaacagtccttacattttctgttggttaacgaaaaagaaaagcaaaatttgcctgcctgcttttctcaattctgtttgtggtttctccttcgggtcagaccgcacgtgttttcattagaaaaatgctgagtcatgggtatttgtttcatccatggaattggcatgatggcgctcagagtgttcaaagacatatagagagatgaggactggatgattggaggaaacccaggaggtgacgtatcttcctatcctcctctttcattttcccttcataagtcttgctccatttcatgcatgcaaagagcaccctgaaaatcacgtgtctccactgctctccatcatcgtctccactcagcaactcagaacccagggcaggaattctgactctgaaccttgcaaagaaagcaattcagcacatgtattccgtgtgcttaattgaagactccaatttgccatgctctattatctagaattaaacacaaaagacagttgataaataccacattcagttgaaaacacaaatgaatcaaaatgttacagtttctctccataggtaataattaacattcttgtgaattgctctgtgtgccatgatgcatcctttaaatggtgtgcaagcaaaaaacctgcacattgagatgtgcatatgtgtagacccaacagaatagtgacttagccttgggagataaggctggggtgaggagaggggaaaggcgttgatgtagagtttaacaatatgcctctgtgaaacactttcaaagcagtgtgtcataatggcctctacaaaattttatacatgagctgaaacatgaaaacaacatacatggaaaagtaaagtattttggtggttaaaaaccacaagggaacaaaagagttaaggtgaagtctttgtggcttacccaaaaggtcagcataggacatgtctctttctttaccttcgtcaaggccaggaactctgtacctccaaaagccctctgacccagggtaggtgcccaatcattaattgctgaatgaaggaacatgtgaacaaatgaagacgtgaataaaggaacaaatgaacaaatcaatgattaagaattgaggccaaggcagtcagatcacgaggtcaggaaatcgagaccatcttggctaacatggtgaaaccccgtctctactaaaaatacaaaaattagccgggtgtggtggcatgcgcctgcagtcccagctacttgggaggctgagacaggagaatcacttgaacctgggaggcacaggttgcagtgagccaagattgtgccactgcactccagcctggatgacagagcaagactccgtctcaaaaaaaaaaaaaaaaaattgtttgtcataagtgagcttagctaatgtgtcactgttcttgtgtaagaaatttaattggacagaaggcaaaaggaatcttgtggagaaaactgtcactttggatttctctcagagaatataaaagactttctcaagtgactccctgcgcatggcttttctaggctctatacaacagcattcctcaacctttttggcaccgaggaccagtttcacggaagacaaattttctacggaagagggggatggtttcgggatgaaactgttccacttcagatcatcaggcatgagttagatgctcataaggagcgtgcaacctagaacgttcacgtgtgcagttcacaatagggttcacactcctctgaaaatctaatgctgccactgatgtgacaggaggcggagctcaggcagtaatgcgtgttcaccctctgctcacctcctactatgctgcccagttcctgtactggcctgtgtcccaggggttggggacccctgctttacaacaaaaaaatctgttaaatggaaactctatccaagctctatttccccatgtataaatcagagaagcttataacaatttagtgggctaaaaattatcaaataaagtgtttcaatatataacgtgttgatgttagctccaatgtcagccctagaagggagcaaccataaaacaacatacttgtcagcatagggttgaggaagccattggatttcatctgatccaatccaaaaagtcttcctgaaagaagcggaattccatacatcttacttttgatttgcaaactcttagcaaatcatcctctttctgtgccacatcgagttcctttctgtatcggcaactacgcagatgaatcaggattcacccagcctggttgagtcagaagcctttagcaaagattctttgatacaatggatttgtgatgaaaagtgaacattttcaggtggcagaaagagccacaggagatcctgttagtcagagtttggaagtgaaatgtgtctattcccgcttggggtgtgtgggaggcctctgctcccattagttccatggggatttctgcttgtaaggcatttgttgtcgtgtttggattgctgtaggaagagaaaaaattactacagtttgcatgagatagagctgtgttttggcaaggaagcccatgataatttttcttcttgaactttgatcaagttcaagcttttgagatttgtctcaaatgataccgcagtatacttcaacatactttcatttctgatggaatttggagcatttctccaatttctttgttcttgccatatttgtcaatgtgtaattaattaactaattcggtcatttgttcaacaaccgtctattgtgtctaccaagtactccaagagccagggattcaacagagaataaaatagcatctttgccttcaagatacttacttcctggtgcagaaagacaaatgagttttttaaaaaatgggtgccagtatgtgctttagagaaaaagaaagcaatggaaggatgataagatgactgatgctgtctcggaaggcaggtcttaaaagatgacatttgagctgagacctgcagacatggaaagaatgaactactcaattatctgtatctccaggccaagggtacagcaaatgcaaagagtctcaaataggagcctgcttggccggttccaaatcaggcagaggccagtaaggatccagatcagggcctttcttatttcttgcaatattttcttcaagaactaggcttgaatctgcaggaaagagacgaacctaggctgatattctgggcaattcctacacaccacacaagtcccagatttaaaatgcctttgttcttgctttttcctctgcctgaaacattgttccctcagacactggaatggctctctctctctatttccttcaggtctctgatcaaatatcatcttatcgagaagcctttccagactacactattaaagtgtcagataggcagtgttagaaatggaaattattttctccgccaaatctgattatttcacgtgagagatgactccctctctacattatgggattaagaatgatcccatttgagatgataaatactagaatgtttcagtaacccaagaagccctgagaaacaaattgctaattcatgacttaaaccatctaaatgtgatgaacaactcaggacgtcagtgaattgttcaacagtggattgcaatgatagagcaacttgcatggctcataaatgagccaaagaaacttgaaaaccttgattttattttaaggtttttcatgcaaaatgggggctgatgtttaccaggactaccagaactcaaggaaacacaggtcttcttgtgctaattaataaaagaagaagagaatttatcaaaggacaaaagctgctataaggcacttcacattgtccaccattggacagttttatttcagtgtatttaaactgcaagtgtgaaaaataagtgcactgattattttgatattctgtaaggcctggagttactataactcagtaggaaaatggtcccttattcttaatggtgctatttaccttagaagtatctggcaacagaaagtttttcaagtcattgaaataataatcctggctgggtgtagtggctctaaacctgtaatcccagcactctgggaggccaaggtgggaggattgcttggggtcaggagttcaagaccagcccgggcaacatagcaaaatcccatctctaccaaaaaaaaaaaaaaaaaaaattagccaggcatggtggtatgtgcctgtagtcccacctacttggaagacttagtcaggaagattgcttgagcccaggaattcgaggttacagtgagccatgattgtaccactgcactccagcctgagtgacagagcaagactctgcctcttaaaaacaacacacacaaaaatctaaatcacagggtctgtgtcacccctctctccaacatctcaaaaaacaggccaggcacagtggctcacacctgtaatcccagcactttgggaggtcaaggcaaaaggatcacctgaggtcaggagtttgagaccagcctggccaacacggggaaaccccatctctactaaaaatacaaaaattagccggatgtggtgacacgtgcctgtaatcccagctactcgggaggctgaggcaggagaatcgcatgaacctgggaggcagaggttgcagtaagccaagatggcgccactgcactccagcctgggtgacagagtgagactcccatctcaaaaaaagtaaataaataaataataattagcctattcaggtgaaaataaatgctgacatttcctgagggccttctatgtgtgatgcattttctgagcactttaaacgtagtatctcatttaactctctttaccaattaggaattgttattaaccaccttttacagatgaggatacagaggttaagcacctcagaactttggtggtctaacttcagaagtcctccaggcaaaactggagagatcaatgttttcaagactgaaaaggccctagaaatggcctcctgaacccttgctagaaagaaacctttcttctagtggagcacaccgggacccagtgattcttatggcaatgcctcttcctcccactgcaaaactgagggctgataacacactggcctcctggtggtcccagtttttttctaaaagttagtggcatcctggggatcttcaaggtgagggtgagaggtttctcctctaagcctgctcagcagcggggtacttctactcatcattcatgcaacatcataagaaaggtcttgagcactgtgagaggtctgatttattttaattgggaggtaaagacaactccaagacaactttgaaagaaaccagtaaacaattaccagcaaaatccagagagtgctctctctgacagtagttgagccatgtagtcttaggcagtggatgtttctccagatatttgattatcttgggtaattacttgtgtgggtgcgtacgtgtgtgtatgtgtgtgcattctaaaggcaaaaagggggttctgaaaatatctccagcgatatgtctttacatcccatgacatcagctgttacttgacgtgacaccagatgcagttcaaggtctgacattcagctggcttctgtttatatagtatggagaaacttttgttcccttgccctataaggcatgtaccaggagagattttgggaaaagttcacccagatagtaaataattctgctgagctttgaagtgaaaatgctccaggaacctttatcccatccttgccatttaactggtatgcttcggccactcttggtattaatgaatggtgtagatcagagtttgtttccattattctgttcatcagaggcacaatctcaaatcaaaattatattttatctttgttttgatctttctatgtttgggggaaagcactgtaaacatctcaaagagagagagaaaaaaagaatgaaatacacccccaggaaattctagttaaagacctaaagaatggcatctcagtggaaaagaattccactgtgaggtttggcttttttaaaaaaatagcctggtctttgaaaaacatattatctttcatgggtagggaaatatccaaattttgcccagcctattttacaataagaccttgaaaagctatgtgatgagctggaatgagaggagtttaaatttttgatgcaattctctgcctgggaaagtgataatgctgctcacataacagaaagagtattttctgctacagcacaacaatcaacataacgtctgggcatattaataatttcactcctaaacttctcgacagggagtgcatgggtcttaatagtattgtcaagatccttagggcaattgaaaaacccaaaatcattactttctactgataggctttcctctcccagaggaggccaaaatacctagggtaatgtagatttactgaaatgctcagataggcactgctcagacgtaactgtgtaataaaatcttctctttagaagggtccttctcagatatttcaagtggtcttttttattttgtctttgtcacttggaaagtagctaatggagatgacgctgatctcaagtaatactttcctgatgatttaggaaggcaaagaatgagtataggggcaatggtcaaatgatgtggcacctacgattaaaatccctttctgacccttcatgtgtgagaacgtgccctattggggcgggatggtcccaaattcacaatagctattaagctcttaacccaagggcagctactgacttggcacccagttcgagtccccttatcctttcttgtttcccctcccacaaatgtccctgcctgtgcctggctaggtgattacagccatgcctgaaccgctagaacaaattcccagctcgccctcagacattcacatgtgcaactcgttctcaaatgccatcacctaacaatctccatctgaagaatatcagcagctgcagggtctcagccaaaaaaaaaaaaaaggcctgcaggggacctgcttcaggttgccaggggaagatctttttaagtgctaggcagtgtgccccgtttgagattgaactttgactggctctgatggagctctgcaacagacagatgtcgtggttataataaacagagggaattgccatttccatgaaatgtccaggattggcacatccataggaacagagagtagattaacatttgccagaggctatgggagggaggaagggactgggccgtgactgctgatgggtatgttgtatcctttgagggtgatgaaaatgttctaaaattagatagtggtgatagttgcatatcttggtgaatatactaaagtaacactgaaatgtatacttttaaaagctgaattgtatgatatctcagtaaaactgttattttaaaaaagcagaagaggtgatcaggcagcaagtgccaggaaaaacaaccaaaaaacaaacaaagacggaggagtttgaagtcaccttccctctgtgtctagccatctccctgttaaaggagccctagaggtaacagaaatgagggaattaagtgggagggcatcattgattccagcaatcaactagaatgctctagggatagaggcagaaatctactctgatccctgtcctctgagactctaaatataactcccagggacatgatttgttcattcattcattcattcatcaccactagttttataccaggcactgtagccttatgctgggatatacagacaagtgagacagactgtttttaatggaggcactcatgatctagtggagagcacaggagagtccaaaaataatataaaaccatgtgctgagcgttacaaaagaaatataagcagtgggcaaatcaagcacccggggggggcacagatacgttacagttaaatacaaaatttaaggagagagaattatgttacttaacctccccacacctcagtctcctcatctttaaaggggagagcaatatcttctttaaagtgctttaaaggttattgtaagttttaaataagatgaaatatgtagagtgcttatcacacagttggtgcttactaaatgggagctattggacttaggtgatctaagatgtccctgccgaccctagtcctttacgaacgtaggcagagcggaggaaaactttgaattctgagcctgcaaatgattgctccttgtgactgtaattcccgtgttccgctatgcagtgttgatctgtgcgtcattgcgaatgcattcggaatgtttttctctgaggtcatatattttgtgtaagaaagagagctataaatcattccttacaggcaagcacagccctttctttctctgccctctgttcaggctgagcggggtgcttccttcaaggacagccccctgatacaggcctgtgcaacccaggccagaggcactggctagagctggagccagcggctggggagatgaggaggaggctacaacttgactcactccttcatcccccttcttgtttctcctccactctgaaatgtggaaaagctgcagctgcagcttgcgacagcagtgaccagatccaagaaagactgcagacaggccacctgccctgtgaagccagccataccatatgtgtgtcaataacaaaaaatgcaagtccattctttaggagataagtcattctgtaggtgttaagacagaaggaggaagcaaggtcattgtcccacatgcccagtacttagagacaaataaggaaatctcttcaaatatgggaggaggctggatttggacctattccttccatccctgggctcttggcaaagtacctcaggtcagagcaggacaggacaagctgggatggagtgtgcccttggttctgcccctgacaggcctaattgctgctcattcctcatgctgcccctcacgccgctggttagggagccagggatgcagcacagtgaaggaagtttggggagggcctttgggaaggcatagaaagagattgcactgcagtttggctgttctggcctatttctcctgattcaagcagcatccgtgaggtggtgcagagctttgaggtgggcgattccctccagtttctcacaagattggattctgccatttaagcaaatgtgcaaagaaatgagtccaggctgttttcctctgtatttgctaggcatatatcagccagggcaggggacctgtttcctccctgtgtgcctgtgttctggttttgggttcctttgcatacagctgggaggggaagagacctgggatcgtgtgccagctctaccacttactaagctatatgacatctggtgcattacttaacctctctgaacctcacttactggatctgtgaaatgggcatgataagtgacctgtctcctaggagtaagtgggaatatattgaaatgatttatgtacaacacttggcacagtacccgacacacagggagaacttaactcatggcagccatggacaatattattgttttgttatcatcagcatcaattgttttgcttatggaaatggagcagttctgaatcccgttttatttttgtgggctcttacagagacactcttgagactatctgttaatagctcctggccacgtcacttagtcactctgccctcctgctggccaaatttgaaggtggaggggtcagagattgatgattttgcagccaaatgcagccgcatgttcattgaatatccccctccaagaactgccatttcaaaggacttggaaaagttgggcccacagtgccctaggaggtactaatcattttcctcagagtcatagttgctatagctgccattgctattatcagaatgattaattatatcaaatagtaataatcataataatatgtgttaatagcttgctatgtaccatgaattgtgctaggctccttaaaaatatatttccatttgactctcctaacaatcatgtatgagaagtaagattactatatccattttacaagtgaacgactcagaaagaaaaatatgtcactttccagtgtccacacatctggtcagtggccaagcagggattcaagccaaccactagcctgaacatctgcaacagactctgtcctccttggatctaaccagacactgttattcttgaaaatcctcacccccaattccctctggccaattcaaggtcaaatttgaacagggtgtcctggtgccagttatcatcaaccagagattctcaagtctctgccaacaccatctcctcttttagaaactttaaattgctattgagatgtaacttgccctaaaaggtggttcaagagaagaaggcaaagagtttgtggttaatttgtcatctgagggtctgagggagttgaaaattttaaagaccaaccattggcatgccattcccaggaatgagtgatttattagcagctaggcaggccctgacttttatttttttctttcatatattttatcatcatttctaatcaccaggaaaaattggtgaagactatggcgcaagacaagcctggtttaatttgtctctgctttcccaccccatctatttgtcgatgcttggcaaaagtagacccaacctaaacacgtcctccagctgtttatttaggcagaatgcaacaacaatagtcgattattaacaatttcttccttagagcccctgaaagtcttcctttatatgttgtttaaaacgtgggcattgattgtttccccatgccgtgtgagcaactctaatggagtcaacacaaaagttgatatgccaaggtttttcacttcccacatctgactttatgggaattggtatcgttactcaacaaagaagcactgcttcatttttctcaagtttcactgccaaccggtaggcatttaggaaggacagactatgtgactggcatccctctcaaaatcaactggcaacaactgtcccacagaaaatctaaaagcgcagaagcacagaccattctttagcaggacagacagcagtgctcattcaagcccttgatttttaaacatacaggaaacatcttgtctataaattcacttatcatttccaggcaccttacttatacctcccctggtttttagtaaagagccaataagacagttccttcttcctaggactaaaagccacgcagtacctaaaaataaattccaggttctggactgaaggtaaatcaggtgcagtgtcaggtcagcaccaatattttaatgacagttgccttttgtctactaatagcatactgattaggttgatactgtgtaagaatttaccttatatagtttcttatgtttaaattgcattattatgtaatttcatatttatgtaatagaagagctcttagtaatatgcacattaattaaacccaataaatgtatggaacttacagtggacatgagggttccttcatcaagctgagttattcatctccgtttcatagtaagttgaagacatcagttgctttacagaagggcttttcatgtattttggctttttggaaagcaagagggcatgttgtcagcattgtttgcatttttgaaacagaaaaccttcccacccagcaagtgtgttggatgactgtagtgaaaagtgataaatgcaaaaaggtgcttgtgatcatttgttgtagcagaggtgcttcatactagaggtacgttactgatactgaataccaaggcacccgagtgaaactaggagtcaaaaacatactattaggcgtcagtaacataaatacatacagccagctaaattacgagaacagggatcgctagggttgatggcaaatcagataagccaccccacccctcacagcattcagctctatccagttgttttgaggggatacagactccatattttgggtttggttttgctttcaagagaagtcagaaatctggaacactatgcaaaatctcaactttgaatttttgataatattcagcttgagggctgtcagtctgtgacatctgccctagatagatgaaatttggatttaattttcctactcaaatctggggtccctgagagctgcagttatgtcttatccatcctttcatccctgaaagaacccatcactgttctctacacttggttttcggggacttgccaaccatcaggcagcatgcttagcactttacattcatccttcctctctaactttcacagcaaccttagcgggtagttactgctgttttcaccagttggcagatgagtaagctgagaatgaaagaaatgaggtagcacgcccaggttcacacaactagaaagtggcagactcaattcttgaacccagttctgtagattttatctcctaacctctagctaaatgcccctcctagatgttcccacattcctctgtatatatcccaggggtcacatttaccactctgtattgtaattgtcttttccttctgtctcctgcacctcgttgggaaatatgactgcaggatagatagacaaatgagcaaatataatcaatgccgtggtgaaaatgagcaacagttaggaggagaatgtcttccaataccgagaacgctggataatttttgtttttgttgctgtcaataatttgatctatctgcaatgaaatatcatcttgctttataggagggctgggtgagcggagaattaagtattcttccatcttcccttactcttccttctccatttcccccaggaagctctaggctttctcattaggataaatgaaaagagaacttgacctctcttctagttaactggaaaactcccaattcattttatttggaacataacacatggcacccaggtcggtgcttctcttccccctggggaccagccctggatattgtcagcacacaagcaaccgcaggaattctgcccacgcataacacagatggacctcacaagggccacacaagctggagtagataaggagaacttagctcagagtgaatacacaggaaggaggagggtctggtatctcatttagggaattaaatcctttatatggcctctttgtactttagaagagtgtgtggtctggagaggggagggtggggggccaggacagagggagatggaaagttaggacttagggctggggagggcaggttctcacttgtgcactgacccgccccatcttcctgaggcaagtctcgtaattacctaactaatggggaataatgacaccacttggatgggagttgagagagggggaaagaaaggcatgagaattcattaaccatgtgtgaggggcttggatagcatccctgaaggatcattattacatcatttcacccccctttcccacctctttccactaatatgagacagacaaatgctaaataactatgtaataatacattactagacagacaacaatgccagaaaatataatagcctgctacagctatgaaactctcccaaagatatatttaaaatgtcactgatgcataatgtaaaataggaattacaggttcatttggaggacatgatttaaaatctatacaactgtacagtggtatttcccactgggtttttgttgtcactgtccttttctaaacatcacaaagaaaacaaaaatcacccaaataatttcagcctagagatgcgaacttcaaggaacctgtttcctccacatttttccttcttgtttttgttggtcaggatgctctccaaacctagtatcttcttgacatgttgtcttttcttcagaatgtttctgcagcctgcacaggaaccccagaatgtagattacaccttttggagatgtagcccggccacataaggagacaagtagttgaaatttgtgtcaaattgcttgtttaaatgacttgagccaacttcttaaagccaggacagcaggggctgaggatttttaaagttggcaggggccaaaaatgacaaggctcagcagtcacctggtgagctgccagccctgactggaagcttcaaaaaataaaactttctcaaaggacacaaattaaaagtcatgtttcagcatccattaaaacgaaattataggcttcatcgcatagcaaactactttcattttcattatgcttaaaatatttcattttgtagattgagaatcggttgctaggaaaaccttgtgtggagttgtcagagacagcgatatctacaaggggatattttccaagggagagctctcctttgtttttcctgcaaggatagaggattttgttatttaaaaaaacgcaggatgcaatttggagtcggggtcatggcttgaaaacatctgccatgaccttctccagagaccgagtcctcagggttcatctctcagaggaaagaagttagcaacctgctgagctgagtgggctcacaggtgtgttttgttcactctcattttaaaatagatatatatgtgtatattacacatatacacatatatacacacatacatacgcaaatatgtgtgtatacacacatacatacgcaaatatgtgtgtatacacacatacatatatataaatctcattttgaattgtcaacatttttaaaaactaggaaattttatctacaagtccagatttccagcttttctagagaaattagaaattacggctgccttgagctctctccctcattcccacgtgatcaaattgacctggtgctgagtgagggctgccccctagtctcttcacctcaactcagtccttagctagcccactccaccttcctgcctagtccctataggtatttaaaggtactattccctgacttagagtgttccatattcttaatatcttcaaaagatgaaatttttgaaaagaatgtgtgcagtataccagtttacctggaaagggaatagggacttgctacgccagcgatcagccttgaatgtcatgttactttcattgcagtattaatatgtttcaaataattcctctggtcagcccttatccacctggttttgctaaattagtttctcattattcttcatttgatgcgtgtggataaatgcaaatcaaagcccattatttatttgtaactgactctgggatgcctgccgcagtcttatctgtcgctctagcttgcagctttcagcaattgtcagcttagagactttggtttgaaactctcctccagtggtttgcagagtgcctgagactggaatttgcagacgctaacagtcatttctcctttttttttcaggccctccgaaccaccacagccagtcgactctgaggccccctctcccaccccctcacaaccacacgctgtcccatcaccactcgtccgccaactccctcaacaggaactcactgaccaatcggcggagtcagatccacgccccggccccagcgcccaatgacctggccaccacaccagagtccgttcagcttcaggacagctgggtgctaaacagcaacgtgccactggagacccggtaagtccccatcgccagctcacagtcacactcagtgtcaccttacccctgagtcaccacacagagccactgggtgtctcagagttccagtcggagagaccctctgggtataaataatgagacaagtttaccacctccttgttcccttggtaatttgaccctggacagtaggttgacaggtatttcttcgttcacatgtgtctccttttaaagcttgtttactttctcggatagctcttgtgtacccaactaatagaattagcataacatatttttactcgaaggctcatgggaaacatgcttataagggtatattgactgaaagctgctgataaattatgcatttggcctttcttgaagtaataaatgaagactcatttgaaattaagtgtttggggagaccttgagaaacaatccctgattccaaactgacagaagtataatttaaatttatatttcatccaacatgcagtctcactttaatccctcctgtacacactaacagcttgatgcctgtggggcaaacggtaatgtataaaaacaaacaagaaaaaaggggcagcacttacgtgaggagggaagagtttgaaaatgatctccaggtctggctttgttttgtgtagcctttgcttctgtccttttttcaccttcgattctgttctccaaaaccatatacaccttaatgatctgaaagaagacctgtcagtcagggtatggaggggctggaatgtcactgacagtgaaggctctgtgtgggttggccagactctgaaacagccttgctgctctatccccaggcacattcttggtttgtgtgtttcaaatgctattgtttccttgtctagaagaaccatggagacggaacagagaggagggctaattcatactgacccttcataaagttcccaaatagattttaaactttaataacttaggtttgaggaaagacagaaataatctgtaatgtttctgataatggccagtgaattctcttcacacagctggaagcaattttgaaagtagcatttggagttgtttcttacctataatttttttgtttttttataagatcctgaaaattaatatgttatacatctttgtcactataatcactccaaacttttaattttattttctgacaattataggatttttaaagaatttttgctttattaagagaaactaaaagaatgaacctaagctaataaatatccttgatctcaacattagtttaaaagaattggtacagaaataaataaaatgacacaaaatgaagcactaagccaaatacaaagggtgctgcattattattattttcctctgcaaaaaatacctaacgtgtgtgcacacacacactcactcacacacacacacacacaaacaaacacacacacaggctctcacacaaagaatggttacataacaaagtaaacgttataacaaccacatctgtttgactcttaatccaaactaacacgaaaaatctgtcaagacaattggggtaatttaaacacggattgggtatttaatgatattaagaatataattataattttattaggtgcagttttggcatgcatgtttggttcaaacattaaaaacattccaattgaggaatgaaaagctacgtatcgggtattatgcttttttaaaatttattatagtttaagttctgggatacatgtgcagaacgtgcaggttcgttacataggtataaacatgccatggtggtttcctgcacccatcaactggtcatctatattaggtatttctcctaatgctatccctcccctaggcccctgccccctcacaggccccagtgtgtgatgttcccctccctgtgtccatgtgttcttattgttcagctcccacttatgagtgagaacatgtggtgtttggttttctgttcctgtgttagtttgctgaggatgatggtttcccgcttcattcatgtccctgcaaaggacatgaactcatccttttgttatggctgcatagtattccatggtgtatatgtgccacattttctttatccagtctatcatggatgggcatttgggttggttccaagtctctgctattgtgaatagtgctgcaataaacatatgtgtgcatgtgtctttatagtagaatgatttataatcctttgggttcatacccagtaatgggattgctgggtcaaatggtatttctggttctagatccttgaggaatcaccacactgtctttcacaatggttgaatcaatttacactcccaccaacagtgtaaaagcattcctatttctccacatcctctccagcatctgttgtttcctgactttcaatgatcgccattgtaactggcatgagatgttatctcattgtggttttgatttgcatttctctaatgatcagtgataatgagctttttttcatatggttgttgcccacatgaatgtcttcttttgagaagtgtctgttcatatccttcacccaatttttgatggggttgtttgtttttttcttgtaaatttgtttaagttccttgtggattctagatattagccctttgtcagatggatagatggcaaaaattttctcccattctatagattgcctgttctctctgattatagtttattttgctgtggggaagctctttagtttaattagattccatttgtcaattttggctttctttgccattgctttttgtgtttttgtcatgaagtctttgcccatgcctatgtcctgaatggtattgcctaggttttcttctggggtttttatggttttaggttttgtgtttaagtctttaatccatcttgagttaatttttgtataaggcataaggaagtgttccagtttcagttttctgaatatagctagccagtttttccaacaccatttattaaatagggaatcctttccccattgcttgtttccatcgggtttgtcaaagatcagatggttgtagatgtatggtgttatttctggggcctctgttctgttccattggtctatatatctgttttggtaccagtaccatgctgttttggtaaatgtaaccttgtagtatagtttgaagtcaggtagcgtgatgactcctgttttgttctttttgcttaggctatatcacttggccgtatgggctcttttttggttccatattaaattttaagtagttttttctaattctgtgaagaaagtcaatggtagcttgatggggatagcattgaatctatgaattactttgggcagtgtggctattttcactatattgattcttcctatccatgagcatggaatgtttttccatttgtttgtgtcctctcatttcgttgagcagtggtttgtagtcctccttgaagaggtccttcacatcccttgtaagttggattcctaggtattttattctctttgtagcaattgtgaatgggagttcactcatgatttggctctctgtttgtctgttattggtgtataaaaatgcttgtgatttttgcatattgactttgtatcctgagactttgcttgaagttgcttatcaccttaaggagatttttgggcagagatgatggagttttctaaatatacaatcatatcatctgcaaacagaaacaatttgacctcctgtcttcctatttgaataccctttatttctttctcttgcctgatttccctcgccagaacttcgagtactatgttgaataggagtggtgagagagggcatccttgtcttgtgccggttttcaaagggaatgcttccagcttttggccattcagtgtgatattggctgtgggtctgtcataaataactcttattattttgagatatgtttcatcaatacctagtttattgagagtttttagcatgaaggggtgttaaattttattgaaggccttttctgcatctattgagataatcatgtggtttttgtcattggttctgtttatgtgattaattacatttattgatttgcgtatgttgaaccagccttgcatcccagggatgaaaccgacttgatcatggtggagaagctttttgatgtgctgctggcttcagtttgccagtattttattgaggattttcgcatcgatgttcagcagggatattggcctgaacttttctttttttgttgtgtctttgccaggttttgctatcaggatgatgctggcctcataaaatgagttagggaggagtccctctttttcaattgtttggaatagtttcagaaggaatggtaccagctcctttttgtacctctggtaggattcaactctgattccatctggttctgggcttttttttttgttggtaggctattaattactgcctcaatttcagaaattattattggtctattcagggattcgacttcttcctggtttagtcttgagagggtgtatgtgtccagcaatttatccatttcttctagattttctggtttatttgcatagagatgtttatagtattctctgatggtagtttgtatttctgtgggatcagtggtgatatcccctttatgattttttgttgtgtctatttgattcttctctcttttcttctttattagtctggccggcagtctatctattttgttaatcttctcaaaacacagctcctggattcattaattttttgaagggtttttcatgtctctatctccttcagttctgctctgatcttcgttatttcttgtcttctgttagcttttgattttgtttgctcttgcttctctagttctttgaattgtgatgttagggtgtcgattttagattgttcctgctttctcctatgggcatttagtgctataaatttccctctaaacactgctttagctgtgtcccagagattctggtacattgtgtctttgttctcattggtttcaaagaacttatttatttctgccttaattttgttatttacccagtagtcattcaggagcagattgttcagtttccatgtagttgtgcagatttgagtgagtttcttaatcctgagttctaatttgattgcactgtggtctgagagactgtttgttatgatttccattcttttgcatttgctggggagtgttttacttccaattatgtggtcaattttagaataagtgtgatgtggtactgagaagaatgtatattctgttgatttggggtggagagttctgcagatgtctattaggtccacttggtccagagctgagttcaagtcctgaatatccttcttaattttctgattgttgatctgtctaatattgacagtgaggtgttaaagtcacccattattattgcgtgggagtctaagttgctttgtagatctctaagaacttgctttatgaatctgggtgctcctgtattgggtgcatatatatttaggatagttagctcttcttgttgctttgatccctttaccattatgtaatggccttctttgtcttttttgatctttgttggtttaaagtctgtgttatcagagactaggattgcaacctttgcttttttgttttttgctttccatttgcttggtagacattcctccatccctttattttgagcctatatctgtctttgcatgtgagataggtctcctgaatacagcacactgatgggtcttgactctttatccaatttgccagtctgtgtcttttaattggggcatctagcctctttacatttagggttaatattgttatgtatgaattcgatcctgtcattatgatgctagctggttattttgcccgttggttgatgtagtttcttcatggtgttgatggtctttacaatttggtatgtttttgctgtggctggtaccagtttttcctttccatgtttagtgcctccttcaggagctcttgtaaggcaggcctggtggtgacaaaaatctctcagcatttgcttgtatgtaaaggattttatttctcctttgcttatgaagcttagtttgactggatatgaaattctgggttgaaaattcttttctttaagaatgttgaatattggcgcccactctcttctggcttgtagcgtgtctgcagagagatccactgttagtctgatgagcttccttttgtgggtaacttgacctttctctctggctgcccttaacattttttccttcatttcaaccttggtgaatctgacgattatgtgtcttggggttgctcttctcaaggagtatctttttggtgttttctgtatttcctgaacttgaatgttggcctgtcttgctaggttggggaagttctcctggataatatcctgaagagtgttttccaatttggttccattctgtccatcactttcaggtacaccaatcaaatgcaggtttggccctttcacatagtcccatatttcttggaggcttagttcattccttttcattcttttttttttttttttctttttttgagatggagtctcgctctgtcgcccaggctggagtgcagtggcgcgatctcggctcactgcaagctccgcctcccaggttcacgccattctcctgactcagcctccccagcagctgggactacaggcgcacaccaccacacccagctaatttttttgtattgttagtagagacggggtttcactgtgttagccaggatggtcttgatcttgtgttcatgctttatttcattaagttgatcttcaatccctgaaatcctttcttccacttaatctatttggctattgatacttgtgtatgcttcacgaagttcttgtgctgtgtttttcagctccctcaggtcacttatgttcttctctaaactggttattctagttagcaattcctctagccttttttcaaggttgttagcttccttgcattgggtcagaacatgctcctttagcttggaggagtttgttatttcccaccttctgaaacctacttttgtcaattcatcaaactcattcttcattgagttttgttcccttgctggtgaggacttgtgatcctttggatgagaagaggtgttctggtttttggaattttcagcctttttgcgctattttttcctcatctgtgtggatttatctacctttggtctttgatgttggtgaccttcagatgggttttctgagtggacgtcctttttgttgatggtgatgctattcctttctgtttgttagtttccagtcaggcccctcagctgcaggtctgctgaagtttgctggaggtccactccacaccctatttgcctgggtatcaccagcggaggctgcagacagcaaagactgctgcctgttccttcctctggaagcttcgcccagagggctacccaccagatgccagctggagctctcctgtatgaggtgtctgtcaacccatgctggtaggtgtctcccagtcaggaggcacgggggttagggacctacttgaggaggcagtctttcccttagcagagctcaagcactgtgctgggagatccgctgctctcttcagagccggcagggtgggaatgtttaagtctgctgaagctgtgcccacagccgccccttcccccaggtgctctgtcccagggagacgggagttttatctataagcctctgactgggtctgctgcctttctttcaaaggtaccctgcccagaaaggaggaatctagagaggcagtctggctacagcaggtttgctgagctgtggtgggctctgcccagtctgaacttcccagtggctttgtttacactgtgaggggaaaactacttactcaagcctcagtaatagtggaccccccctccctcccaccaagctggagcatcccaggtcaacttcagactgctgtgctggcagcaagaatttcaagccagtggatcttagcttgctgggctccatgggttgggatctgctgagctaaaccacttggctcccttgcttcagccccctttccaggggagtgaacggttctgtcttactagcgttccagtcacctctgtggtattaataaaaaaactcctgcagctaactcagtgtctgcccaaacggccacccagttttgtgcttgaaacccagggccctggtggtgtaggcacccaagggaatctcctggtctgtgggttgttaagacagtgggaaaagcacagtatctgggccggaatgcaccattcctcacagcacagtccctcacagcttcccttggctagaggagggagttccctgaccccttgtgcttcctgggtgaggcgacgccccgccctgcttcagcttgccctctgtgggctgtacccactgtctaaccagtcctagtgagatgagcctagtacttcagttagaaatgcagaaatcacctggcttctgtgttgatctcactgggagctgcagaccggagctgttcctattcggccatcttgccagccagcagaattataggttatttttaaccatgtctacaatcttaatctttaaaggttaaaatatgtaaagtcaataaaaactgtatataatagagatatttaaacttctgccctgatatggtaaaccattaataaacagctttgctggaagctgactggctggccaggcttaactcaggatattgtcaaagttgatggtggtcttaaaggctggatggtattttctgtctttttcctctccacacttacaaactgccatagagtttgttaattagtcagcctatttttacgttaacagactattatttgaaaaatagtttctggatataaatgctacttagaatggactagatgaagaagaagaaaggaaggaaagaaagggaagaggagatgtaatagctattgtagaaaaagaagaggaccaccatgaccattatcaatcagttgttattgtttagtttatatatgctgaacattaatgctttacgtgcattatctcactcaagcctgaaaacaatcctatgaagtaggaagggacttttattatggccatttaaagatgcagaatctagggatagagggacaaagtaacctgcaggaagtctaaagcttcagaaagatagtaaactatgagccatgttggatgaaacactggaagttcctacacccaaaataaggtggtggaatgtctgatgggtgaacaaccacaaatctaggtttattgccctagttgttacatttacaggaccagatccaccagagtgtctgctcttggcaatgagtcttcccttagtgataagaacacacgaaacacataaacatatctcccagctcccagctcctgatgcaatcagttggttttctagatttattttgaataactttttgtaataaagtgtcctcttgacaaatatctggtagagaggaccaatgaaaccacgcagatcactgtcctgctttcctaaagtaagctcttccagaatttactttctggtctagagtccttcttcagatcctttgaatatttggcttttctccaaggattaggacttctcaatgctaattttggaagaagcacattaaagaaaaaaattggtgggaagataggagtgccaaaaccttgacatccatcaaaaggaaaaaaaaaaaaatgagacaacatctgagtattctttgatccatatgttcaagagccaaggattagagctccttgggatggagttgttggcagaaatccagcacaaggtgcaaaacttggtaaatatttgaaactccactcatggaactgagcacatagaatatgcatctagtctcatgtatgaaaattctagtcatagtccatagaactgatgaaatgtatgattctgttttaaatattatttgtattagtttgttctcacactgctaataaagacatacccgagacccagtaatttatagaggaaacagatttaattgactgacagttcagcatgacgggggaggcctccagaaacttataatcatggtagaaagggaagcaaacacactcttcttcaacatggcagcatcaactgctgagcaaaaggggtgaaaaccccttataaaaccatcagatctcatgagaactcactcactatcacgacaacagtatgagggtaaccgcccccatgattaagatacctcccactgggtccctcccatgacacatgggaattatgggaactacaattcaagatgagatttgggtagggacacaaccaaaccgcattgttattagttcagtctcttattagcaaatatttattgagtcccttgtgtatgccaagagctatgttaggtactggcaagatactgattaaaacatgtattgtcccattaaagatcgtccaacctaaaggaggaggcaggtacataagcaaaaagatagttcaacatatacagtaatggaagtctaaaagttacagagattttatagtggaagaagcgatttactatccgagaaagatcaagaaaatttttatagctgaagggctgcttcagctgggttttgagggatgaataggaatttatctattacataagtaaagtcagatatgatagcatattattatttgttctcattcaccactgtttttccatatagtcttagcaatagataattgaatgaattccctgattcaaatgctaaaatattgtgagtttattggtgtcaatttcttagccatgagagagtatagatatgggatttcttctttttaggagcatgatgccatgctagtatttccatttctgtctttcataccaaataagaattggtctctctccaggagagagaaccattaaaagcaagacattctgaaggttgattataatttagtcaccatttttgaaaatgtggtgtaaatttacaaacagcttgaccacccttactctcattaatacagatttctgggtttgatggaataatttcaaaactctgagaggtaatgagcaggcattctgccactcccagaatgcaaagcgtgtctctttagtccagtgtgtctccttagaccagtggggagtgggtcctttcctctctgcattgctctcttgatgtccccatcagtcttaatgaagcatgttagatcttctctgaactatgctgcttttttttttctatgatgagtacattggaggggctgattaaggaggcataaccagaaaataggactgtttggaatttaacaaaagacaaacaagcatataagggaagttctgcatcaatgtaaaataaaagaacaatgcatataaatttgtactaccaaaagcagtctattcatgtataaaccataatataatccaacgaaaatcaaacataaggcagaactaactgcaagcagtctgtactgtcttttcttaagtagtgtgttacagaatccctctaccctccaccttcctcccagcctattcacagaaggttttgaaacaaagtctacttgcaattcttgttcaatatcacctatctactccttcctctgctgaaagtgacaaggtgagaaatcttcccggtcggctgcttctttgggagtttctaaagtcaacttctcttgtctaaaacagtagaaagtagctcagtgacagaacctaacttttcttcctttgtgtgttttgctgaagcaagcgtctctctttggatctgtctgagcagtagatcacaaaaaagagtccctaagcaggacaaaacttctctctgagttcacttttgccctgacatactagaagccctaattttaatcatcaagatcctcaagctgcaaaacggtttgcaatttgcctttttaaatggtcattcattaattattctagaaatagctatgagaacctaccatgtgtcaggcactgaggatccggcaaaggagaaaaacaaaacctctgtccttatggagattctaggctggaagcagacagaacataaacaaatgtcccttacaccatgacaaatgcagtaagtgccacagacggctgaagaagccagacccataagaaatggacatttaagctgagcccttaaggatgagtaggggttaatcaggcttaaagagtgctctagatcacaaaaacaatgagccactaggggcagaaacactaaggtgccagaaagagaaagcaagagaaagcaaactagaaaggtaggcaagggcaagatggatcaaggctttggaccatgttaaagcttttggactctacctcgagaacaattaaaagtcactgaagctttttaagcaggagagcaaaataataagatacactctgctttttgcttttaataatgatagctgccctatgataaatggattggggggcagttagagtggaaagtatgcaagactaaaggtccagtttggaaaataaaataatagttaagataaaaagtggcatgcctttgattagggagtggtgctgaatattcaaagatgtgaggtatagtttgaaggtaggatcagtagaaattaatgattgctgggatttgaagatgaaggttaggattcttcaagtttttgacttagatgtctgggtgaatagcaatgtcatgtgctgaagaaggaacaggtttttgtggcagaaaacaaaagttcagttttggacatgttacatttatgaggcaagagaattgagtgcagttattggccagacttattttgattctaaaataatatgtataacacagaaaatcatccatttacagataatagcatatgtagtatatccaaagccctcagcaattgatttttctctttaaaaaatgtctctccaggccagatgcagtggttcatacctataatcccagtaatctgggaggttgagatggaagaatctcttgagcccaggatgtggaggctgcagtaagctatgatcacacccctgcgctccatcctgggtgatagcgtgagattccatcttaaaaaaaaagaaaaaaaattctctccagaaatttgttaaatttatttcacacaatcatataggcctgtgaatactaacttttctttgtcaaatactttttgcttggcactaagctttacctacaggatcccatttaatcccttaagctctttgttaggtatatgttactatccatatttaaaatacagggaaaccagggctgggggaattaagttatttacatgtcacccattagtaagtgacagagctgaaatttgaacctgggttgacctgactttaaatcccatattcttaatgaccatatgataatgcctggggaactaggaagggcgggggctggaaaaaactctgtctagcctgatggcaaacaacaaattaatttgcttaggccatgaaatgaagtcaatgcattacaagtggcataaggcgagaaatgatctatgggatgaactccagcctgttactggacatagacttagtcattgtcaaactcataagccaggccagatgcaagagacccttctctgaagctctgaggaattggtggcaacccggatggtaaatctgaggcctcaccactccatggtggtggcagcatagcatatgatttacggggagaggttttatgccctgcatattataaaatatgagtgcagattgacaagggagaattaagaagcacagctacttgtttagctctgcaactcgtaggatctttttcattctaaacagagctctgccagattgctgggagaaagcgcaacagccatgggtgccatggctgacccttggggcatcccttgaatatcatccttgttcctgttagcaggaagcatgacaagtgctcagaaaaagaattgagcatgttgggcttgctgagtggtatctaaggaatctaattttggtgtcagaatttttaaaaacacactttttgtcttcaagaagaagcaatcttagactaatctggatgccttattggtagtgcgtatttggaaatcgagattcaagaccttcagtaaatgaggctttcacagagaagaaacaagattgttgaaacatcttcaccatgctgagtgcaaagactattccaaacttgttctcagattgatttttctacctaaggattaattttctgacagaatcactgacaagcctgatctttagaatattaaacctaggcaacctgtttgcttttttgtttgttttttaatgttttcaagtgaggtttaaaggtaggattcattctgggtgaaccaaatgcatcgaagcactttcaaatcaataggcagcttgatttctctgtattgcaaaacattatgccccctctaaattctcatcacaggcaacatggaaattaatgagacctttagattagcctttcaagctcagccttattttatagctttaccttgcctttttgacaccacgatctcgcctggccaccagcagcatttcatgttgcagtgcactttaattttgcagttttcttagtcttccttggaaactggcagcttattaatctcaataactgagctgctcaataggcaagctcaccaatgagagaccaggctgtgtcttttttttttcttggcagatggaaacaagggggttggttgttggatggaggcaagggaggtggcagagaaaaagctggttaggaggggcacctcatcccccacatcactttctgataattggcaggaaaataaagcaagcctagtctaatccactgctctgtaatttatggcttgtggtgttaaacacactcgaacccattaataagaaaataaataaagtgttgtggcacgtgtgcaaattacaaggtgcattaagaaagaaacaagcattacatcttattcaagaccactccagcctattcttggcatggtctgcaaacttggaagcatcctggaaagtggaggtacctaaggagaagctgtcctttttaaatttgcctgcctctacaaaattaaaaacttattgaggaattgaacttcttattgcagggtaccacagctaagtctctaggtagaaagaacttaaaaaaaagaaaaataaaaatccatccctcagcagcctttaccgtggggacccaattacaaattgagaccaccctgtggtcatgcattgtaagagcaagactttgccctgagtctgtgtaaatgtcgaagactctggggttaagttcacagttgaaaaaagccaaatatttccatctctgtctgtgctctttcacccattcaactaatatcaactgtcattcccttgaggcacttcctgaagtcttcccagaggatattttatctggctcagacagggagaaacttgatgaagcgcaagtcctttctaattctggctccctgatgatccttttcttttcgcagaagccagataaggcatccgcagtcctaccaggcaggggaagtaggtcctgcaacttttctgaaggcacctttgatttattagtcttggccttatttgcttttgtgagttggaatcttatgtccccagacttgcaaaccgtcacgagatactcagccattctgctcagctgcagctgcatcctttagattttatgggaatgtttaaaaaaacttttcctacattaggtttttttctttcaaaacccaccagacaatttggggccattctgtgagtattctttgcaaatactcctttgagaggtcatggcaaagcgctgcacaaaggatcaccctcaaaatcgtgtatttttcaaatcccttattgaatcatttcttgctcaaaataactgtttaggagtgaggaaatacctccaattgctgtcatttgtacttaagctgtgtatgccttatagttcaaaagagactgaataccaattcttttctatgtgttaaatggtactgaaatcagatttcaatttgctagagcttcaattgcgaaccagcattcatgagtccatttctcaacaattaatactcctgtaaaggtattgcacaccaataatacgacctttaaatttttattttattttttaattatttgaacaaagggttaaaatcccgccctaaagggaaggtgggaaatgttgctttacttaacactggtatgttcttagataagaattttcgatgatcttagtgactttcttatttcttatcaacgcagatcctctccactatacttggggacatgtaatgagaaggcacagggagctattaggcccactgaagcatttggtgggactctaaggagctctactctcccccatccccactctcaccaattcaggaaaatgaaggaataaatttacaagccccctgtgcaaggggcggtgctatgcacatgtgcattttctggatgttcttgtactcagtcatcttttccagcttctaactctcagaatccatacaaggagacattgtagttctattgacaatcttttcacttcttggaaaccacggaccactccttttggtctttgtttttagacataatcatctctgaaatgccgactttgtgcccagtaggatactaggcactttacatcatgttatctgaattaaagcccttaggggagagatgttgatagggtttggctgtgttgacacccaaatctcatcttgaattgtagctccaacaattcccacgtgttgtggtagggacctgctggtgggagttaatttaatcatgggggcgggtctttcccatgctcttctcgtggtagtgaataagtctcatgagatctgatggttttataagggggagtttccctacacaagcactctctttgcctgctgtcatccatgtgagacgtgacttgctcctccttgccttctgccatgactgtgaggcctcctcagccatgtggaactgtaagtccattaaacctctttctctttataaattacccagtctcgggtatgtctttattagcagcgtaagaacagaccaatacagatgttcttgtcccctttcaacatatcaggaaaatgaaacttgagaaagtggaggatttgggacagagagaagatcctgacagaacaggattcaagtaatacttaaactcaggctttgggagtctctcagccttgcacttctttactttctaccatcgctgttatgtaggcctcctcttgtgggatttttatggtaactatatgctatattctcaaagcttagaaacctaacagaaagtaaagcacttcttgacatttcaacaacactcccttgattgagtctcatggaatccaactagagtcacatgcccacaactgacccaagcctcaagcctggagtcttggcgagcagaccacattaattggccaggcctggatcacgtgcccatgtgggggcctcatagtggagaggaaggagtgtggcccataaccaaacatcgtgctattaggagaccctgaaatggagggctggcaggcaaaagccacagaccaactcaggccacattcaatgttaatttggtcacagcccagctcatattgcctgattgtaatgattttctcctccaggcagacacagtcccggccagggtggggaaattgcaggacattgagttatctcacttgccagagcacagaagggggtttacagctgattccaataagaagtcgaaaaaattaagtttcactgactaacttctgcccccttctgactcatcaccctctctggttgacttctcaaacgtcccacgactttacttttgagttcactgtggccacttaatgcattttaacttttattagtctcctgacatctcttttaagctatcatcttctttcctgcaaaagtgcttggattccacattttctaattaaaacatgctcatttattgtcttactaaccagtgctctttatgagggctcatgatgagaaagttaactcaaaacatctcgatgcatttcctctctcttggaaatggctggagaagcagttttgccttatcaagttgaatgacttcgaagaacttttggttttgctttttaataaaaccatgaatgggaaacatttaactccatgcttcaagctcctaatattctcagcaatgcagtatattctgtttgttgtggtgtgtgtaggtgagacagattgcaggggtcagatagctccataatgagtataggtaatatcagaatagttctgtgtttaattagataaaaatttttgtcctaacatgcaacacgtcctaatgttcataatggtgcccattgctgtttatactccagtgaattaatctgatattattagaggttgtaagcttcagtgcagcagggggtaagggtggcacacatgcatttaaacccaccgagaatttcaatataatcgtgtgtgtggtggcactggggtgggctgggaacaaggtagaaggcgcatattcagtatatgtctgcgtatactttgttttttcagtttcactactatttgctttgtctttggaaacataaaagcagtgttacaatggggacatcctcatgtcctgtcgataatgtgcatcttcaaattcataataccattcagtttggggaaaagagcgaagtatagcattcttcacagagcttaccccaaatagctaattcaggcagaaagggagagacagagatagagatagagatgatagagatagagacagagatagagataaagagagagagatggagatagagataaagggaggcagagagagagagagaaagaaaggggaaaaagggacctggtgatgcagatatggaaaaaaatagatgccctcttcagggaggtcggcccttgattctgaccactacattagaaaatattagaaggagtcaaggtcaacatgaattgggttggccaaaacaactgagcccagctggacgcggtgcctcacacctgtaatcccagaactttgggaggccgaggcaggtggatcacttgaggtcaggagttcaagaccagcctgacgaacatggtgaaacttcgtgtctattaaaaatactaaaattagccaggcgtggtggtgcacgcctataatcccagctacttgggaggctgaggcaggagaattgcttgaacctgggaggcgaaggttgcagtgagccaagatcgcgccactgcactccagcctgggtgacagagtgagactccatctaaaacaaacaaacaaacaaaacaaaacaaaacaaaacaaaaacaaaaaaaaccctgagccctgatcatttaagtgaaggggtcatcatttggctgcacagaggcagagttttcaaactggaaaccaagttaagatcacctagtatagtccaatgtctatttttacagacaaggagagtgaagctcagaaagttccacaacacgccagcgccttccactataaatgccggagtggggctggaaggcaggcctctggccagagctttccccagcacccctcactatttcctgcatgattagggaatgttggtgcctacttatcccacacagaatatttatctccatttccttctgcaaaggaaaggtcatgaatttaaggcaaagaattagagcacatattgcaacagcttttgtcttttcagttattttattgtagaatgtacacattctcttggtaaaatattcaacacatagacagaaaatggaaaggaatattccctgcttttcaatttccattttcaaggaaatttcatttgaaggttgattattttaggctttcaaaaatgcttgtggatgtctgagcatgtatattttaagtttaatataaatggaatcatatacatatcatttggcaacttcctttttatcacttaatcagatattgtggaagcattttcaggtaattttatgtagacttacctcattcttgtttaaagtccgtgtaatattccataatgctctaatttatttaaccagtctcttcttgatggacatttagatcgctttcagaattttgctattaaaaacaaatctgtaatgaaacatcttgtgtatatatctttctttgcatacttatataattatattcaaaagttaaattcctggaagtgaaattactagatcaaagggtatgtataatgtgcattttgaattttgatcgattgtgccaaattgtatctgtctccattcaaatgttacgatctctctttacttctccttatttgatggcctgagtttcttttgtggctttaaaataagagcccagaagtttatggtgttagatttcagacatagaattaagaggattttttttcaagtaataatgtaataaataatacataaataccctagaaatgccaatacctcttcttaatgccagatatagtatgagaaacagacatagctgcaggggaaaatctgactctctcactccccttggttctagctgtagggccctttctcttcattcccagactgtgctacagcatggcctacgtgattcaaaactcctaacctttgttgcctttcctttctcattattatttggcaatgtttgagtttgcctcttctcctcatccaccttgcctctatctacctaatggggatattataagaatgtctaaaaagacctagtcaagtttctgaatcccaagagaaatgcctagtaaggcggtatgattgtttaactattacagaaaagcattatgatcaagggcttgaaaatctggcgaggaagacagccttttttgtgaaataagtatgtgagggctctgtcagtaagaggccctcaggccaaacttatatagttactttatctgaaactctgattttatgctaactaaggatttttgtatttcccacctcctgttggtaatcccattaccagctgtgttcataggacttcagcttaattcagccaacatttgtaggggcccaacacgcagctgagcaccatggcacagagagtgaaagatcgaaaagacatggcccctgacctctgggaatcacagtctagtgggagaaaggtcacagagcagattatttatattgatataggatgttgtaagctggacatgagctcaggggactctacggaagcatggagcgtggagtgcatccaacctacctggtcagggaagcctggctggcagatacggggtctgagttccatctgggtggaacagtgagagctgccccagcaaaagggcattccaggcaaaggtgagagaataggaaaaggccggaagagcaaggctgtgccagcattctggaccaaccagagtgagactcaggaggcagggtagagaggtctcatggcccaagtcaaggtcaccttctgggtgcagtcaagcactctaaggtctattcagtgtgggatggggagcccaaaagggatgtacacaaaggcatgttacggttagatttgccatgaagaggtggaaagggaggatacaccagaaagggaggaaactaaaagtacattgaagttaaccagtgcctctgatggaagaaggaagggagaaagggagggagggagggagggaggaaggaaggaaggagaaggaaggaagggaggaaaggagggagggagggaggaaggaaggaaggaagggaaggaaggaagggaggaaaggagggaggaaggaaggaaggaaggaaggaagggaaggaaggaagggaggaaaggagggagggagggaggaaggaaggaaggaagggagaaagggagggagggagggagggagggaggaaggaaggaaggaagggaaggaaggaagggaggaaaggagggaggaaggaaggaaggaaggaaggaagggaaggaaggaagggaggaaaggagggaggaaggaaggaaggaaggaaggaagggaaggaaggaagggaggaaaggagggagaaggaaagaaggaaggagggaggaaggaaggaaggaaaaagggagggaggggtggaggaaggagggaagaaagaaggaaggaaaggggaactagaaggaaagagatacatacttaaagtaggcagtctatgggattcattgataattatctgcataacagtaatagccaacatttattgaggatccactcaatgtcaggtgtgtgctgagccactcatttaatagacacaatattcctaagaaatactttccatcattttcactattttcatatgaggaaacgaagatgtaataataacaagtcatttgccttaggctgcacaggttaaaggtgaggcaaccaggctctgaccccacctgctgccgacagtttccttattaaccatcgccccatccagcctcctagaatcagcagggctgtcccaacctgaccgactgtgaccctgaacttccctcttcttccttgcttctcctctctatcacttctcttccccctccttcctcacttccctccacagaaatgcagacattgctttgtttttcacataaccacttaatttcttgtcaagcaaaacttgagagccagaaaggatcccagttcaagtccaagccttcaagatgtctggaaaggcagcctccccactaccagacttgcctttaggttttgtttaattctgccacttgcaaagcaaatgcctgaaggcgggcacctgccttttagtctaacatgccacctccctgtcaggcaaatttcaatttaccatgcctcggcttgtccaactgtatctgcatcaatacttccaagatggcagtgacaagcttttcaggtacttaaggcaaacctgcatgacagttttccttgacacttgcatttttaaaaagccttgcctggggccctaggaaacccagcatttaagaaactaggaagctttcaaggaagcccagctttcagaacctgctgccctgggacttgttttgtgatagggatgctgcagggtctgccttagagtatattaagtgccatggcgatatttatgtgttgatgctaaatgatggttacctttcttagtggcatttttttttttttgacgactgaaatatatagatctgttttgtgcattgtcagtgggtatgtgtctggcctacaaacacacttaaatggcacacttctgcacaacattcctgagtgtccaacagatatatgtaggcaggcagacatgtcacaggggttgccataaagcttagttaatatccctgaagagctcttgtgtcatttcatgaagagttctaaataagaagaaaatattgtacctatggctattacacaaacaaagaaatgtgagtaaatatgcagatagggtttcttctgtttgctcatgcctcaaagagtctgatgtaaattcaaatgggaaaatagatagtaatagagatcactactgtttatttgagggttaaaaaaaaaaaaagcaacagtgccccaaacttaaatgcttgaaattgctatacacagttgatgtgagaggagcaaatctataataagcaaaaaggagtggcagctttctttttcttttgttttctttcacctctgccagcccctacatttagaattgttttgatgacttaagaattgtcagtagctatacaagaattcggataaatcaattttgttttccttcctcggccttgaagaaatcacatatgatacttagtctgtcccctttaatttttacaccatttatataccttcctctttctcttctttccttccttccttcatccatctacccagcaaatgcatcttgagcacctatgaaaataaccattatgggttttttggttggttggttgttttttcacttctttctgggccttaggatactgatctagaaacagagagaaatgaattagaacttcatttctcaaatgagagatgctgtggaataccagttttacggctgagaagaagggtatatatatataaagctcacaaaaataagtggaataataaatagtgtagagtactgggatatttatgatatttaagtattaggtttgtgaagacctgcagtaatgtttactccatttcccaaatatcatggaaccctctctgtatctaacattagtaatatacaaatatacttggtgatccaaaaagcacattttaagatgttgtatttcagatcctctctgatcttatgacagaagtagaaaggccagaattttttcaatcccttactaggaaggactttgtgatcttgccttctaaaataaaatagaatttttctcttagcataaacttttaaaatgaatttatacccaaactcaattatcaagtcaggcaatatttgggcttggtacataagtactgtttataatacagtgcttagagtgtaggctaacaataaaaacttttgtttaaaaatttcatggatatcattgggtatatacccaaatgaatataaattattctactgtaaagatgcgtgcatgtgtatgttcattgcagcactattcacaatagtgaagatatggaatcaactaaatgcccatcaatggtagactagataaagaagatgtggtacatatacaccatggaatactatgcagccataaaaaatgagatcatgtcttttgtgggaacatggatggagctagagaccattatccttagcaaactaacacaggaacagaaaaccaaataccacatgtttttaattataagtgggagctaaatgatgagatgagaacacatggacacaaaaagggaagcaacagacactgggtcctacttgagggtggagggtgggagaagagagaggatcagaagaaaaaattcctattgggtacaatgcttagaacctgggtgacaaaataacctgtacaccaaacccccatgacacgagtttatctatataacaaacctacacatgtacccctcaaccttaaataaaagtttaaaggaaaaaagaaaagtatgtctatcacatattaaaataagacgagtgattatataaaaaattgaagaacttaaactgatgcatgagttcttctaaatactttatataatacatcaaataaaatagaaaaaaatgtcatggatcgatagctttcctagaatataaaccccactaggctctccctgaaagctctttcctgaaatgagagcctgctgacttggggatgttaagacattttctaaggtatgaaatattttggctctttctactactgctgccacctggctccttggtgatgcttcttgttttgtaattcattaacagttttcaaaaacaagctcaggatatggataggatgcagagagactggcaaaatgcttactgtcaaccagaatttgagcttcctgaagagttcaatgttgattatcattttctacatttagaaaacatttagaggtttctcaaaaagttaaccattttatgaccatattatgtagttgggatgtttgtcctctccatgtcccatgttggaatgtgatccccaatgttggaggcgggccctggtgggaggtgtttgggtcatgggggtggatctctcatgatcaacttggtgccttcctcccggtaatgaataagtttttgctctattagttcctgcaagatctgatcatttcaaaagagcctggtacctcctgctctctttctacctctcttgccatgtgatgccagctccccttcccctctgccatgattggaagcttcctgaggtccttaccagaagcatatgctgatgcattgcttcttttacagcctgcagaatcaggagccaaataaacaccttttctttgtaaattacccagtctcagggtctccttaatagcaacacaaagtgtactgaggcacctctatgatgcagcaattcctctcctagggagatcccccaaagctttcaaagcaggtgctcagacagacattttcacaccagtgtttgtagcagtactatttacaatagtcaaaaggtggaaacaacccaaacgttcatcaatggatgaatgaataaagaaaaagtgtacacacacactcacacaaaaggaaatagtattccaaaagggaatgaagtgctgatacatgctacaatggggatgaacttgaaaacattatgctaagtgaaaagaagccagacacaaaaggtcacatattgtatgagtccatttatctgacatatccagaataggcaaattcatagagacagaaaccaaattagtggttgccaggagctgggagtgagagagtgaaggaatggcgagttactgtttaatagattttggggggaatttgaggttttttggggggtgatgaaaatgttttggaacttaaatagaggcagaatttaaacatcgtgaatgctctaaatgccactgaattgtgcaattagaaatggttaattttgtatcatgtgaattttacctcaacttttataaataaattaattaattagagaaaatagccggaggatcagcgtgtcaccctctgtataaaacgtctactcaagggagagacaacaagatagttaggctagagaaccagtctcttgctccagtcttctcctagaaaggtgccaggaaaaaaaatgtctgttctcaaaacattccttgaaagggttaaagtcacaacacaaaatacccagtacatgtgatttgattaatagtggtaaatggatctgagtgtgtaatatgttgacatctgaaagactgtcaacaggatccccattcaacatcagggtaaatgcaactcttcagacagatgtcttgaagcaccaaagataaggaaataaagaaaggtgcaccaggcaggactcctttgttacacaggtagggggaaaagagaatgctaaatggattcttctctaggtggagggggatcaacataggatttttccaagattaaaaccattctatcatattctattaaaagtgatttagaagagaaaaatgcaccatgaaatctccatgtttgcagagataccaaacctaggaagataaactgctctgtaggtgggcagagaggtgacagataaggatcacgtacatttaccaaaaattcttctagacttataggaagattatctctgaggtcccagttacaaactgggaactggccaggtgattcgtgtgaagtaatgcctgaagatatacatccactgggttgctgtgggaagaaagaaggggatagggctgcaaaatacagagcatccctatagaaactcttagaaattaatcaaaaatgcattatcccacgattttccaaaatcattaggtatctacagtggaaataatcatgattatagctgatatccctcaagaatgacagaaaacttgaggagaattccaatctaaaagatcaataaaatgaagaggctctcacaaaacacaccaaagtgctcctttgaatagaaggaagatgacttcacaacagattttaaaaaataaccgtgtgtaggaataatacgaacatgatgttgtttatcgaaatcttgaaaaccagagtgacgggattccttgaaaaggacactaccgggaaaataaataaaagtgttgcatctgagagcagagagaaactttttacattcatcacctcctacaggcagtatgagatgatctttcaagatcttttcaagctctatattggttcatgcctttattcattaaataaaaattgttggaacaccaaacctgggctgggcattcttccaggggctggagatacaatggtgaggaagaagatgaaatcctggccctcctggaatgtgcatgccattgggaaaggcatgtgacaaacaaggaatgaaggagatagctgcccaaggtgatgcatgttaaatgagatatctcaatgaagggtgagggaaatgggcctttgtattccacccccatctctggatgttgactgttctcagctgtaaccttggacaaggtaggatgcaagatgctacgatgggaaaggctgatcaagaaatcctttctgaggaagtgagctttgaggagagacttgaaagacctgagaaagaggagccatgcaatgagaagacagaaagagaggaggagagaagtttccagactgagggaaacacagtgtgaccacctggacatggggaggagcttggcctctttaaggaacagcaaagaggatggcaggtgccttaggagcagagcacggagaggttaggaagagatgacctcgaccatcacaagacgccttataggccatgatgcagagcaggataacttctaagtgtaaaggaatgggaagatttgaaatatgttttgatttatgtttgtaggaaatgactgactcctgtggggagaaggggtgtaatgggtaaagtggaaagagggagacctctttaaagattgctgtgtgcagcaggccaggcgcaagatgatgtagaggtgtgagtggtaagaaaaggaaggggatgtgttggaggcaaagaggaaatcaactgatgatggattgggtgtgagagaaggacaggaaccatggtgaagcctagtgaagtagatggcatggtgcccacccagatgtcacccttcaggactggagcaggtgtccttccagttgctggtaatgttggcagccaacagagctcagccaagtccctccctgagattggccttcagcagaagagatccacgtcttccaaggacctttctctgggaacagctcacatccagtgactggtccgagtaaggatatgaaggcccagcctcctttgccctaactggaacaactcagcagagccatccctgctccagagctttccatggaatcgccataggcccctctgccacagcatcacagttcagctccccgccatccccacccagggcagtctgcttcattcacttcctcacacatggtcttcccaagagcactttctaatacacttcctgcatgcaatatcttcccattcctagggatggctcctgcacaactggagaagtgatgacatctgtaactgatataggtgaagcctggaagagaagagaagcttggagtggaaatcaaaagttgtgttttggtcatgctaaacttgagatgcctaactatatccaaatgtagatagggtaataggtgtaatattgtgggctggctagaatattctggacaaaaaccaaaaccctcaaggcagaggtataagaagacagctgagctctttcatcacaaaggcctgtgctgaattccccatgagtctctcctaccctagtaatttttcagatagaatgctcctaaatgtgctttgctaactcaaagagatggcatagttagaacccttcgtacttggtctaaaatccagatccccttggccaggcatggtggctcatgcctttaatgccagcactttgggacggcagatcacctgaggtcaggagttcaagaccagctttgccaacatggcaaaacttcgtctctactaaaaatacaaaaattaggcaggcgtggtggcgtgcacctgtaatcccagctactagggaggctgaggcaggagaattgcttgaacctgggaggcggaggttgccatgagctgacatcacaccactgcactccagcctgggcaacaagagtgaagctctgtttcagaccaaaaaaaaaaaaaaaagaaaaaagaaaaaaagaaaatccagatcccatgccttcaagccatggttactggctaccttttcttcctgccactggcccggaacacactgcccttctttcacatcctcaaaaattccgtctttcccaccccagggactttgcacaggctgctcctgctgcctgggatgctcttttttaccattcttcatatggtcagttacttcttatcctcagacttctcctcaatcccatggtgcttctgacattttgaaagtatttcatgtatttattgtttacctggatgtgagttctgtttatttgttctgtctctccaattggaaatttcctatgaggataagaacttactcatcaatgcatccaagcatctagtaccatgtgatatatattccatgctcaataaatactggctgggcagtgatttcatatttgagatattgtgttcattgcagaggtggaggcaatgcagtacatacatatattaaacacttcctgtgggcccgcttctgtgttctcggattgtattcctgttctttttcagcccttccaatagttctgggatgtaaatattgctattgtctctatttttttagaggaggcatctgaggaccagggagaatacctagctttccccacatcatgcagctcctggaggagttgagatttgagtccaggtgcacctggctccaagcccattcattttcccctctaccataattagtgaattccttcagcagactttttgagcacctactatgaagagggaagggtaccagaaagcaaaagagagagagcctgactttgtaatttgacttaagaaacaagacaaaaacaaatgtaatcacatgaagcagaataacctagagggtccttccagcttgaacactgtctaactgtctgaatggtccagacactaaatgcaatgggagaaattatcctgctccttggctgtgtctgagggtgtgcattttttcttcatctacctctacctgccggtgaacacaaatttaagtccattcgaaatggctgtctggacactcccatatgatagtgcatagcgaattcaaggtcaaatctaaagtcaaagtcagacgtctttgtttttcttcccctactatatcaagactcttaccaattaacttgaaaaaagtcaccaagttaacaactccagagggggaaaaagaagaagaaaaaaaaaaaagactcttcatctcatccaaagactctgaaatggatttgctcacaaaacaccaggtttctttaatgacctcgagagaccttgcctgtcacactgagcagtatatcatttcatggaggaaaaaaaaagttttaccatgaaaaatgctatgttgtatcacagtgtgacactatttaaatatcaagagtcgaagcttctatttagaaaacggaaggcaataaattgagttgctaattattccagctgtgaatatttttggtacggctgcaaattttgaagagggcaaaatagaggattttcctgttgttcacggcatatgcaaatgtagtggcagtcccctatgagccgaaaggttcagggatgagaaaccttgaaagcctatttttttcctgaatcaaacgggcttgagtcgaagcttagggaactatgatataaaatggacttttgactacactaattgggttattggcttcttgtttttcaaacctgagaagtaacgattttaaaaactgtaagtcctattttaaaggaaacaattcacttctcaacctaagcataaattctcaactggaagaagagaagaagcacattagtaacatccctagtcccttctcttcctaggggacagtgagtggaggtgcctgcaattctccaatcaccaggctaattagaacgactcattcattcaacacatattttaaatcagctgggcactatgctcggtcaaggagatttagtaatggctaaaatatactatacacggctcctgccctcaagccattaatatctgcatttattgaccattcactggatgtcaatctcaatgctaagcatttcacgaataaactcacccaatccccctaacaagcccaagaagtagctactatcattctcagcctcctagcaaggttaagtaacttgcccaagatcacacagtgataaatatagaagccaggatgcaaaccctggttgtctcagtctaggatttgcagacttaaaactgccttctaggtaccatcctattggatttcttaaataattaaatgaataataatcatgatgatgacaatgaggaaatgtttctatgtagaaaaagaaggctgactacaaacatcagatgtttaccagtctatctctaaagtacaggagatgtttactttctatttttaaaatgtatatacttgacccagtgcagtggctcatgcccgtaattctagcactttgggagactgaggatggtggatcacgaggtcaggagtttgagaccagcctagccaacatggtgaaaccccgtctctactaaaaatacaaaaattagcctggcgtggtggcacatgcttgtaaccccagctacttgggaggctgaggcaggagactcacttgaactgggaggtggaggttgcagtgagtggagatcaagccactgcactccagcctggacaacaaagcaagactttgtcttgggggaaaaaaaaattatatgcttgttttttttgtaatgtgtgcatgttatatttgcaaacaggaaaataaagacagaacgcttaagcgatcacctagttttgctactcaagtagggctcagtggtgcagtatccatcatttttctcgttatctcttttttcacctcatcctctatgcttctctccttctgtttttgctttctctccacgttccatgtctctgtctctgtctgtctcaggaccctgccccttgaattttgcctcaaccagcaccattccttttcatatcggagagtatattaatggtgccagaaagggtggtggttatttaacctctctccagctaaatgtttcattataactcctgaaaacctaattacagtaactttacatgctacagtaccctttatgggctgcctctttattaaacttactcttttagagacaataaacctgatgcttcaaagtgcatggccagaaccagtgaaatgtaatgaaatctggagttctctagtgcacacctgatctccctcactgagcaccacagccccattcctggggtgtttctgcctctatccttcccctagcttttgatcaaatttcagacactgcttgtatgatagtctgaatattttagggattaatgggctgtgtatcaatgttttcatccgctcctctgaatacccatgagtttatttactggggaggtcaattttctcggtagaacaacagtcgacacctggtttccctgataaccagagttgcttttttgcacacagcgctacgttgagaccatttaagacttttgctgtatttcaaaaacgtttgctgccgcagacttcgtgagcaaagaacaacatgtcagtctgctctgttagtcattagttgtcctggttagctgagtggtacactgtgatgagattgtgggatacggggtgagagagagagaggaagagagaaacaggaaaaaaggcattgacctttggagttgaggcagcacaattatttgtatagtacatttcttttcacagccctgctaggattttcccctgggaataaagccaaaacaacagaaaataaggggatccccctggttgcaagctgcaaaatggtacttagtgttaaggaattttatgtatttgtttgtttgtttctttggtgggatttaaggttaatgactaagtttacttgtgattgactcagagaaaagggaaaaacaagaaaaagaaaagaaatcttttgttggagcctcaggtagcttagccagcctccgcttctcaaagctaccactctagattagtcaagctccttctgtatcataagaataaaataaaaattcacagccttttgaattggtgggggctcttgttgcatggatgttatgaatgaggtttttttgtttgttaggtttctttttaaaatctttcatggttgtttaatcagagacaatgcatgcccttaattttctaagccaatttgaagcagaagcctggttaaccaagattctgcctgaaatccatgtctttgctgtcacgtaaaggatacaggagaatggctgttcagcttttaggtatgcttctcagtttttattaaatggttttgttttcacatgaggaaaagtgatgacatttaccaaaaaggttgatagtttagggtgaagtgatgatccctgtattcttaagaagtcacaggaatgcaggacacagagctgagaacgcagaacctttgccttactattccatcccaagcccctaacctgtgcctgacagaatgctgggtgctgtgaccaaagctcccatcccccgcatgacatgactgggaagggaaagaagtgtgtgagctcctcttttattttttgtaagacatcaaggactggttttctccatctcttggagtgttagcaaactccaaggatggcactttgggggcccctcatttgcctttcctttcggaggcacaagtggccaattctgagagcaattgagttgtgcttgaaaaacgtcaagtgcatttggaaactacacatttttgctgatgcctggagtcccgagctgagctacttccatgaccgaccgctgggaagaagttcagttggggcatcacaaatgattcatctgaacacactgagcaggcctctgaaggggagaagctgtcttaacagccggttcagggaaaaatcaggagaagtcccctaagccctcttggtcctccctgtgaccatctggccaaaccattaccttgtgggtcttgcttcattttatttgattttccagcagcatgtgactgaaatccttgggtgaatcaaagcttgaggttttttcaactttttgttatgaaaaatttcaaacatacaaaaaacttggaagaatagtaccatgtaagaataaccacctggtttcaacgattgctatcattttgccacatttgccttatctgtttttatagagcttgagagatgagatctttttgctgaatcttttgaaatgaagttgcagacttcatgaaacttcacctaaagacgcccacatccaaagcttacattaaaaaatatatatctactaacaatctggtatgtcctcttcaagtaagatgcatttggaagggcataaaagtgattcaggtagaatttcttaaatgttaatgtacactagaatcagctagggagcttcttcgcttcctttttttttttttagttggagtttccttcttgttgcccaggctggagcgcaatggcacggtctcagctcactgcaacctctgcctcctgggttcaagtgattctcctgcctctgcctcccaagtaggtgggattacaggtgcccaccaccacacctggctactttttttgtatttttaatagagatggggtttggccaggctggtctcgaacccctgacctcaaatgattcgcctgcctcggcctcccaaagtcctgggattacaggcatgagccaccatgcccagccactagggagcttcttaatcgatatactcccagactccaccccatacctggatagggcccaggattttgtactgtttttaacactgagtgccgcgttaaaaacagtacaaattcctgggaccaggcgatcacttgagtgctgtgttaaaaacagtacaaattccaggtattcatgggacacagtctgaagatcacttctatcgaatctttctctttttgtttgctgaatttaatcttctaaagattagtgacaccagggtgtaactgtatcatgggagaaataggattctacttatcgttggttttttgtttaatcattttaaaccccagagactagaaggaagggaggtgataactaaatgggtttctttcagctgcaatcatcacagacaccacagtgccaatgagcggcctgagagctacatcctgcgagggtttatgcagtgctgaaaagcatgcaggttgttttttctgtggagggatctggccttgcatgtgtaaatatagactcttgcctgcatgtacatatgcaaacttgtaaatctgtttggcaaacaggcatcaacacggcaggaggagcctattttaaaattaaaaatgttcacagcactattcttttagcattcattattttggtcttggaaaaggttgtaagttatttatttaacaacgatttgttgagttcccccactgtaagccaggctctattttaggtgacaggatgcggcgtgaacaaaataattattttaaactttattgaaattcagttctaacgatggggacagacaataagtaatatgcaaatatacatatgcatttaatgaagaaaaataggcagttatgacagggcagagagtaacagaaattgaaggggcccaggaagatctctctgaaaaagtgctatgagagcagagattgaaggaacaagttgtgcagatatttccaggcagaaggaacagtaagtgcaaaggcccggaggcaagaagatgtgatatgatgggcaatagcaaaaggataatatgatggatggagtgagggaggacaacagaggtggaagcttcagtgggagaggtagccagagggcagatcatgcagagagttgaaggccatgagaaagacacctgattttattctcaatattattagaagcctttgtcagggagaaagggcgctttgtttgatgacatgtgacctaagctgactttatttttagaagaaagtgtagaaaatggactaaattgtcaagggaacatttttaggatttcacgaagcagtgccatatgcaagatataatcatatccatttttcgtataaatgagtgtattaaaaataacattaaagccaatttaaacttcttatctttaccgtgttgctctcatgttgctaaaacatttctattttcaagttatttattctgtccacaaatatgactgatgtccaggcactaatgtttcgactctggagataacaggagtaaggaatatctaccagttcaagtgtccaggagttcacattctggttggggatagacacatttaaaataattatatatagaaagagattaataacaccaggatataactgtatcatgggagaaataagattctatttataaatagaatgtagatagatagatagaagatagagaaagagagagagagagagagagagagagagagagatagatagatttgtgagtgcacaaaatgaagggggctgtgttagaatagattccccaggtaggtggttggaaggtggataggagttagctaggatgggttaggtgggacagagaagaaaaagccatttgattcaattgaacgggcttgttaagacaaagtgtgtctttttgtgtggctgaagcgtgagtgcataggagctgggagcactgattagaaacaagggtcaaaaaatgggtagagagccatggttccatgttgtagagagcttggttccatgttgaaacttaggtctcatctttcaggcatggaaggataaccacggatttgcaagccagagcacactggcactgtggcttgggaaggaaaaggcaggaaggctaaaggacggggttggtgggtaaggttttcagaaatgaaattgttgggattcattaagctattggatggggaaaggcaagggaaaaggaggaagttccttgggtaactgggagtaaaggaagtccaggaggggtggagttgggcatgtaaaggaatatagtctgagtttggttgtgacttgttccagacagctgtgaaatgtagaagacaagctgcccaatgcacaacgggatgtgggtcaggagctaaggagtcatgagctagatagaaatggagctttggagactccagacccatcagtggtggctgaagacctagaaattggcaagatcactgaggatgcgagaactggagttcaaatgttttcactcattagtgactccttacaatgcctttacgttcctttgttttcatttgatttcctattttcactactcactctgggagaatcatttaagaaataaattcggaggactcctaaatcaaattccgaggtttctctgtcaccctggctttctgctgtggatatgttctagcgttgttataaggcagcagactattatttagtgacttagagaactcttcaggtgtttgttcaacatttgtcaagctttaaattaaaatctgcatttcaggctccttatgtagctctgaagaattaataataaaagctactcacatgggctgacacttactatgggacacaccttggttaagttcttttgctacgtaatcctgcatgatattgtaggattagtgatgcttttcctacacagtgttgcaatcctcacagcaagcagttatgaggtacctgtacttttattacctctgttttacaaatgaagagatggaggttctcaaaagcagtgtcaggtacttgtcagaaatggcacgaccaggactaccaaggtctgtcttgtgctacaatgctgtcatgaacaccatgcctagcttcctcttccaaaacaccattttaaaatggagcattaaaaaagagccattggacaaggagtccaaagccttatttatggaatcaaacttctaggctttattttaacattagctgtgttaaataattcactaatcagatactcattttctgacatgattgtcagtcatattgggtttgtttgatctctgtgaaggattaaaatactttcaaggttttatctgcaaacagccaagatacaaatatttgtaatgatagcaatcctgccttagaagcccactgggaaagcctgctagcccccagaggcaaggcagtgtggtgtagtaggtctgattagagcttccaaagggtctaactggatgtaaataaaaaaattttttaagtcaggcagactggagcttgagccctaatgacccgcttgccaactcccagcgtcagttttctcatctgtaaaactgaggtaataatagtacccacctggtgggattaatgtgaggtttagttgcaagtaaaacattcagcattgtaactgacacattgtgagtggtcaataaactaagtagcacctactgaagacatcaagagaaaggaaataactgtagtaacattttgaaaccttagaattgcagctgagtaaaattgcaagacaatgagaggacttcattcattcactcattcattcactaaaatccccctctgcatgttgggcttgatgtgggtactgggaacataggacgaacaaggtacaaaataagacatagtccatggcctccagctgctcagattctagcatttacttaactcctgccttaaatcccactacacatttcctggaagacaagtcatcgttttaaacaaggtctagcaagtcacatttgaagtcttgtaagtggcatgtataagaaagaatcatcagagaattaatggtccttccttaaagtgcccttggagcgacagactcccgaccctgaggaggagctatatcctcttctacactgcctgttctactgtatggttctgctgtgtggttgtcacaccacagctctggctaacacggacaccttattcaattgataggcaaagatgattccaaagaaataatcatgatcacatgaccttggagaaggcatctcagaacaggaatcaggatttcacgggaggtgaaaacggaacaagggtcagagacagtgtagggtaaaatgtcagtacacaggttttatcgaaagacagagctctgggtttcagtcctcagacagttgcttggcttctcaaaggctaatatctccaatctaaaatggagagattctgccataaaaatggaatgaaataatggcttttgcagcaacttggatggagctggaggccattgttctaagtgaagtaactcaggaacggaaaaccaaacatcatatgttctcacttataagtgggagctaagctatgaggatgcaaaggcataagaataatataataaactttggggacttggaaggaacggtggagggggcgaggaataaaagactacatattaggtatagtggacactgctctgatgacaggtggaccaaaatctcagaaatcaccactaaagaacttgttcatgtaatcagaaaacacctgtacccccaaaactattgaaattaaaaaaaagaatatatctggattacagaaagaaaaaattaaaaattttaaaaaataatgaaatgaaatcgagatattaaaatatttagtttgtaaatagttgtgacaatacatttcaagtacctttcaatagtaggtatctagctctatccatgttcctgcaaaggacaccatctcattattttcatggttgcataatattccacggtgtatgtatagcacattatctttacctgggtgacaaaataatctgtacatcaaatgccagtgacacgagtatacctatataacaaactgcacatgtaccatgaacccaaaataaaagtttttttaaaaaatagtaggtatctaatatgtgataacacttagcatcctcaacctcatcatctctgaggaggtgacagtcattcagtttccatatttgctttgaatgctttgcaggttgttgtggaagataacaactagatgcatatgtgaaaggagcaaattatgcacatttatggaattaatttatgtcatcatcgaatgtaatgttcgccccttcttccactccagggtaagcttagttaactaggattatgctaggactagatagagcagagtggaagaaaaatagctaaatgttgctccttggctacccatgaccactctgactctttcccttttcctggcaggcacttcctcttcaagacctcctcggggagcacacccttgttcagcagctcttccccgggataccctttgacctcaggaacggtttacacgcccccgccccgcctgctgcccaggaatactttctccaggaaggctttcaagctgaagaagccctccaaatactgcagctggaaatgtgctgccctctccgccattgccgcggccctcctcttggctattttgctggcgtatttcataggtaagtcagggcagccttattcagcaacgctggggatgacaacatgaggggagaggccatggacttgtgaatctagaggccctctgatgtctgtacagtttgcttctttgctcctgaaagatgtgataatgagtgatggatggaggtgattttttccctcctgaaatccacttaaatctgatgagtttctccttcatgtttctaaatgacatccatcagaagggaaattaagcatccttactatatcctttcttggagatgagctgagacttttcattcccgcaaacctatccctcactctcagagtggccttctagttttctccatccttggattttaacccaggtctgtgctttgaaatgtatgcaacattggttaacttcagccaaaaactgaattgaagaatagtggttggcatgtctgagaacatcttgattcgagagaaagccaaagtagctagcttattttcagagctgtggaacagaaacaggactgacaggctggagcatccatccaggtctttatacagaatcgaattagccagacacacttggccttgcccatatcccttccacagcctctgtcttctcatcctcaactctctcctcaccatggacagctgaatctgaatcagggtcacctctcctggcaactgggcttctggtgactcagtgtatgacataggtgaagttgctggagtatctttctctgcatgccaaaggtgttggtttacagccatagggtgtagccgtgtcaccacagaaagtggcagatgctgagcgcccaggggcagggtgccacgtgcataagagcttctcaggctgcacacaaagcctgctcacagctcctggccccaacaaagagccccaaggctgctgctctgtcagttaagcctgccaaaggcagatctcctggcttaggaagaggccatggtgatgtttgttaaagtttatttgaaacacttgatgcttgtggcttggtttcagggcagctatgagagacctgcccagtttggctgtgccatgttgcaaagcaaacccataaagcaccagctcaatgaagctgactccaaaacagttcccaacacgtatgctgaaactcctcccatttaagagaaaagaaaaggcaaccctgactgtgttggccttgccccttccctcaacataaaccctcccttctcgctcagcactgggggctcccacacttccttcatccccaggcagcaagcatggtatctgccaaagaaggaactggcccagcgcttcccagaccattctcctaagcttgcctgatggcaaaggggcatgactgtgcacccccacagatctggggccctgcctaaggcagaccaatatgagccaacaattgacataaatttttcagcttcttccacactatagctgttcttgtcttaatatggaaaaataagcatttatattccttaccagttgcatttctcaggaatgccctcccaaagtgagaaaactgactctccagggaaaggtgccgtgttcatctggggctttgcagaagtgtagcttgcactctaaaccacagctgtacacgggaactgaggcctgagacccaagcacccctaatttcgagtcatgtctgcttctcacttacctcttgatgaaggatgaagtaatggattgacctcagaaaggcggaaggatatctgttgcccctctgaatctcttgagtacatcttagtgtgttgctaaagtagctttgtgtgcttctgcaggtggctgttcagggggctccgtggaagcaaattgaatgtgccttcggggtcttttcatgatttggttttgtgtcagaaacttcagaaggggttcctgtgctcacttctcaggcttaatgttctgcggggccagtgagcaccacggggccagtgagcaccacggggagcccagatacagaaattgaggtactgcctgcctctgccaataccgtcccagtgcgccttctactctacttccaggagagagacagatggctcctgcctgatttatggggcttgatagttaaagtagaatagcttcctgtaagggcagtcatatacatgggaaaccgtatagtgagagtttaatgttttaatcaggtatgtaacttgtaaatgatagattaggaaatatatttattttcaatctgcaggctgctagaagctggacctgagcatcttagcatcgtttattagttcataatccatcatttcctattatgtattctttaggtaagattatgctttgaccctagagtatcaaaaaatagtttatgacacaaaatgagtgatataatgggccaatttaccctgcagtgatggcagtgagcatgcagctatagggctactctcagccactctcccgaggtgaccgcaggtctgcaagcgtggtaaggggtcaggatctgaagtgctgatcttggccccagttattcctttctccttagccttgacaaacttgtttgccttctgggtcttggtttcctaagtacaacatgggggcaggatggttatttacgtgcagaaactcagaagtatggtgaggattaattaatgtgtataaatcactttgaagatgaaaagcagtatattattacttacagagctgcaggggcataaacagtgcattgcaaacacagagaaaagtgccttttggagaaccaatgattgtgcccacctgggaaacaagccatcagggaagggcagaaagacaacatgaaaaccgaggccctcctgttaaggagaccggcgcttttaagggctgagtccattctggttcacacatgactctgcattccactagaacatgacaggtcctgaaattgatgcatcagccccaggacctttatgggcaggcagtgggttcaggcctgccaggcaccgtgacaaataagtcaaattatcatccttgcgtgttcaaacccgaagaaagaagactttccagaaatgagcagtttggacattgctcggccccctgacaagttcttccatagatccaggcccgtgggcgggtgtaaaagcagaatgccagccctgtgcaaactagatgacccaggtctttacgagctcagcagagatgcccagttcctacccacacagctggggtcagagaacttttatgatctgctcctccatcagaccctctctgtgccaaattctctcagcgtacaaacatcctggaataaattactctggaaagctgaataaaccaccaggggaccactttgtgcatcactcaggccctggcacaaacaattcctagggaatactggtttaggagaatttttctgtgaaatgcaagagactttcctctcaggaaggtgtctttcttcttcaggcagctcaggtactttcattacctgcaccaccagaagtccctaagtttctgaatcatgtaaccaaagtattttattaccaacctcacctattttagacaagatgtattgtgttatcttgatagtatgcataacaatcactagttagaaccttctacctgtttagaactagaagcatttccatttgaatcactttttgtttgtttgtttgtttgtttgtttttgagacagagcctcactccattgtccaggtgcccaggctggagtgcagtagcatgatctcggctcactgcaacctctgcctcccgggttcaagtgattctcgtgcctcagcctcccaagtagctgagattacagacctgcaccaccacacccggctaatttttgtgtttttagtagagacagggttttgccatgttggccaggctgctctcaaactcctggcctcaagtcatctacccacctcagcctcccaaagtgctagaattacagccatgagccaccacacccagcccatttgaagcacttttatacaactattcaatttgaatcatatccccagtcgtcaaccaacactctagcagaaaataaaatctgcatattacaatcatttgacaagcactgacaccgaggcccagagagtctaaagtctcctggcctaggtagatagttgcagggcgagcactaggcccttggtctcttgatgtctccttgaaggtctttctcttcacttctttctcctcaagattgcagttaaccagtttctcacatactgtatgaaactgaaataaatgatcccgttgatagcattaactcaccttatctagctctatcctctttagcaaggtagagtagttggttcctgcttcctgaatcatcttctaacgcagtggatagaaactatagcccctccgcagtattataatcagtcctcatatttctgctttccagttgtcttgtgttatagaggtcagcaaacattttctgcaaaaagttggagactaaatatttttggttcatgtgctacttagtgacagctggttaactctgctgttgtaagttaaaaacagccatagacggtgtgtaaatgaacaggtatggctgtgcacccataaaattttaattatgccccctggttttttagtttaatgtaatttttatgtgttatgaaatattattttctttttaaaaaatttcagccattagaatgtaaacccattgtttagattatgtgccatgcaaaaacaggtggcagcctggatttggtccgcaggccatagtttgtcaacccttgtttgattacattacagcttatttcctaagaatacctttcaggttgtccacatctctattacaaaaaattgcttcccaactggctaagagtccaaccatatgtccactgtcaatgaagcaggtgactgacattttctgatactgcaactccatttcacaatgagtaattgcatctgactttctggcccaaaccaaaaagtagaaaaagcaagtcacttttctctttaaatactttctataggataaatttttccaaggaaaattttaggaattttaggacacttcatcatgaaagcatagcttttaactagactgcttgaaacagtgctccaatccatggatagagtggaattgcctggccattttgcctagtactcatttgtcctcaatctttgattatcccaggttcctctggaaaattatcacctgtttttagaagttactcagtttctgatgccttcgttgttgaggttttccaacagattgtaatgatgctgtgtcatggaatgacatcattgctttcttgtcctaggttaacattggaatagatctagtttccttaaaaggcatcgaagttcttgcagggctaccccacatcaaggaagaaagatgcttctcatgtgtgactctgttgtttaactccagataatcttagaaattctaaggcgagagtcaacacaagagttcggcatgacatgggactcagactgtcacccctgagctaaaacaatacgcaacatacactgagcttctgccaaagacacttcacggggttggtaagggaaggcaggagagagaaagataagagcatttatgtcatcctaaattagttcttagctcttcagatctctgccaaactaaaatacatatatatatattagaaagtcaccttgtcttttttcactacagtaattcctgccaaatgtgaaatactatgtttgaagttagctgctcaacactctgtcttctgccactctgactttgatctggaaagaacgcgggccatcaacatgtcaggatgttaaaagtgtggtaatttggggtgctttcagtttcttttgaaaacaatgagagattattttctatggaaactaaaagcctaccatgtgtttaaagttgctacacttgaaaattgatatgttgagactcacgctgatgaatcttgcgttctctgctgctattttgtgtattctcatctcactgaacagagcaggtttggagaaaacataaagaaaatgacagaaaatgatgagaatggtacacttgcctggcatcttttgtgggggcgcagactaggaaaaatgtcagccctctcattccaactcactgctctttgactatctggagagatgggaaacctcatcctcctgtatgaattccaagttgtgtacttacctcccacatctaaagggcaaaatgctaatgattaaatctgaacagtcaagcaaataacatttccacccaactccctgggcccagatggtcaaactgagaaaaagagagctgcccacaagtaagtcaggggacccagtcatattatctatgccagtgttagtagcagacttcttatctaatagatatgctaatgtgctcttaacctgataataaagtcctgtcagtgcttacacactggtgagtctttggcagggggactgccatttcgtaactgaacatctgatttcagagggcctgtcaatttatgggaagacaattacatcattcattagctaggtctccatcacctagcggccatgtggcaatatttgtacctcgtgtttgacattcagaaaaaatgaatccctctgcttcggaggaggacgtggcctctttaaaaacatatttgtgcaatctgggggacttgaagtgcttcaggagggtcagcagctctcgggagatgcctttgctttcctctccgagattcccatcagaagtcaggatagtcggcccatgcagggctttctcacccttgtgggcagacgctggtgatgagagccaggaaacaggttctggtcctgactttgtagaacatcgtaatacagagccagagaggagtgataggtgccacaaccctgtgcacctcaagaatgccaaggaaacaacaatggtatcgtctgccagcccaggacttcgtgcctccacagagtatacattgagtaaatgaatatggagagttctccacctactatccctgaatcaccattcaagccttgccctagactttctctctataacgatgatctctctagcagtcatccatccagaagcagtaatagaatgctagaacatcagtgttgacttcttcacacaccctacttatttgactggattcctttgggtggtggccaagccaacaggcccttcagcttccacagtgtgcttttaaattctccatttctgacatctttcgttggttcattgatttgtgcttggggtttcctgattgaggattctgacacaacttctaatggactgtaaattagtgttatttcattctatgttttatctggaacacaatttcaagttcttgctttgccttggtagttagacaagaagcagcttgatgtcgtagaaagcacatacatggactttggtgtcagagagggctgtgtttgaagtctggcctgtatacataaagtccatgtgatgatgggcttgctatttaaaatctctgcaccttagtttcctcatcagaaaaatgaggagaattcctactttgtaaacatgcctcaagcattcattgaaatggtagatgcatgcaactcttcttcaaatccaatgtcatcaattatgagaaatgccatcattgtgcatccctaagagggaaagaggttgtcaattaaactatgccatgatttcttagcatttgtaatttttattttatatatttggaaagagataggcacaggcacgatagattgatgtaacaaccatgtgaataggtaggtccgtggtcacaaaggccctgtaatacaacaccaattataaggtgcattctgattccagacttgtggaaatatttaaaaaattctgaatcttatagtcagtggaacatggtggtacctggcacacaatagaagctcaactaaatggagctatggtgatcattgtactagccactgcacaccaggtccaatgagacctgcattggactgcatgccaggtccaatgagaagagtatgcccaaaatagtgacctgcactgcccagcgctttgtaggcaatcagtacatatttgttgaactcatgaatgctgattagggttacatctgagttgtaccagttgtggaaggtgttttccaaatacccagaatccttgatccctagcttcactgttcccctatgtaaggggaggtttttggtttcttgatgtggtaattgcctccgttcccaaattgcacttctgagttagaaagcacttaggcaaaggaatggttagggggccatgtaagcaccacatttaagccctctagcaggaatctgtgattccctgaaatcgagagaactgactgagagaaactgggaagtgtttgtatctggcataaggccatcatttggcactgatattacaaaagtgtagcagaatttacttggagttcaaggtgaagaagcaaataatggcataaatctaaaagtctgttggctatttctctgtaaatgaggatgtactaagaaaagaaagcaatcgctacaaggcaccgagtagagaaaagaactattatatggtaaattaggtctctgtacacaacccacacagaatcttttgtgctctgaaatgccttgcttagctacatggcctcatacaacagaaacctaacccaaagcaaacttctaaaacatacatgtttcttttaaggtcacctaaaaccagacttttttgtgtcccacattgaaaattcttttatagaaaattcatgttttgattgttaagaatagacacccagaatttttgcctgagcccttctcttatcaaacaagtcatttattaaattgatgcctcataataagattctctgcattcagagagcaaatagtccatcaactgtattaacacatttatcattaccataaaaaagaagataatgcattgcatgttctgctaatttcactttttatatcatcagccttctggcattaataagtaaatatcacactgtatcagaaaatataacagcactaagctacatgttggtaagaaaagagttttactaaagaaaatattatcctcccttctgggaaagagaaaaaaattataagatatgtaatatgtgtcatctttcaaaggctttttttgtttgtttgtttctaaaaaccaaagccatggatgagaagagaggagaagctttgcctccaacctttacatttctttcatcatgactttctttgcagttgttagggaaggcccttcccttgggatgggttttcatttgagttaggtcatttgtggggagattcgtgcaaacatgttcggcactcccctagggactctgtctttataaaagaagggcatattaccttgcttttgcctttgcagtcatgatgcaattctctcagtttgcttacttatattacaccatgagcattttaaagtcacgttaatgaagtttatattagacttgcttatattccacagggaagggtcagtggcagtgtgtcaaatgcattctgttcttcaggccgtgataaacaagatggcatctttcaaggaagttcagtgtgcctttgaattagatgcatctttgaaactggttttaaggctgccttatgcaccaaattttacaaacagacttctgggacattagctaaatttggagtagtgtgtttaaactttcttttagtaacaagatttgtagacttcctgaatctcgagagaattatgagttaagactctttttcccgtgaagaaaatatttgttactctgtacattaattttatgttaattaatttacagtttattaaatgtacttgaataggttcatgtatattcattcaatgcttttccactgggcaagaaatttcactttggcatatgattggctggtcgcactgtgtgctgaaatctgcaggccagccttaatatccaggatatttttacttgaaatttttttcctggatccagatcccaaaaagcaacaaatgaaatagtacagttaccaggaaagtttaaaaagcctggggtaagttgtgttttgcatgagcatctcctgtcctggtgttaatcaggcacacacagcagcaatagaaggcatctgagtttcattttcccaggaccatcaggggaacagaagcttttatactaaaaagctttttattacctgattggtataaatcaatgattagccatcctttttgtttcctggatatgtacaagggtctaaccaatgtacaataagaaattgaggacatttgtgtctatttttatccagtctgttttaatcaaatgatgacattatcttttcccgagtttaaaattacaaagtttttaagaaaaaacacacacacacacacacacacacacacacacacacacacccccaaagctggcataactgtgaagagtcaagagccaaggaaagaggaattaataccaaaaagggtgggatgaaattaagtcaagaagtaagaaaaaggcataagatgctgagaatagagtaattagaagcattaactagcaagagaaactaggaaatgccatacatcaattgggataaaatatggaacagttaaaggacacaaataggaggggaaaatggcacccagcataccaaattacaaatatcttctgcacaatttcttgaacctataagtccaaccaaggtaatgagatgaaaagcaatcgttgtgaattgcttggaggtgctgtttcgccacctcatcttacatcattaaacttttggtcccctcatgaactacttagataaacaacagtgggcagctcaacatttatccaaataaaccagaaagctaccacgataaaggaaattgagtttatagacacagcggactcttgcctaatagacgagagtaatgtgtctaatgtcgaacatcaatctatatttcaagtatagtatgaaggagggcctcgagaaacaacttatgctacaaaatcactttgcactagaggtggtttatcttctgttgtgtctaattgatctccacgtaattcagctacaacccttgctactgaaaatgatgtaagagatggaaagactgaatgtggctgttggttctccagagaccatagcaagttgggggttccaaatcgcctttgtcttcaaatgtattgtcgttggaatgatccttgaagccagagagcaagtctatttattttttaatcaagtgagggcattcatgaacgtcttcttttcaatcctgatttgtaaaaaaatctacataagggagaattattttataccagacccttcccatgccttattttgcctaacttcatagtgtgaagaaagatccagtagtgatattttagattaccctgcaatgttagttcccaatcaaattctgtggatttatgaactgcctgcacttgggagagtctcttaatcccagtggaacagggtctggtctagaccaggacatagatatgctgaggccatggctagtggtagtggggacttgggagtggagcagtgaaagagaagggaagggaggtcagcccccatttgggatgcacgcatgcgcgcgcgcgcacacacacacacacacacacacacacacacacacacacaccactatccccgctgaccctgcttcaaaaatgccaatcagaaacctcttttaatatgtgcacatcttaataaagtatctggacggatggatttggtttgactttcaggaaaccaacttctagtcctgcttccaaagatttaatctttcacagtgtttgcatttgcacagatatggatgccaccgtttctttttcctcctctctcctaccctatacactgcacctttaaatcgccttgggggaaatccagatttatcctgctctgtcacggttaattttttttaagtcatatacataatacaaaacaataataaagttaatttcattttaggcttttaaaaaacttaccagtctgtggatctgtgatttttttctgactcttgtccccatcccctcatccccatctccaccctcgcttctttgggtggaaggttgttgggtaaaggtgctgcctaaggtctcatgaactctgccatgtctgggagaaagtgtctgtatttcttttctggggatgtgagtgctgattgcatggtgttgtattcttttcttcaaaactatcaggaattaagcctttcggaaaggtcagctgacccacagtgatatccatattgtagtgaaacaccgatggcttgttttatgccaaaggtaaataggagagtggatacaatgaaatgatctgtgactaaatgcatcttgaaggaagaaaaagagctgtctgtcgtgtttgtatgactaagggatttcttaaacaagctgtggaccccacccagggagaatgctgtcaaaacatgaaaaaaaatacagagatcacacgaaagccaagtctgaactctttaattgcatgtctgaataccttgctaattttgcccacgccctttgtaattctttattcataacacactaccactgtctcacccctccccaaaaactttatcgtacctgtgtctcccacaattccacaaagcaacaaaaccaaaaaaccagctgattgagaagatacccagattggactaaagtggctcttggcttgttatcatgcccttcaaaagtcacttaccagggcagttatacagtaggattttgttggaagagctggtctggaatctctctaggtagaaatgtatagagagacccccaacatgaaaagtaactaggtatgaattgcagaaacatagaaaaaattctttgtgttgtatagataatggtgtcgagtgctgcctaatttgtcattcatatgataggccaagtggggtgcagaccctaatgacagagagtattttttgtgcagaggggaaagtaagtaccataagaaaaagcaagcatgcacaagacagaaaagacaggagaagcattcctttgtgtcactgtagtatatatggtatatattcctgggaatataaaaagaggaggccaaatgcctagctagagagaattatagtttccatcggcttctacagaacaaggaagaaccacatgcccatcactggcttcgtgaaaaaacagaagttcaagcttcatgggcagttaggaaaatcctctgacttagattaagccagttcttatgtttccactggatgatgaggctacagttttagcccatctgttcacagccctgtccccagcatcctaagagactctatccatttatctttaaaagccaaagaaaagagcatgttgtgagagggaggaataaagctggtagcccagaaaagactaccctaaagctgaatgggaagacttaacatcgctaccctgaaccacatgactctggaagggtcctgaggttctagggcgcgagggttgtcatgcggtcttgactgaaggttttccacatgtgcatatagattctccatgtagaaaagaattttgatttggggctttaatgccttcgaatgcacattgagaataacactgccatgctttcaccatagccttggaatcctaaaataaataatagaaaaattgtgatttaaaatataattccaaatactaactggggcccgctgcctagatgagtaataagcttcaataaatgtgtgacaggcacaaggctcttcagtatgaagagtagtgaggcctcagaaatagaaatagctttttcattacatgagggattatgttcagcctgactgtggagcctgttcacggagccacagctgcatcttctgcctgcggtcgtattaaccagtaatagtaaaacagtgacgtgctgcctgaaacagcgatttattttagagaagagagaaaggtcgctttctcctgcttaagtcaggattaccattgtttactacacactttcccttaaacttctatctgtccgtgctaatgagctgcaatttcagctgggttccacctgggtgcctgccagggatgaagaaatcaggatggtttggggtcgtggttacggctgttttatttttactcacctctgctcatcaacaggcccaagcttatctctttttgaagattgtatgaagttttattttttaatttcaagctcactcagctatctgagtttttcccaactcaggaactcacaaatcagcacatgtactccaggccttcctttttctttcttttttttttttgagacgtagtctcactctgtcacccaggctggagtgcagcggcatgatctcggctcactgcaacacctctgcctcccggattcaagcaattctcccgcctcagcctccccagtagctgggattacaggcgcccgccatcacgcccacctaatttttgtatttttagtagagacgtggtttcaccatgttggccaggctcgtctcggactcctgacctcaggttatctgcccaccttggcctcctaaagtgctgggattccaggtgtgagccaccacacccagccaggctttccttcttcaaaggagtgagatgtgtattggagaggctgatgtgacctcggtgctacgccaccctgcaccttggcgaccaaggagactatggggtcttcaaagatgagtttcagtcatgatctgagaaaggttagggggctcagtatagaagggcactcaacatgagagctgattatcaatttgagatgggttctcttttctacaccttgacacagaattcctttcttgacacactgaaacgaacgactcactgaaaatatctacttcaaggatggttgtttacttggctcagaagacctgatttgtagtcttaacagttcctcatttgaagggctagctgggtattcaggtagttcagtgaggaaaccctgaatttagtttagaagttaggttcaactctcaacttcttctaattgagtgcttttgggaaagtcgattaaatttcctaagccttcattttttttcaactgtaagaaatggttgataaccgtaatagcgatgatacctttttcatagtcactctatgtaaagtttaaagtagggcttgatattttaatattattgttctttgttttaatattattattgttctttgtgtattcattcaagagaaactatgcagagatgctaagttacaattcagcaattgagctattggagttcagagaagggagaaactcccaagggctggaatagttgaggataactggatggagaaggttctaggccgacccagacctgggaagatggttagaaactgaactaggaatgggccaagaatcattccagatgggggaactagcaacaggaaaggtaaaaggagaagccagaattaatagggtgttatgaggagagggacgcctgctaagaacagtgaaaaacagtggagcaagaccagatgatagatggccttgaaatctggcaggaggtttaatttgattaatttggcaatagggaggtgcttcaagttcataagcgggagtataatatgataaaattatgacatgatatcatgtcagttacctagtagatgctccataaatatttatttgttgattgattgaggattcaggatagattgggagatgggacaggagacagggagactcctctgaaggccccgtcaataatcagtgggtgtgtgttggtgaggccctgatgaaaggggaagccatggaaatagagcttcagagttaactgcgagagatttctttcaaagaaaagacagatttgtgatacaatttgtcttgtgtcgactatcaagacaaagaagacagaagtacctaatatggccttaaggtttctctgttgtcataatgggagaactgaaaaattaaaaattaacctcatatctttaaatcaccactcacttctctaaaagcatggttggccaaaacattttttattggtatgtaattctaccaaggctggccagaagccattcttttttaatgcactcagtaaatctctgcacggtttctttattatgagagggcctttgatccaataaaacccatcaagaccccttctgaggcattcactttggattttgtatggaagtctatagagaaaaaggagagcagaattgggtaaaaactaaactctaaaaggctaacaaaattcctccataacgtagtgcttacatgtagtgcaaattctgcgaaccaagaagagtcattggaatatacattaagactcagcatacccatttataaacagaaaaccaccctccgggacttgaaggcacttgcctgtacaaatgtggcatgtggtcctgggagtctataccgttgccctttttgatttggggcagtgaagcttacaaatgaaaatcttgaaagaagaaacttgccttttgatcagttggttagaggcaggtttgaaattatgataaatctgctacatattcattctatgagcaggtttaaactctaatgcatctgcctgtatatctgcaaatgaggctgacttaccgtaccaggctgaagggtgagatggatgaagttagttatgggtttatggattgggcagagagggctagacatcagggaatgtgcctttgccctcctccccccgccctctctctccaccacactgaagtctcgatttattttctgtgtgttaacatttgactgaagtgcatgaaataccctctcagatgctaggagcccgaagtaaagcatcaaatagcatgctcacctggggaatttagaattagcctccaaactaaccaaagtaatctaggccccaaagccactttagttcttgctattgggattgcctgtgaggatgagcctaaatgtggtagataattatgtctctttgctttctttttatcttcatcctaactctcatctttcaagtctcctttctgctgcagagtggcaggagctaaggcttggccatgaagccagacatcccatttctgtggagtttttgaccctgtgccatgatactggtctttagggaattctacatcggtaaccatttctaagctcagttaggttaaggccatggtcagacccttgctgtcttcacttcagcccacaagagaggcaataccgtgatactgtgatgaatccacccctgaagcctgcagctccctcctgcttccctgccatgagagataagttactggagaggaatgtcacatcttacggaagaattaattttggagtgcattcccgacaagtctatagttcaacatacatatggggagttattttcaatggcatttaaatgtaattgacttatcagccaggttagaataatcataggatagctatagtgttattgtctaattgtggtcctatagctgacaacgctctgaaagcctctttaaaatataaaggaaacctgcccttgggaatacaaagattgtgtgagagttgtaagacatccaggagaagtttaaagtggagtttggaataaagtgaacaggctcttaaccatgggtaaaattgtaagagaacagcttacacggttcttgcaaaccaacttgtcatttctcaagtgtataatgaaataatgtgtatgaatattttcatgcagagcagcctctccctcaagttctgccctcttcagagcttcataataatatacaacagcatcttttagaacagtgttttacaatctccagactaagggctcccaaaaagatcctgagagaagtgtaaatgagtaacaactctaagactgcatttttgtaagtaaatgatgatgaaggataaggagagatgttcatggggaaaagccctgaaaattattggaagtcgtggagaatgagagtcaaatgcaaacactcctattctgcagctacgctgattagcagatcttttatagtttccgtgtgggagatgagcaggggcttggcaagcactgtccgtgtattaggaacgaatgcccctccgcatattcaatttgggggcgttattaaaaaatggaatgaggctccttctcaggctctgcttccttttcataactgctcttgcagtgatccttttggctgtaatagcactttgtgtgaaaaggatggatgggaacccgctaggtctttttacagaatatcaaacattttgcccattaagctgacttgatttgaagaggtccttggcacagattgatgaaatagtccaaatattatcactccttgttctgcagtccggatagagtaataaccagtcgcctcagcctttgctcattaatgaggtggtcagggtcctaagatgtgcaaagttatttctttttctctcttgctattttgcacgttatgcaggattacaatgctgtgggaatgatgtgcagatggtctccagtgagactcacccagcaagattctcttcttgcatcaggattctgcctttttctctaagtcagtgcgccctcacatcagccctgagaacatttatttggcagtgtctggagatgtttttgtttgtcacgactgggagatgctaccagtatgtagcaagcggagaccagatatgctgctaaacatttttcaatgcacaggacagcccctggttaaagaattatctgatccaaaatgataatagtgccaaggttgaaaattcctgctctaattgatttataattacatcttcagatatattttttcttttttaccacttgaacgaaaataagagcttatattgccctgtatagctcatctttggctctgtgtccctcgttcctcttggtgattctttttatgtccatggccctcagtccccttcacagaaacaagctgtggcattaagttccaaaaatttattgactgaactggtcagctctatgcagcgtaaacagggttcaactgaagaggtataatgaaaagtaccgctgaatgtaaatcttcctaaagcatgacttgctggtttttctctgctttaaaaggataataaagtcaaccatttatgaaaaacctactatgtgcagaaacttcacatttaatatctgacctaaatgtcgcagtgactcagttttcctaattataattagagaaagaggttcagagaggccaaataacttatgcataggcatgcatagtcagtggttaggatttggaattgaaaatataggtctgtttaactgcaaagctcacgttctcaccactatgtgtattgccatcaacttgtaaatatatgcttgagtgactttgactttatgtgttcacatcccccaagccccagtatcctcagaaccgcccctaataacaatgtttctaaaaaaagaaatgtacagtccctctgatcatccaaagactggtcagctccccatcagccttgtcctgagagctgaaagatgacacattccttagctagtactccattgtaaaacaatccatgtcagggcacgtgggaagatgggaaacaggttgaaggaattgggagataaaaagaaatacacttcaaaactgaaggtgaggccaggcacagaggctcacacttgtaatcgctgcgctttgggaggccaaggtgagaagcttgcttgagcccaggcatttgagaccagcctgggcaacataatgagacccctgtctctacaagaaatatttttcttaattagccaggtgtggtggtgcacagctgtaatcccagctacttcagaggctgaggtgggaggatagcttgagcccaggaggttgattctgccatgagccatgatcatgccactgcactccagcctgggtgacagaacaagactctgtctcaaaaaaaaaaaaacaaaaaaaaaaactgaaggtgagggggcaattccaaagtccttctcaggatgctcagccaaggcagtgtttcagttagggatacctttcagctgtaagttatcaagaacaactgaaaaaaaaaaaaaaaaaaaaaaaccctaacagtggtttatattgaggcttgatttcctgaccttactagctagatgtccaaggttggcaaccctggcatcgtttctgctgctcagtgatgccatccaggacactggctcttcccatctccactttgccattcccagcactttggttttatttccttaggtttcctgcctcattgtctaaggatgtctgatgcagctccacatatcacatccaccttcaaaggagggagatagaagtggagaaatattcaaattatttgcccctcttaccagaaaaagtctaaaccattcccagcccccaacacacacttacacacacatacacatcccagcaaaattttacttaaatcttattaatcagaactgtgttatatgtctatcccttgtttcaaaagagtctaggaaaggttttctagaccctttgaagatgataagggaaacgagggttggaattgtctgatgccgccaaaaatcaacagtgtctgattagagtacttgaatattcaaaagccaagtttcagctgggcacggtggctcacacctgtaatcctagcactttgggagactgaagcaggcggatcacctgaggtcaggagttcaagaccagcctggccaacatggtgaaaccccatctctactaaatatacaaaaattagccaggcctggtggcacatgcctgtaatcccagctacccaggaggctgaggcaggagaatcactggaacccagtaagcagagactgcagtgagccgagatcgtgccactgcactcctgcctgggtgacaaagcaagactctgtctcaacaaaacaaaacaaaacaaaacaaaacaaaaagccaagtttctgcttttctggaaatagatgcaacagctacttctgggaaatctctcttacatacttgtccagggtggcactctgaaggagagtgtattagtttgcaagggctgccatatcaagggaccacacactgaggggcttacaacacaagcttattgtctcctatggttctggaggctggaagtccagcatcgctgtgtcagctagtccacgctctccctgaaagcactaggaaagggtctgttctggacctctctcttggcttctaggagttctttggtttgtggcagcacaactccagttttacatgatattctgcctgcctttatatctgtccctgcgtccaagttttccctatttataaggacaccattcatattggattagagctcaccctattgagctcatcttaacttgattatctgcaaagacctgatttccaaataaggtcacattcacagctattggaggttagaacttcaacatttgtgaaggaggggggcaattcagcttattcgtaatacaagatttttctaaattcttctttatatcttaatagtaatggcgatagttaatatttttgagcatttactacatgctaagcagttcacatagatttttctcatttaattcttactaccactacatgggataggtgctattatcttttctatcttacagaataggaaatggaggcacaaaaatattaggtgaccttctccaaattatgtaattagtaagtaagagggccaggtctcagccccaagtgcgctggcctctgagtccttgcatttaattatcatctagactctcttaaccacagctatcttcatctctggtataataggtttcctgctcatcaatgccaaataagggtagacaagttgatttccttaaagcttaaaaaaaaatttttccacaaaggctttctttgctgccttagaaacgcaaataaaacacttcattctgcactaggcgtaatggtttcctcttattcaaatgcagggccatctgtgcaaagtattttatttcatcattcattgaagttcacttaaaagatgaaatcacccttaatggaacaatgaaatggaaggattcccaaactgaaggcaaatgacttgaaaatgagaggctgtggttcctgcccgcaacccctgcccagggtctcatgagtgacagtggttctgttctgacagccccagagatgaagaagggctcttggggagcataatggcgccatttccagccaagcagttcatgaggctgaagtgctgtttccatgctgtcctctggcctggatcagccgctgggagcctggcattgatctgtgtagactggtgaagcttcatctgctttgcaggcattgctttggctaaacaagcctgtaactgatccctcttgctataaaccagcctaagtagcctcttaccatcagccagtactctgctaccatcctccttctatagcaggaccacagatggaaaggaaagctgcttcctctcaagtaaaggaccgaagactgagggaaattttgctttttgtaggcaatagcacagtttccccctttcctcctgactggagacagacagtgcaggaaatgatgggaaaaagcaaatcatgctttatgtttgagaggcacctcatgactctgtggtggacagcaggcattattagctgcattttacaatggcagaaacaggcctgggcaggggaaagaacttgtccacgacacaaggctagcaaacagcaggtctaggcccagtacccgggtagccagactccaaacaatatgctctttccacagtgacattcggcactgcagcagagaacgagaataaagtgcttctgagttgaactgacagaagcttctagaatcggaaagagaaagaatgccgcaaagaagactaaggcacttattccatgtgctgcgcctcaaggagaagtctgtttagtttgggagaccagagtgcctcaaatggcgtctccccagtggctttcttgagtttgggatttgtccacttcatgattgcttcttttctgtggtgggtgtttcccattccttctctgagtcagcaaacagccatgagaaaagtttcctcccgtttttctcatcctcattcctgaggataaaaaaacctctccttcagatcagaagggaaggcagaatgatagtagctaacacatggtgagcattaatgatgcttcaagttgagggctttccttgaatccctcgtttaattctctccgtaagaagaattgtccccatttggcagatgggaaaaccaagtcttagaaagtttcagtaacttgcccaaggttgcaccgctggagagaagcggcacaaacttgaaatcaagaggcctatattcccctccttctgcactgttaacctgagctgcaaccagggacaagcatgcacctttccagagccttggttcctccatcataacatttatgcaacactcactctatgctggtcactaggctttccctgcatcaacacatttaaccctcacaacaaccctatgggattgtactctttttatctccatttcacagatgaggacactgaggcttacggatgttaagtagcttgtccaaggttgtacagataggaactgccctaatgaaacacccgtgcactgaaccataatgctccatcacctcccatggggagtccccaacgcccttcaactctgtcttactatcattccattattttatctgacaaacggtatatattttttcttcctgaaagcagcagcttcatagtgagttcctgcaacatttcaaggagcattcattatcttcattttattcccactttatagatgcagaaactgaagcataaatcaaataacttgctaagagtaaaacaattagtgaagagcaagagtggcttcaaagtcagacctgccgaattccaacacccatgttaacgtaggttctgtggagctggcactcagaaaccacgtctactgcctcttggccttgacctcgtatgagcagtgaaatcataatccccaagcaccttctcagtgggaggtgaaggaggtagcttgcttggtagctaacagcaaaacctctgaaatcggatagaatggcgctggaatccccactcttccacttactgactgcatgactctgagcaagttacttcacctctctgaaatagttttgtcatctataaaatggtaataataaatgcacccatctccaagagtcattgcaaagattatattagatgttgtatgcacagctttttgcaaagtgcatggtacaaagtgctcaatgattgttagaagagattagagttgacctcataggatcaccacactgagccacccaggatgggactcaaccttgcaatgggcttcatctcctagaaggcaccctgctctggtccttatgatctgcactgaccagttagcagcctctcttgcccctcaagatttcttcacttcctttgtactgagtcagctagagggaccactcatcatttcaccaaagtaaaaggaagtagagacaattgatgattgatgttagaagcaggggacaggggtagaaagcatgtgggcttcagatctgttcagacccaggtttgaatttggatatcacttaaacctccctaagtttcagattatcattttagagcagcagcatgaggataataatgttcacctttgcagagttattaagaataaacaagaggaaaattataaagtgttgtgacatgtaataagacaatggctattatttttagattggccaactcgtttgcatggagctcttcgtgacagaccattgagaagtgacctgagttccacaaatgtcctttgctcactttatttggcactgtttgtgtggtgaactttccccactctgggtgtggctggtcagtctcttacagtgtgtggctagcagatcacctttgaataacatctgtggctatttaatttgtactggggaaagaaagaagtattacaaggaaagcaggctgccccgttgggatgctcaaggcccattttcttgcacttagcctaggattggcatctcttggtcaatgtgggtcaccttcctgagaataaaggggcttcattggctcaataattatcccaactgttttttcagttgtggctatttgagaaagaggtttcatatgtcaggagtacaaaatagagactgacttcatcgatctttatgccatttttgcccttcatcgttgatgtcatttgactcttcaggccccccttctcccgtcactttcttcttgacataatagctttcttctgttccgtccccatcttcccatctgctctttctcatagctccctcttctacacctcgtactttccggcctctgcacttccactgttgggcaacagaagagctgtctttgtttaagcttaaactttatcttctggcaaaatggagaaattaactgcctaccagcatctcggagttggttgtggggttcataggttcatacgtgttaattgttttaaaaattctccttactatagcaatgcaagaatcactaatctttctctctttccctttctccctattcctcttctcctctccacattaagtctgatttttttctctctctgaatttatccagcttacataatttgccttttcattttgtgaatggagataatttgtgaatagaaattacttccaaatgtttcaaaaatattttctaagcatttgctttaacatggtgttgtgagctcttttttttttttcctctttctttttttttcataaggaaataagtatttccagggaaatgagctttagggggagaaaaggattgcatttcactctcttcttgggtctcttttgttgatgacaattttgagctggagtaactgcagatattgacttgtcgaccacctggggtggagggggacagttttattcagactcctgcccaggaagtcccaggaaggaataggataggagggaggagagaggagagggtaaatgaattcagaaaatagagctagcctggaaactgatgactttttaggtgagagattccctacatcaatattttaattttaagacacattcttatacttgggttgattctggggtgcctcctaaggacagactttgtcctttattcattaattcagcaagcattcactaaaaacttccttctctctaagaccttagtgatgcagaaatgggtgactgaggtccctgtccccgaggagatctccatcacacacagagaaaatagatgtgcacactatcacttataacacaagaccaaggagaccacgcctgtgctagcatggaagtgagcacggggagaagaaaaggagtcgtctgtctgttggtatcagagagtactttagaggggagatggcatttgatatgtagctagaagggtgcataggattttggcagaagggaaagaggggagaaatacctttcaggaataagaacaccaagtgcagtgattaaagcctgggaaatcatggtgagtagaatgccacgtatcattaacactggagcaaaaagtatacaaggatctagggtattgatggaaaaggtattggggagaaggacagcatgacaacaagcctttcatgccataagaatgtgtatttggatttgattcttaagtgactcaaaacccgccaacaattctgagtggaagagggcatggagccgtctggcagccccatgcagaatgaagtgatggggtgaaaactagatgagagccaaggaggccattccaaagcccagaaagaggagactgtgaataaaacaagaacaatggcagggcaggcagagaggagaggagacatgagggagacatcatagaggttgaatgtcctggtttgatcattgactgaatctggtgggaggggaaaggagacatcaggcataattcagtccattgatcagccttttgctcgatactggacagagtaacctggagccagcccctgggaaaaaggggtagagggtaaaagaaagtttcctgttcctataatgtacaatgaataatcagctgcaatttcagtggatgtcagctgggctagatgatgctggagtttctgggacaaaagatgcacttcctaagttattttcatgcatgtaatgaaaaaattagaagacagcagaattgggtttaataaactttcctatttttaattgccactgaatgatgttttaaggacaataagtccttagaggaaagaaaaggctttaaaagcacccacttcttctcttccattgaaatgacatgtttcacctatgtgatgacttaattgcctaagagcaaggaacagtggaactacagataaccttagttgggctttagagcagggaatggatttctacctatatggcaattatataccatgttctctgagggttaggatccacactgggcttcagaattgtgcttagaggggccagggtttagattgttaggatttacaatcagcatcaaattgggaagagaatgtcgaggatgtaggtcaatatcagtcaagttcatttagacctcccccgacccaaatatatacttgccactttgctacaaaagacaaggttaggggctacaaggtgacacccgagacttctttagtggatatttagagttcgcccattctccagagataagaaagaaggattctccaaaacccagacccttagacctcaagcgaaggtcttggaatagacagtacccacattcctgctgtcctttgcttcttgtggaagttaattttgtgcttgtttaacatttttaattggcccaacatgctcctgcaaggcatttttcagtcattctgtgtttgacttcacctggttatgattgtttcctgttttgggtttttgacgtcgtcattttatcttgttttcatgagagtatcattccctgctcactgagagccatttgatttttcagcagcttaggtggcagatcttgaagacggttgcgtcttcaccttggggagtgtctttcagtgattcgtggttgggtagggtggaacctccacccgccggcttcccaaactgatatgttggcttttctgaacctccaaagttgctaagatacagtgtgtctttggaccccttccaggctgtttccttccacactcacagctttgacggaatatttcctctgcctgatatcgttagaaaggtgacatgccaaaccaaagttagagccgttacaagacatttctttgagtgcagtttccttggttcacccgttcatctgctgtgctggaagaaaaaagtgaaatcaaaaaagctctattaaatagatgtgccaaggaacgaggaaaaaaaagaaaagtttcttcaacttttatatgctcagaattgtctcacaagcatatttttgttcctttcctctatttaaaaattgataacctagaaagtcaggagcaggctaggaatcgtttgtggcacaaaagtggcacctactggtaagccttggcttaaatttgaagtttagatttgtgcatgaccttgaccaaagttatatcctcctgagaatgcttcctaatgattttctatgtctggaagggcaaaccctctttagatgtataaatattaaaaagcacttcttaggcatgagggcactggtttcagggctacagaatgactttttcagcttgtaattaaaaacatgtactggataactaaccagcagcagtatttgcttaaaggagcaaatgatttaaaactgattgggttgcacaccaaagtggagtgacccatggtggctgttcttacctctggtttctcgaggcatccacccagctccccgaggttcctcaagtcactgggttcttgaaacccacagccttcctttccttgcgtgtttggagtttttgctttatcctggtatccacgttttgtttttcatatctttactctgtatctgaatatttattccacgttttggttttcatgtctttactctgtatctgaatctacagaactcacactcaagaaaaaccatggctccccctgttacagtgcacactcaagtttcataagagaccccaacactggctgcactcagcaggtcaaacaatcattttcaaaggaccataagattttttaagaaacagactgtcctacatatttgaaatcttttttttttttttttctattttaaaggcagattccactgaatgctgcaaaagtaacagaaatgattaggaacagagttgtgacctatccaatttcaaaaaagaaagggaaggggtgagatctaccccctcctaagtggtaacaggccctttctgttcatcttctcatctaattgtctaaacaatcctacatcacaagatactgtcatcaactgcattttgcagatgggaacactgagacctagagattgtctagtgtgatataacaattaagtgatcattttaggaatctttctcattttaaaatcaatattgtactcctggtggtataaataaagatgacctttgtttattcatttactcatccattcattccaaatattcattaagcaccatgcatgagcaggcaccgtgccgggggctggggatgcagcgcagagaagagcagccgggagctccgctcctctggagttttctctctggtatcactccgagagtctccacatcccaatttgctctctgctctgagggtctttttttaacccctaggggagaagttgacagattgtgaacatcaatagttattgaattggttttgtcccaaggcttcttaaaaacagttttcaacgagtgccaagccctaactgtctcccaaatcctactgaaagaaatcagagcaggttatgttttcattgtctagccacccttggccatgaggcgctgcatccggctttttctctggggcccatttttcgccacaactcttcagccttctaccactcgggttaagttttgctttgtgcatttacaataagtgcctgccaagcatgagtgttgcaggattagaataaaatagtgggggtgaaggaaagcagattttttggaaaccggtagaaacactccatgaaatggagcattgtaccaaactcagcttagttatacaaaagcatgtatagtgtttctttttatttcccatcttaacgggaggaggcagagaacagtggttacagaacaactttagaatcgttcctgattgtccaaatggtttttttacccctctgagattggggactcaggggcagccgtgtctctcacgcctgcccattctgccccgctcgaagccacactgcagtgttccatgtccatctcgcctgcgctatctaggcaagggtgcgtgtgccaggctattaaacaccccacaccccactcccctgtcgttctctaagcaatggaagaagtttgcttggccaccacagctcgggcaggagggacttggattagcccaacagcttttgctactgtcagcatgcagcctaatagagttggaagacagggttctttagaggcactggttctgacaaggaaagcttctgtaatcttgcctttgtttagaaatatgaacttcgaaaccctgctgcagagagtgtcggcagccacgctgatgcgaggccttgggcaaattcatttgaattgctttgaaattggatattcaaaattcaataaaaataagccagcctgatggtacagctgcagcattccccccatccagctgggtaagccgtgatgatttccaggccgcggactagcaaagcccgagtgtgatgggaagatgagcgcctgagctgccagagaactctctctctggcagcctggcccgccgacggctgcctgccagctgacttgcagagcagggctggctttggcactaagtggctcctctcactggcctgcccaggcggggatgcggggcctgcctcagtcatggccggggtccagggggaggggatgcctcaagggcaaatggatggggtgtcggaaaaacaataaaatcacaacactccagttgtttagagagcagctggacgtcccaaacactctgccacagatccagagccatcagacacgtaggtgggtttaattaaattgtatgcagatgcaagcaaacctcataatttgcccttgagcacacactactgcatttgcctggaaagggggacatgacatcccggagggtgctctcttgccacctgccctgggagctccctcttcatcattgtttatgtggaaaggcgattctgctagggattttaagagaagaccattctcactttcctctaagtctcaagcagtttgatctctctgctttgtgatggtgtgtcacaatcatgcataaaaactgtgacgtatatataagatgtatacatatatagagagagatatttatacacatatataaacatacatatgcatttatagatggatagagagatgaatagatagaccgacatatacagatagactccaaattcaagaagtatgtcttattacccctaagcaacctcaattttaataattgggctcatcataccccatgcatgagttcaggcacttttctttgttggaatttgtgcatatgtgaactgtcttgagtcagattccaggagaaatatatccattagccttccgattgtcgcacctatgccacctacagtaccatacctaaagaggggtaattggagctcctgcgtgcagggacattgtgagcagcccactccattggcctgtgttacgtatcgccagccactcaagggccagccatgaaatttaatttggagttttacagacacgttctgaatccgaaatctcaataataactttccctttgctcagccttttaactgtgaaattcagttggggagtttcgaagcagcaggtaatgtcacagcactccagagggattttgccagaattctactaaagtgcttgcaagtgtcatttccatatttaactaatttcagtttttaattagctccatgtgaaaaatgagagttcacgctgagctcctctgtcagcacagacgcttgtttcctttctaggatctcaggacaattaagaaaaaaatagttgatgctacagtaagtgtgatcatgcatagctctctcaagccataacattgttccctgacagtaagaaagggccactgccagggcccactcgccaggctgggaaagagcagtttggaagagggttttacgtgcggatttgtgagtccttggttctgaatgattccttagctgcaaaaagtatattcttgtccctaaattctccaagatgacctgagattaggttttgaaagaatgctatatgaaatgcaaagatgatgttactctaggaaaacaggcttcctccgtgttatctctgtgctaaactccagcatccaggtgcttatcaggtcatttgatttcagattcgtaaggcccttggcatacaaaagtaacttctctatgatttaagtttcaaaatgcagtacacacatggaaatttattaatcctacattcaaagtgtaaatttaccacttgggactcacatgcaaatggaaaactacatggtcttcaaaaaaaatgtattgggaggttctgttttgcataaactgaaaaatatttgatgtgatcaggtttctgaaacaattttgaggaagccaaacaaatacaggccctgcatttcatttgcatagcatccatgctaatggcatgatttgtttaaaagaaaagattcattaaaagttttgagaatggttaaagtggaaaagtgtttgacacttccctatagtagcaattcttggaaattggtttggaaagtagaatctttttttttcttcatatatgttagtgttgggtaattgttctctgttgacaatagacattaataaatgatgtgatagcaagaacacttggtatctccaacagagactgaaaattgaaatccaagtagcaagaagaagtttaagtattaggtttatgtggctacattgggaaatagggtaggatacaggtagggtttccttccatgttctcttgactaccatatgtgcttgggttccaaagagcaaacacaactgtgtggttcaggtatgagattagaggagcaggtgtcctgtggggttgccagaaatgccgccattgaagatgtgttggtataagtggaacatgaaaagatggaggcaaattcttgaacatgaagagaccacccacaagttgtttaaactaaaataacttccacctgagctgcaatggctagcaataaaggcttcattggccagtgcgtcctgaggttggaattaagtctctctgtgtgggagagggcctatttgagctccaaaggcggaactcctatctccctggctatgaagggggctcacttgcgatggggaactgggaaaaacacaacttctattaataataagttgtctgtacaactctctggggaagatcatagttgggagtgcttatatttctttgctcttctcaaggtatgatgtaatttctttgctcttctcaaggtatgatgtcaggtgggcctcttcttggcctcccaggaacagcagctccagccacaagaagcctgtccttccctgaggagatttgacccaccattcctctgagagttggggacccctctcacagtgcaaataacaggcagaagcagtgtccacctaaacatttattcactgacgtgaggattagcaattagccctctcatgatggggattagctcaatagaactgtgggaacagcacacactctggagggtgaagttaggatgagcagcagaagagatgccgacttatggaggcagagagaaatcctgaaagtgatagtatttttagggcttattatgtgaattttgagcctgatagctgagaatggaaaccatggatttgtcatcagaggcacttaaatcatatgtggtaaattatccacatagctattaatttatacaacaaatgtttcctggtacaaggaaagagaacaggctctagaatacaggctgctgggtttacatcccagcttttctacttaccagtgacaggagcacagctatgttacttaacctcactgcgactcagtttcctccctgtaaaatggatacaataatagcacttatctcataggggaggttataaagactaaacaagataattcttgaatagcccttagcacagtgcttggccaaaggtaagcactaaataaaatagatttttactgtgacaggttctgcttacaccacagtgaaccaaacaaacctaggttttccccttccagaatacataccagcatacacagataaaaccaaggaaaattaatcacttcacaaccattccagggtctatcagcctcccaatttctacatgaaataagaatatcaaattaggaggaatgggaccatgtcagcaagaataaactaattagctaaaactacttattaaaatgataatccctccacatggactaggcgcttgcatgtgcacctgtcaggaaataagctacagacacacacacacacgtgcatgtgaaatgacacagaagcacactccccacgctgtggagagccaaggtaccgtcacccactgagacttgactcccgaccgaggtactgatcatggggctgtggggcaaggactctgaaggtcaactctgagatcattggcacttcattaaggagtctgttctaagtgcacagggctttcccagaagaggaaatgcagcctcccccttacatccaaacatactgcccagaagcccctagaatggctttttgtttctctaacactgtcagataattcacacaggatttttcaggcatcatagcttctgctagcagactggagtacacaaagaaaaaagtgctcagctccaaatcttgcctggaactgacctcagccctggactgccttttgtgtatcccaaatttgagctccgtgtttttgcctctagctttctggtgccatgttctgggccatgtgagtgctcagggttcttttatggatgcttggtactgaaaacatcactcctcgtggccagaatgaaaggtgttgtctaaagaaaagtcaagttgaactgtctggttcctctactttcggaaatataatggaacctcagctttgcgtggccctatcttgtgttaaagattctaacagagaatacatctctatatatgttttgtttactgttttgcttttgtttctagctttattgttttcccctgtgtggaatgttccagtagcaactgtttgttcttcctgtctaagaagtgtagcacataggtactacggcagatttatgtggtagtaagaagacgtccacctattgctttgtgtaataaacttccttccagaaagaagagaaaaaaatggctgtgccctaactgcagagcaagtttagtgaggatttacgagaatcaacaccactggcacaaatggagcttgcagagatctttgggttccaagttttctgcccattctagagaggagcagaccttagaagggtggctatggtatgccttctatggagggcactagcactcagcctgagagacagggttggaccagccagtcagccttctgccgcctctctcaatatcacatgtctctaaggagctttggcaagagtagaatcacaatttgatcctagctgaagttcctgataaatcctcaggttccacccgggaatcactgtggttgataaaaagaggagtccatatgctttacacacgagacagccaggcagttttgacactttgtggaaagtgtagaggcttgatatggattctcttctaggcagagacccatcccagcgtgacacagagaaggtgctcaggggcgattctaggcatgggcagtgcttttctccccaaagaactctacttcttcaagctttaaacaaggtgtagtggacaccaaatgaagaggagtctgcctggctcacaccagttcccttggtgacaggttgccaagtgtaggatgcccagttaaatttgagtttcagaataataatgaaaatgcttttaatataatatatcccaaatattgtgtgggaaattcaaatgtaactggcttcctgagtttttatttgctaagtttggcaagtttacttggtggctgtgtctgtatccaacaccctttttgggtccctaaatcgagcagggttgatgttattatcttactttcctcaccatagcaactgtcaaaaaaaaaaaaaaaaaaatgggcttgtgacctcagctgagccaattagagtccttaactagggtccctaaaagtgaaactgggaaagtggagctctcttttctcctggtagcccaagggcatgggaatattactttctgtgcccatggtcctccccttagggataaaccctctcttaatttggccaggctgctataacaaaatgccagaggctgactagcttttaaagaacagaaacttatttcttgggtctggaggctgggaagtccaagatcaaggcacctgcagattcagtgagggctcgatttctggttcctagatggcaccttctagctatgtcctcacatggtggaagagactatctagctgttttatagggacaccaaccccactcataacctaatcacttcccaagggctttactgcctaataccatcaccttggttaggatctcaacatacgaattctggggagggatagacattcaagccatagcaaaaaccattggtcagctactctttcactttcacaacctgccttcatagccttcaaaacaaaattcctctctcctgcttaaggtagaacaagctgaaccctaaggatcctatgctagtatgtagctacccagcccaaactcccaagtttggcatgatggactaaagaaagaggaattcaccctaggaatgcttatagacagatgtttacaatcagatgctccagccacaatatatccttggtggatccgctggctttgggcagccctgtgcctgatagtggggaaggggtggcaattgctctgccaaactgtgcacctgcttcaggtcagtacctccacagtcagggctgaccagaacatagagaagggagccttcctgtcatgccactttgagccactgtctaaaatatcttctgtctgaaaatatctgtcatccttaactggcaccgtgcctaaaatttccacctttagagtttatatgtttggcttaaatcgttagtcttccctataattgcacatccattaatgatagaatgtgtgatgttgtggggaggatgtggatgaattaataattaatatcaagatccaacggattttttaaagttccattgatgtggctgatagtttggaaagcagagttctgacagagttggatgggagtcctggaaacctctgatgtgatgggaaagcattcatacaagaggcactgctgagtttggaggggggcactgagtctctctgatcatgggtcacctggagcaggcagaatggacacagggcaggtactggatggagaggaggcatgctgagaaagaatgtccctgttttaccatgttactttggcccaagtctggttctggctctttttttttttttttttttttttttttttcatctttccaccctggcttgaatatctcttttccatattgcgtcctcccagctgcttctgacacactacctgtatgggcagagacctagtgcctagacctggagggagatgtctgggctctctcacctcctccaccttcatagaaacagacaagaggagcttgttccttcccttcatgttctctttcattaattgctgtcagccaagccttgtgcaatacctgtggttctcaaacttgagcattcatccgaatcacctggaaggctcattaacacacagatacctggaccccacccctgagtttctgatttgcaggtctggagtatggcccagtaatttccatttctaataagttctcaggggatgctgattctgctggtctgggaactacagcccgaaaccatcggcccagacagtgagctttttgagggcaggagtggtctcttcagaatcattgtatccccagaacctagcacaacaccaggcacagggttgaaggttaggaaatgcttgttaatggagctctatgaagctacacaaggctttaccctgttgcagcatcaaggctaatcatgtaaataccctgaattttcagatatcggattaaaagaagaaaatactattgccatctaatgtgttttttacacagtggcatctccagaatacatacaggaggggattaaaggtgccagtctgggtggaaaatgggaggttgggggctcgtcttaaaactccacttgcataggaaagaccctgtttttactgagactctttttgtggtaacttcagagaaggttggtggaaatcatttagaattttcctactcaccttccttttccaccccaactgcaccccccgaccactgcttagtgtcaccactgatttcacatgtgcatgaggtatgtgtaccaggtcagctgatctgaggttcctctgtcaagcttcaccacaaaagtgcagcttcaagagtcagtgcagtgaggtggaagtgaatgggatcggggatctgtgcttttcaatagagatgaatgtcctctctgccaaggtattaatctttccaggtctccataacctcttttgtaaaatgagtctggagaaggtgaccactaagtattttcctatatttcataatttctattattttaattcaaaaggcaagccatctcaaatttaggaatgggctatttgcttgtaacctagctatttggaatttcagagatttttctccagacagaccatattccttctggacagttcacacaataattgctctttgtcgggttcttaactgtgtgtcaagcactgagataaatgttttgcatactttatttcattgaatgtggcaacccccctgggaggtaggaagttttatgattcccattttgcagatgaggaaaatgagggtctgggaggaaagaaagaaagacagagggatcgagtaagggagagagagagggaggaaaaactgaaggaaaagaaagagggaaagagggaggaagggagcaagggagggagggaggggagggaggaagggagcaagggaaggaaggagtgagggaggaagggaggaaaggaggaagggaaggagggagggaaggagggaaggaggaagggagggagagagggaggaagggaaggaggaagggaaagaaagaaaaaagctttcccaaagcctcacagctactaaaaaccaagactgggacctggacctgaagccaggtctgctgcttccaaagctactctaatcaccatagtctattattcctacaaaagcctagtttacccacaatgcacctgaaatgtagagtctggctttggagggaagtaggctttcttttttctgccactttcagtataagagacagaaagcattgtagtcaagtgttctgagccagagtccccaagttcaaagcccagctctgccactactggcagactaatcttggacaacatacttaatctctctctcccatagttcccatagttaagctaaaccatgtgaaactggtgatattctaccatatttaatctccaaaaaggggaatttcatgtctaaatatttaaagtgcttattataacagtgcatggcaaacagtaagcactatattcgtgttagctatgattcttactgaaaattgccttgagagtttgccatatctggagtatagtaggggctcaatagttgctggtgaatttattgaatgaagtagaaactgggatgcccaggaaacatctggggtagtctgggctatgaagaccctctagggctgggagaaaggcaagtagggcaggggaggaggttaggactcttagatttgaatagctttgagactctgttagtattgccctggaataaggcaggaaacctcaaagcgagaaggaccgatcccataggtccagccaccctgaagcagtttttgtcctctggcttctaaagaagcaaagaaaaaccctcaaggcagaggcagtggggagttaggtcttatggtttgcttgtgtcttgctttttttacagctagaaataatgagaaaaggcaggcaagggagagcctcccttccagcctttcctcagccgctggtgtttttccttcctagaccactgtgtgagaggaaggggaaaatgcagaaataatggtggatctttagaaacagaaagaccaatgttagaggttaggtgtaactgagcagagagtaatatttacccaggtatggtagtcatatcaccatatggctatgtgtagcatgtggacacacttctgtattacaatagttatgttcatttcaatgtgtcacaaaaatcttaacacattaagctttttatttcacagatattactttgggatgaggctaaattgattaaagtttttaaaaaatagattgctattttttctttcttttttcataatattccttcttgcatgtataacaactcatgggttgcaaaagaggatttattttttcgtgcctgtctactataagtctttgtccacaagtcaaacaaaagcaaacacaagtgctaaaaaggagactgattttaaaatgtagttaagaaataacagtctaagtggagcttagatttcatgaaaaccatgaacacagtaaatgatgactatggttaaggaagcactagaaatgcagttaggacacatctatgtattcctggctctggcttttagtagctaggtggcagtgggcaggttatttaatctctctaagtctcagttttcttatgtgtaaagtgaggatacttgctacctcaaaggtgatttttttttaatgatcaatgagaaatgtcttaaaagcaggtataagaattcagtagacactgtttatgactattatcattattattagcctggcacactcccagacctcagttaattgtagttttttagacagaagttttcaagccattctttcattcaaataaatagttcttaaacactactgtgttctaaagcttatgctagctgtggggacaaatttgaaagaggggaaggaagacctactctcacctctcaatgtgttcatgcctcaaaatttggagggggaggtcaggcatggtagctgtaatcacacctgtaatcccagcactttgggattctgaggtgggcagatcacttgaggtcaggagttcgagaccagcctgaccaacatggtgaaaccccgtctctactaaaaatacaaaaattagccaggtgtggttgtgggcacctatagtcccagctactctggaggctgaggcaggagaatggcgtgaacctgggaggcagagcttacagtgagccaagatcgccccactgcactccagcctgagcaacagagcgagactccgtctcaaatatatatatatatgtgtgtgtatatatatatatatgtgtatatatatgtatacatatatatgtgtatatatatatgtatacatatatatgtgtatatatatatatgtatacatatatatgtgtatatatatatgtatatatatacacacacacacacacaaaaattaatcaagagttgtggcacgtgcctgtaataccagctacttgggaggctgaggcaggagaatgaatcacttgaacctgggagggtgcagtgagccaagatggcgccactccactccagcctgggtgaaagagtgagactccgtctaaaaaaaaaaaaaaaaaattggagggggaacaggatggtcaataaataggtaattaccagtgtaaagccataaactctgtaagtggtgtggttataaaatatccagggaaggccaagcgtggtggctcatacttgtaatcccaggacttttgaaggctgtgatggaaggatcacttgagctcaggagttcaagaccagcctggcaacatagtgagaccccccaccccccgccatctctactaaaaaattaaaaataaaaataataaaaaataataactttaactgaccaggaatggtgacgcatacctgtagtcccagctacttgggaggctaaggtgggaggatcacttgagccaaggagacagacagctgcagtgagctatgactgcaccactaccctccaacctggatgacagagggagaccctatctcaaagaaaataaataaaaaataaataaatagtatgataaaatgtccagagagcatgcaggaggagatcagcttagaaaaatcctgtcagccacagtggtctaggacctcctctgtgaaatgtgttcagtataattgaagaactgaattaatttacatttaaaaactcaaatgatataaaatactttcattcagcacatttttattgtttttgcaagatgatgtttcactttaactgttgaaaatttagcatctgaattgagatgtgctgttaactataaaatacaaaccagattttgaagacttagtgcaaaaaaaatctttttactgtctcattaaagatttttatgttgattttatgttgataatattttggatatattgagtaaaaagcatagtattaaaatttttttacttatttcatgtggttactagaaaattttacatttcataagtgggccaggtgcagtggctcacgcctgtaatcccagtactgtgggagcagatgacctgaggtcaggagtttgagaccagcctggccaacatggcgaaaccctgtctctactacaaatacaaaaattggctagacatggtgatgcatgcctgtaatcccagctactcgggaggctgaggcatgagaatcccttgaacctgggaggcgcagtttgcagtgaactgagatagagctgctgcaatacagcctgggcgacagagggagaccctgtctcaaaaaaaaaaaaaaaaaaaagtcataagtggcttgtgttttatttctattggacagtgctgattacagcagaatgcaaatgacattcacagtagagaactccagaagatgtggacatttcagaagagacccaacttcggtcaccttggacaattctttctgacagatctagagcaaagcttaaaggatctgagggcaccgattcaaaggctgtttctggggctgcaggagaagagaagtgcctctgaggtttcgtcctaactacaggaccttgctagagttgccagatttagcaaacttataaattaaaacccggcaaccctagaccttgggtatgtcatagaactgcaacaagcctcggtctcttcatctttaaaattgggataaaaaagtaactgcctcgtgagtgtcctgtaaagcttaaatgaatcaaataagactagtaggagatgcattgagaaagtttggcctaaaagagctaagcaatgaaaacaaattggggaactttccaaacgtgcctatctttctttagctctgagcatgcaggtcagggagagctctcccaggccagtgttaagggagacaccagcccctacctgggagatgtattaggttaggcctggcttggggatttccatggagttaggatccggcatgggatcataagccataaggaggagggggacacataatgaccatgtcgaatgtcactctgctgtcattgcaatgccttgtataagccagaaatgccacaacagtctgcagtgctgttgccggttgacagaatcatgtgcctttagcaccaaagaaatgtgtgtgacttgagtgtcacataaaacccttaaaattagctctcttgggatgggcgtggtggctcacgcctgtaatcccagcactttgggaggccgaggcaggcggatcacctgaggtcaggagtttgagaccagcctggccaaatggtgaaaccccatctctactaaaaatacaaaaattagctgggcatggtggtgggtgcctgtaatcccagctacttgggaggctgaggctagataatcgcttgaacatgggaggtggaggttgcagtgagccgagatcgcaccattgcactctagcctgggcaacaagagcgaaactccatcaaaaaaaaaatatatatatatatatatataatatatgtatgtgtatatatatatatatatatatatgtatgtgtatatatatgtatgtgtatatatatacgtatgtgtatatatatatgtatgtgtatatatatacgtatgtgtatatatatataaattgtcacaaattcaaaataagtctacttgtatcacttatctaattgcagatgaaaatgtagttcttttttatagatgcaagtagcttacattccaaaaagaaattatcctcccccaccccaccccagattagctctttcctcataagaagctgaccatactgacattaagcatatcagaggctgaggaggactaccccttgcctgtgttttcattccctgctacctaatcaggccctgggagatagaactaatttttttaacgtgatgtttctttccatcagaatcaagttttaaatgtttcaggttagctatgtgaaatccacttaacttaaaaccatttgcaagagagatcaaatccaatttgctaatacaggacttttttttatttctgagtttgaaaaaatcttgagctaaccatgtcagaaattaaaaattgaaaaggactctggcagcctccccatgtgcctaatttggctttgctgaacaaatgaccaaattggaatgagaattacatacaggatttgctcaacatccttacttcttcaactcatttctcactcctgaaaaagtaccaagtttgcatgcaggagggaacatatctatattgaccacaatggcgtcaaaccaggtagaaatagaaaaatggtgattttagattctagctgtgaataaacttctacagtagaagatatttgtcatagaaactcaatttaatgaatttaggatcagaaaggaccataatggtctttttttttttttttggctaattttattaacaggttattttgttcatgccctaccttgcaaagagtagtaataaaaatattaagcgggtaagaggaggaggcttctctgaagtccacctcattttgtctttaataaggcattacattgcacacagacaccagaattctctgtctttctttaaggagatggaagaggacagtagagagagcaccagagagtccaaagatcaaggttcaaatcctggctcagtcagccattagctgtcatgaccctaggcaagtcatttcacttaagtagggctcagggtcaccatctgtctatacagcaaaagtctggaccagatggcctttgaggcccatcttaacagtacctctgccattctaatgtgacacagaaaaggaaaccacagaggtttctctgaaggagggggttcaggcaaatgagagaataatacctaggtgaatagaaccccattcttcactgatgcttagtgttgagctgatggttgtcagtggatggagtgatactcaagagcttcaggtgtcacacagctcaggttcaaatcccacctctaacacttaccagctgcgtgttacttcagcactctgagcctcaatttcttcatctgcaagatgggaaagcattatatatctcataaaattcgtaacaattgcttatcacagagcctggcacatgcaaaggactcaataagagttagccatgatcaccattgttacaaaacaacccaagacccagcaggaggtgagatgtttcttgagtgcctcctgtgtgccggttacccccacccagatcctcaccacttttgcaccttctccaccctataaggtcagtgtgagcaagaaaatgtggctaagagcacacacttggctctaaaaccagctgccccacctaccaaccctgtcaacacctttatgcctccactccttcctccgtaaaatgggaatcatagttcttacctctaggtttactgtaaagagcaaatgaggtgagcatatagagggcttagaacagtggttgacactgagtcagtacgttacaaaaatgttagttgttatcatagctaaggagagtgaagctcagagaggtaaatctgtttgcccaaggtatccgcttatgcatagttgtgcagaaatgtgaaccctgattgacatgaacctggcatatatatcccagagatctgggatagggagatccttcctcccttatacctggttcctaaggcccctcctggcctgttcccccagtttcaggatggagatccaggatagggagatccttcctcccttatacctggttcctaaggcccctcctggcatgttcccccagtttcaggatggctgcctgtgggctccagagttcagatcagagggctcactgggagcagtttgttgagggctgctggggacttgggaagggaaataaatcccaaccctctcctcccttgcctgcagccactgaggggagaaagtgccctaggaatggagtatctcgggtgtcctaattggcacactctgacccccttgcctctcctccttgcagaaggctatttttcacgagagagttctttctctttgttccagtgctcattgcacatctacggatcgatatgacatcttatcctctaaaacattcataatgtctgcttcctaggattctggtggccgcgtgccacgtgcagcctgcgtcttctttcctttgtagtcagtggtctcaccgatctgcccctctttaacggggctgctggttgccgttctttgaagaaagacaaatattgtttgggttgtcaacagtgaatgacaagctcggaggggagaaagatccatttaggtgtagatgtgtgtattgtggggatgtgtttcgttatcagaaaagctcttaaaatcccagaccatgatttatttggtgaataaaacctaccgatattatcattctctaaaggtattttgatcacatgggtcctttcttggagaaagaaaagcttttatttcttaaccaggaaaaaaattgcagcaggaacggggtggtctgcggtgggaaacgacactctgtgcggctaatggctccaggcttgtgtttatctgcatgaggctgagctgacttggtggacaataggatgcctgactagcattgccagtcaggtgcattcctggccaccccgcacaaggaaaagaaagtggctgtgagcacatgtgtctttcttatgtattgatctttccagtgatgctgagagctagggggtgtggttagaggtcacctcggcacaccagatgccacacactcgcagtgtcaacagcacccacctgcagtgcacctgcagcagcgggttccaggagacaaggggagggacgctgccagtcggggagccccacgcatcctgaagctgacaggagccccatttgttttctgcaaacacagcaattgattaatctcgtaccacctcccactcactgtaccatcctgagcctgtcatgagaatagattaattctctggtctttccctgtggattcttcttgtctcaagaacacactgctccctgatcccagagctgcctcacgcaactatcaccttgttctcatggcagacacaaaggaggggacagaaagccttgctacttttgtgagggactagaagtaggaaggcagcagacaaaatccctgctgaggacagttttgggactgtagctggaagatttgagttcctctagagaggtgaatgcaggtgagtttctccaatgccccctctcattttgatgatcttgccacgattctgggattgtatctgcctctcatctttcctcttctttgtaattcctgagccataagccttgcaaccatttggagctgcaagctggaagtcggacagaggctagtaagctttcagaacattctcgggagataggtgcacaaatcccattaccgttaaagggatttgtgggtgtaacttccatgcagtgctttgaaaattcattccactcagtgtattgcaacactgtctgggaaaaataggagaaatcacttcaccaaggtggttagaaaaggatttttggtaaccctttaagatttaaatttttaaactccttttaagacttaaggcatttccaagaatgttatcccacatagttttgtttgcattacttctttcaggctgaaggtaattttggcactgacagcattcctaaaaataataatacattgcagtgggccccctcctctttgaggaagaggcactgcactcaactgcatccccaaaggatgacaagcaaactgacaagggaaaaaacaccaaacatgttgttgactggcctgactggcaattgaagttgccgagcagatttattttacgttgacaatggtggttcaagttaaatagcaaactagttgccaaccaaggacatattcgtagagactaatggctgcttacaaagggaagtgtgtattcatgagtgagccttgacaatatttagtaagtaagtgattctatagcctacctgtcctgttcggtcttgtctaagtagtggttcacttggaaacctcagagggccgatgtcctccagtgagaactctgaatggagtctctaggaggacagtatgggaatttagaactctgactctgaagttgcatgtgtctgggtctaaatcccagatttcccacttactggctgaattgtcttgggcaagtctcttaacctctctaagctcctatttctttatctataaaatgtagattatattaccacctaatccagtgagaatgaaggggaaaaagtaaacgttcatcttcttcaaaatccagtgtcatcccttctcttccaaacaaaaggcaaagctcctcaaaggcaactactccttcaccctgcccgtcccttcacccaccactcctccttctcactaactccactccccttcggcgtgctcttccccagacgtcagcataaactgctttctcaattcctttatgtctttgctcaaatgttacctatcacaaatgccatccttgaccagactacattaaatgaaaaaaggaagaaattttcaatgcatcccccacctgcgagtgcctctgaaccctaaacctggcttttcacttatgtgtttagtttctacacctgcctctagaatgtaggttccatgacagcaaggattttgtcttgttaaaactgctttactcctggtgcctaggacacatctgacacccagtgggtgtttagtaaatatgtgctgactggcaaattatgaatatatgctgcatgcaaataatgagcccaatacctggcacatggtcaaaatgaacgttaattgtcaccatcaccattgagtagacttattcacatgtgttaattttcactgctgattgcaaaggggcctttgcaggttgcctatgcaagttcagggtaagcagttgtgcatgttagccctgattattccactgtggttctctcctcccagcagtggcacttttggaattggtatatttcccccaggagccccgacattgttgacttaattggctggtgcagaggcacggagacccagccctaaccctttctgtcatcctacctggtctctgaatgagctctgccatcatctctaaggcccttgtgtatctgatggcatgctgagccccaagacccagcaggcatggctctctcctcctgctccctgagctctgcttggcctgcagtcttccattttcaaagggaaagcccaatctcctcctcgcgttatgtatcgacaagtctgatctttaaagacaccccctgctcctgggggcctgctcggcaaacacagagcatccgtggcctccatgtttgccctctttgacaagcaggggctgagcagctctctgggaagtattgctgacatattgattgactctcttgtcaggttgatcctctgccagccaatgaacacagaaggttctaagtggcacccagcagggcccacacattccctaattactatttcatacaacccccattccaagctgccacttttctggccctataatctccctgtcctgtggttgctggagaatcctcagttactcgcaacgaaccctgctccctttctcgggtgtcactcccttgcagtattgcctttggaacccacctggcacaaaaacacagcaacttcaataagaaaatatcacaccctcactccacgtaggtctgtttattatccttactgaaatcggggatctgtgtgtggtcccaccatcctgtcttggttcccttcagaatgccaagaaagttttctccaattagccggagggatactctcagagtttggctgcctattgtgttttaagtggctggcttcccagctgccacctggatttcatgagtttccgctcagagcccttccccatcccatccttagtgacccatggagcccgagggtctctctgaagcggagcctgtcagatcatgatgaattgtacattttggctgtcagtgagagggaggaatgttagggagagggcctcccaaactcatttcacttttgacccccagatgatttggaccaggccttttgggatgaactgctagagcattcaaggtggggcgggagagggaaccaccccagtgcatccaggatctcttgaggagaccagcatttatttgaaatcttgagatgaagcagcaataactctggctactctgaggtttctcagctttctttttttttttttaactaattaaatttttggtagagatagggtcttcctatgttacacaggctggtcttgaacacctggcctcaggcaatcctcttgcctcaatctcccaaagcactgggattataggcgtgagccaccccatccagctcagctttctaagtctggttctgagagtaaattaaaattggaggtatgatgatatcacatttacagtgctgttttttgttgttgttcatagaagcaaatatagtggcccaaagtatgtgctaattctctctggctgagtttcagaaaggaccttaacccaataaaacctaaagggatgcacagagatttgctgtataaaaatgccatttcctagtttccttataggtgaaagtatcagtcaagctagcctcagacaggctgctgtaacaaacaatcccaaactctcagtggcttataacagtaacagttcatgtcttcatacatgctgtattctatcactggtcagccatggctgtagcccacgtcatcttcactgaagacccagaatggctatgtgataaagtatgtgctgaattcaacagtataaagaaatctaacccctctcgggaaggggtgtggtcattcaccaaccccaatgagattattatgagttttgaaacaaagaagaggtttgctgagactccattacccatagaatctgtaaccagatcactatgaaatatgaagcagatagccacctcccacagtaatttccttctgattctgaaatccctgttctcaaacttcacagtcaatagtttcctcatctgtgaaatggggttgataatagtacctacctgtgagtcttaagataatgcctttagaatgtctactatggtacctggctatagaaaaggttcaatgatggtggggcgcggtggctcacgcctgtaatcccagcactttgggaggccgaggtgggtggatcacgaggtcaggagatcaaaaccatcctggctaacacggtgaaaccccgtctctactaaaaatacaaaaacaaaattagccaagcatgcgggcgcctgtagtcccagatactcgggagggtgaggcaagagaatggcctgaacccaggaggcagagcttgcagtgagcctagatagcgccactgcactaaaagaaaaggttcaatgattggcagcaggtgttgatatgctgatgattaaaatatccttccctttgcaaactagtccatattgctaccagcactgttttatcccatcttctatgcctctgattatgtgttttttaatttataagcatataacatcctacaatccaaccccccaaatctgccccccgtgtatcattatctattctaataaatattgatggagtgccatttatattcaagacactgtcagatcttttgggggttgcagatgtgtaacctctctgtggcccttaaggagccattattctacctgtacagggaaacctttatgaaaggtaaagggagagattgattgagagactgatttctcagcccaagccatagagcaaatcagtagcagaataagaaatagggctctcattagtcaggaaactcatttacttcacagctccctggggtctttatcctaaggacactttagtccctccccaccggccagagagagcatctcgttttcttactcaagtgagagagaaagaatggctgattaaaaaaaaaaaaaagtgccaacaaaaacctatttcagacgctcccaaaaaacaagagaaggtggttataccccagatataattctcacttatttacttaatgttcagttcaacaacagaaaatatgcccaaacttgagtttcatttttgttgcattgcttcttttggaaggacaggtctcatgttcagcagatttggcttttccccttctccacctccatctcactttcttatttttcttctcactcctgggagttgtctgagaagttactggtgtactctgaccctaaccctttccacctcatctgtagttttcttattttcaggatacttttaaaaaataaaaataaaaagatgccatggaacccaaaacaaagaaaaaggtgggaaggggaggcaagagggaaggcatccttggaaacagaggaaacacagttgcagggatgtctcttcctgttcagtaacattaggggattgtttgcttccttttctcccaaagctgatggttgcaatatgttctgcaccttacagtggcaagattgagtgctataagagcagagcagttttgacaagagtttgagatgggatgttggggaggttgtcatctttgcctgatgggacccaccactccttccatagacgtgaaatcaaagctttgttaggcctgggttccagcggcacctgcagtacctgccagtgtctgtcttaagaccctccttgaaagaaccgcacctccagtgcagctgcagctggcccaaggcgagcttcaataacccaatagtatcatttttttaaaaaattattttaaaatagctaattccttggctcccttcacctggtaattacaaatcagaagctatcgttatcttgaagccaccatgattagttctcatttcctgacctctgtatagtgaaaatatgtcattatttgaggcaatggaatctggtctcttcaagtgagtgacctacatataacggacaaactgcaggagaaaattaggtgttaccttgatggaaagtgtacagtaaatgtcacttactcttattactatttatcatctcaagaagttgtaacagtgggcctttcactttagaggaaagaaaacatggttctaagatggagaagagtgtaagtgaaaagcagacacacccacacacacacggacaccttgccaccttcatctgtggccatcaatctgagctgtattgtttgaagataggtttttaaccttaatagaatgcagtctgactttacgtggtggtaggcatgcagaattaattgctgtgtgaacaatttcctaagcattgttaattgtgttccctgcagataattgtttctcccatccccacatcagactccaaacgtctccctgtcaacagccctttctctcctgcggtggtaggaatgtagcaacagtgtcaacctgtgtccagtggaaatgccagacatcgtttggatgagagacatgcaggggaataaattccttacttattctcaaaggaagcatctcttagataagggctttgaaagaatacaggtgtttagggtttgcttttcattccactcagtagaaaaaactcaccaagaaccatcagggatagggttgtgttaagtttgctaaactcatggtggggagttgacacaggcaggatgacaaggaagaccagaagtttgtttggaggcctggggtgcccatgggagtcaagacttcttcagacgtgctcagttccttagcaaagaacaggcagtatttcagaactctgtttcattccatactctgctaaagtgagagcgacagagacagaaagaatagtaatgttttcagaaaaggaccccattccaccatcaaccccccaagctttttctacaatgtgctgaaaggtatccactcatcatgaagaggagtggaaaggaaaaatattctaaaagtttgaaatagttagggaggtgggccagtaccactatagatgctgctggctgcactgatagttcagagcaggtaccagcaaacaggtaccagcaaacaggtactattcgggtagcctcctttgaagctgatttacttgtgagtgtatagtttggggaaacaatccttgtcaatgcccctagactaacagtctaaaagcaactgtgtccagagtgtagaaaaggatggatgtggtagagcagcactctttacagtgattcgaaagggccattttcccctccatggtggcaccgtttggaagatctgggctgtgttttctcctccctcctccgctcactgtaagggatcctctccccctgagactgtgagcagcagcgccagaaggggagacctaaccacccaggtctctgctttctgtatttagctaatccctgtggcctggggcaagccatttttgacgcagcttcctcaaaaggcaatcgcttggaaaagggcacctggccctcccccttgacatttgcattgctgaattatctattcatattttcattactttgtctctcctgcagcaatgcatctgctcggactcaattggcaactccagcctgcagatgggcacacctttaacaatgggataaggaccggcttaccaggaaacgatgatgtggcaacaatgccatctggaggcaaaggtgaggttacagctgctgcttgccctcttgaggtcacaggaaaattctgagctctcgccagctggttcaggttttctaatccaaatcttggaaggtatgccaaaagaaaaagaaacggggggaaaaatcattgcctttcataggtgcccccattaaaagctgtttgctgttcctgtctgttagctgtgtttggctggatcactcagagctggcacagtgcctgctcagagcaatgtgcatacctatgctatctgcagcaactggcatggtccagagctacttgaaagcatcccagggcctgtgcagaaacagcagccacagcagcagctggagtggcagcagcagcagcagcagcagcaggagaaagtcctgcctaatcagaaggcagagagcagcaggcagcacatgccatcagactgggtccctctcccaggagacatgcagcctccctggggaggaagctgcctggcttggcatgaaagagaaaggctcagagctgctgtgctttgggggagaatagaaaggagttttgacaactcggcaacaaagcttctcttctcagaacagtgaaggggacaatagaaatgtttattgaagcaatcaggcaactgtatccttgaagggaaaaaaaaaggtgctaacaaggtgctaagaaggaggagagaaaacagaaccatagggtgggggtgggggagactggagcaattaagacagagcagccaatggaatggttagccaggctggcacgcagtgagatatgcttaattcgggatggaaatcgcaagggagagattgtattaaaggatttctccaacatgcaaatttccattctgccttttagcatctatagccacttcacccccacatttcggaaacaccctacagggatatttcaaagaagggaaaggaagcagcatttattaggcacctattgcatgccaggcttagcattgtataactttaacaactttaaaggaaggaaaaatctctctgagaaactcaggaccagaaggtatagaaacttactcaaataggtacaaatttggactcagagttgtgccctgtgcatctttgggcaggaggttggagctttccttcaagcagtcattttccacaaagaagattccagaattcatctgcccccagaggtgcacattagtcatcctgagatgctaatgctgcttcaattatcctccccagagctgtcctaatgctttgaggatgacttttttgtctttttatccagtctttaagaatcgctgtactcatctgtcataatcataacactaaattacctttaagtaagcatgaaaaagttttatctgaggatgaaattatatgctttccataatcgggtaagttaaactagacctaaaactgaaaagtatattttgccttaactgaccatgttctgccttaactgaccaaaaagcccagagccaaatgtattgacctcagatttgaaacctggtcacctccagtacttgacactgtctgctccttcagttttatctagggcaatggttcttagtcatagcatttttgcacccctagaggacatttggcaatgtctaaagactattttgattgtcacagttggaaggggcatggcaggcatctagtggataggggtcagagatgctgttaaacaacctataatacacaggacagccccctgtgatgaagaattatctcctttcaagatgacaatagtgctgcccttggaaactccactttatggggtctccgtcacgttttatccataaatgtcctttaatctacaagtcagcacctcatcccttcagaagaatgcataacacacatgtgaaatgaatatgcatattctatcattgggcacagagaaattgtttatatgtgtatacattctgaaattatatgccaatgcttttcgagtagtgtccttcataaatgggaattagtgatctctactggcctccgtaaattaaggtcaagatcaagcactcctcccatttgtgataagcctctatttctacctctgctccccaccagcttttgcatcccacacccatagaacaaatcttaagagtacaagagtatgcgtctctaaattaacaaatgaagaaacactttccattgtgtctttggaaagaccagaatttttcccctcctgtgcaacatgcttttgaaaatgttgttgtagaagtcatataacattactagttcagatattttccaaataagttatgtgacagacaaaatgttattttgtttttttgttttgttttgtttgagacagagtctcactctgtcacctaggctggagtgcagtgatgcaatctcggctcactgcaacctccacctccccggttcaagcaattctcctgcctcagcctccagagtggctgggactacaggcatgtgccaccacgcctggctaattttttgtattttagtggagacggagtttcaccatgttgcccaggctggttgcaaactcctgagctcaggcaatcctcccatctcggccccccaaagtgctgggattacaggcatgagccactgtgcccagcagagacagacaaaatgtttgccaaatcattgtccagtgaattttgtcaatagaatactcaagaaaaaagtgtgagaatttaaaattgcttagagatgaaataaaatttgaaacttaaaaagagatcagatctcttcttaagtggttttaaggtttggcttataaaatgactaaaatgttttcagttctctcacccatgcctatttcttttatcaaaagtgaccttgggtttgaatttgtatacccagtgacctccgcgctccccattccccaattctatacatttagataacctgaatcaattccaatcgacttcttttccagtgtttcaaagagacaatcaagatatattggcaataagttaattaaataacaccgcctcctttttttggtgtaggatattccttcactccaatgttttaaccaagatacaccacacattgccaaggaggataatctcattaagcaattactggataagtatccagcagaagcaaattaaatgtaagcaaaacacaggcatgtgagtcccatctaagatggcacatcgatagagatttcattacctggtctttaggagtatttacattcctcaggtttgggaacaagtctaatagacagggcagcctacacactctgatatgttggtggaaacaaagcacttgattaattagttgggagagtacattctttggtctttgcctttccgttttccatttgttgttgttcgagtcttatttttctttcttccactctccttcaattaaaccttaacatgaattgttgctggctttcacatcaagaagagggaacacacagtctgccagaatcactcaccatcttgtgtgtatttctatgttaaaaggaatgaactcatacatcttcattacaagggcatggagaactttctctgtagatctgggattagataagccttgagaaagacgattcaatacagtattctgacctggtcagataacataagggaattcagtttgattggccaggcccagggaaagcatacaagagattttaaagggcgcatcatacgtacccaatttgtgcacagattttaagaaagaataaactatcaagtatagaattgcatggatcattctcaaaacctatcactcattttagattcaagttgtcctctatatcaggggtcagcaaactacatctcatggaccaaatctggccagctgcctgtttttataaatcaagttttaatggaacaccaccatgactattacctgttgtctatggctactttcagaataaaatggtggaattgagtgggtgcaacagagactatatggcccaaaaagcctaaaatattcaccatctgaccctttaaaaaaaataaaaagtttgatggccactctgtatcattgccaatcccatttccacttttctagaacttttcctataactatccaagttataggagtccagaagaggaagatcaaactcccaatacatcacttcttcctacttgaccaagccctagttataatatattcttggtaactttgcattggaagatgcactataatataggattttggagttggtctggtggatacaaacaccagctccatcacttagcaactgtatgactgtaagtgggtcatttgttctctcccaacctccagttcctcatctgtgaaatgcaactccctcataagcttgctgtccatcataaatgagatgacccttgtaaaacattgcatgtggcatcaggcatgtaataaatgatccacgagtcttagttgttgaaactgatgtcatctttacatctctcagctggtccatttaacaagtttccatggcctgtcacatcttttgagaggctatattttccaaaggtgaagaccaaccaggtgcagtggctcacgcctgtaatcccaacactttgggatgcgaaagtgagaggatcacttaaggccaggaggtcgagaccagcctgggcaacaaagtgagacctcatccctatttttaaaaatataaaaataggccaggtgcagtggctcatgcctgtaatcccagcactttgggaagccgatcacgagctcaggagatcaagaccatcctggctaacatggtgagaccccgtctctactaaaaatacaaaaaaaaagttagccaggcggggtggtgggtgcctgtagtcccagctactcgggaggctgaggcaggagaatggcgtgaacccaggaggcggagcttgcagtgagctgagatcatgccactgcactccagcctgggcaacagagcgagactctgtgtccatatatacacacacccacacacacacacatatatatgtgtatgtatgtgtatatatatatatacacacacacatatacacacatatatatgtatatatataaaataaaacaaaggtgaagacggccttcagaatatgaagatagacaataccacttcacctttttcctttaccttctaagaattaaccaaaccccagatgaggatttcttcccaacattggcttgatgaggtcagtaggaagcaggtcttcctattccaaagggccaatgtgtacaccaagttggcccctccacactgcattatttgtctcactggagcttgagttccatcattgccagcctgtctgttttaagccctaccattctcggtttataactcagctgtaaacatttatttgtgcctggagcacatttccttcctaccctttgaaaaaaaaaattagaatttccagatggtatgcaagttggaaaaaaatggcaaagactgttattctgtttagaaacatgtttttctacacttgccctttcagcagaaacttcataatgatttttactagttggcttaatgcgtggtactaggagccagattagcagggaggttcgtaaattcttccgctggctctcatcagcctctcaatgaacacagcccagggttttaaaatgatcacttccctatatggggcttttccaaagtcggtgaagttcccagaagggcaaagggtcattatgtttgagccaaacacccctttactgcacgtctactggcaaatataccaacatcctaactaccaacccaacaactcccctcatttaggaggccatgctgttctacattgttgcagatgggtactacttacatgcacttatactggtggacttttgcttttgattgccacccatagccccattctaaattgcatagtttctgttgtacatagcatcatggtggcttgacatgggcattaataatgagatccaatttccctttctgtgcatttgcccatatcctcactggccacacttctctttcagaattgacttgtacacccagatatctggtctatgatctctaaatatgtacctgtggtatacctctgatatgttggcccttcatacccacgggtatccacagattcaaccaacctcagattgaaaatatttggaataataataatacacaaaatgcaaataaaaatgatagtataacaactatttacatagcatctacattgtattaggtattataagtaatctagagataatgtgaattatagaggaggacatacatgggttatgtgaaaatactacaccattttatataaagagcttgagcatttacagattttggtatccacaggggtcctggaatccataccctgtggataccaagggatgactgtgggcctgaatgcagtcagcataggggttagccacatgggttttagtgtctgtcagacgtgggttttgatcatagatctaccagtaaaaagctgggtgaccctaagcaagtcacttatcttccatgaacctcagttctctcatctgaaaaacaggaaaaattgtaagagtatcaggagattacatggtgattagcagccactcaataaattttagctactatcaataatagtaaactaaactaaatattaatgcaggagcaagttcatctgaagagtcataggtataaatacttgttaacgttcctagcggcaaagagttgactatttttatctaaagcaacaaattgaaatttcaaaagatgtaaaagccacatgtagtcccaagagctgaaacattttctaaaagtcattattgtgtgatgttgtgaacaccatcacagaagcagtgactttcaggatgtaattgcattcctaaagtatagccagccagcagcagggtgaaggctgatgggttgctgatgtctcagctgagctgtattcttgggcagtcaatctaaggtccttggaagaatcttttcacttatctgttggttaaacagaaccctcagatggttgtcctgattcccaaataaatggaaacgaggtgtaatgactgtagcaatattctgaattcaattttatttgcaatagataaaaatatgtgaggcagaataatctgcaaggcagatttatgctgaggtgcctccagagttcggttaagttaggaagtattaatatgaggcttcatttccctggtatgactatgagtccattccctttatcacttgtttggggaatagtttcactgtttctgtaaatgaattatggcaacattttctgaaatgattagctcctaatgtagctatggaaggctgtcattttgctcaacatcagtcgtgtttaactggttgaaattttaggtacatatttcagaaataggtaatagtttcacatttacatgagcaatcttccgtggagttatagagttggactatcctgtaaaattgatcattagaatgttgcctctaaaaacccagaaatctcatctctaagctaaagatgaactagccagaacaattgtatcttaagcacgtgcttcttagggcaaaatgatcatcatgacacttttcattgtgcagctcttggatagactgaaaggtttgccatggaagccccaactctgggagacatgaactggactggttcctgcatgccagggtgccaggcctagtcattgcctagaacccaaggataccagtgagatcctcacagaatgattacaggatgctgtttaatgcctcttctcttgatgcccctaattcaatctcaaagtgaattcataggacgctggacaacaggctgcctagataagagataatgggaatacaacatacaccccaactctgatgttgaccaaagaatacctactgttatagtcaatgcttgataaatatttattgcatggaagtatgaatgaatggcccacccaacattgcttaggacatttcttaatcattgttaaataaataaaatctggctgcttttcaataacgcagactgcacagagttgcccatgtgagaagcagctagaccacacaccaacaccagcaatttgcagagaatgaactggtgatgcagttttctctgaccatcgtatcttaatacatgtgacctgttgtctgcccctcccagtctgcagatgtactggtcactcactgtatattgatttcagctgctctggaaaatgactgccagttttattaagggctactccacccattggccctctttcattaatagtgcctacagcaggcagcctgtattttttattaggccatcacaaattcaccccccgcaactgaaaaaaagtacttacagctgattttaggtagcatcacaacagacaggacagaaggacgtagagcacctacaatttaggtacaacatgcagaagcaccccaaaatacagatgagtagacagactcagagagggcttttgattagcccaaaggcacacagctggtagctatcagagctgggattcaaacccaggctgactagctccactgggcaacattgcctccttaaggtctcagaacttctcaataggatattcagctagaccttaaaatgtctagctaggcattagacattttaagataaagataaaaatcttaactactttgtttccttgctgtctgcctctcagtgatgtcttgtgagggactcaccatattggtggtcctggaacagctggcatggctcagggaagcccagcttcaagtccttcttcatggaactcagcctggctttgatgctgttctttttgaccttagagaacaacagagatctgtcctcctggacatcggcccagaaatttgacctccaggaatagagtcactgagatggttccccatgctggctgcagcaatttacagaaaaacaccttttctttttatctctttggaggcagtatttgtacatttttctctttttcattgtttttaaaattacaaaagttatacacactcattttcaagatttttaaaaagtatataaaaaacttttcttttgctatcatgaatatttctctaacaattgacaaatttgaataaggcctatagattacagtcatgcatggcaaaacagtgtttcagccaatgattggccagatattcagtactggtctcataagattataatggagctgaaaaattcctatcacctagtgacatcttagctgtccaaatgttatagtatagttactttttttattaagttagtgtagcctaagtctacagtatttacaaggtcaaaagtagcatacagtaatgtcctagcccttcactttcactcaccactcactcactgacttaaacaaagcaacttccagtcctgcaaattccattcatggtacgtgtcctatacaggtgtaccattcattttttatctcttataccatatttttttactgtgtcttttctatgtttagatacacaagtaccactgagttacagttgcctacagtattcaatatagtaacatgctgtacatgtttgtaacctaggagcaatagggtataccatatagcctaggtatgtagtaagctacaccatctagatttgtgtgagtatactcacaccactatgaaattgcctaagagtacatttctcagaatgtatccctgttgttaagtgactcatgactgtatatatatagagagaaagaatgtgtgtaaaaaaatctatatatgtacatatatatgagtaaaaagtgaaaacccctctttccaaaagtgtaattcagttacacacctgaagaacttaatttgaaagcaaacactagcttgtttaacaatatggatatcttctgttaaataaatcgagcttgtgaaagtgaagtcacctgttaacaagcctaaaagctttctaataactcctcctccctcctgctgaccccctacccctgtcgcctcgcccaacacacacacacacacacacactcactcacactcacacttcttcatagcatatacccagcaatgatcctcctgacccactctgagaccacaataggctaataaggaatgccatttaagatatctttgggtctgagacactctaatatagatatggacattgagactttgagaaatacacctgcctaaaactagctagctgcttagtaacaaggatggaaattcaacataatcattcatttacacctgttccttccacaaacatttcgaagtcattaagtcatgactaggactcttgacttttggttcttaatctaaggattttctcaccatatcacacctctcccagtttgtttgtttgtttgtttattgttaagattttacacaaaaggcaaattaagcatttgctcatgactcttcaaaaggatccacaagaaaagttatttcaatagtaaatttcatatagagcttctaaaattttattttatttaataaataaaattcagtttacatgttgtcaggttctaactgaggtctgaggggagtcggtgggagagtggtgggtagctggaaaaaccctcaaagaatcatagacagtttcaatatggctttactctctctctctctctgggcatgagtgagcctgggtgcgagcctggttgcaagctggatgtacagcatcagcagggtagttataccttttacagacaatagtggctcccagccaagcacaagctcacatgagtggttacctaatgcgcctcacatggcataattacataatgagcggagttgtgcgcctgtgctccaaacttgctgagttatgcgtgacaggatgtctccctcggcctagaccgcagcacatccattttccttacacatgtagattttcaaagtaaatctttgttaaggctctcactttaccctgtcatcacaggggttttgttacaataccccaccagatggatttgtagagtttgatccagttcaataagcatttatagatcacttacatttgccaggtgcaaagcttagagaacctagagatgaatctgcatctctgcctgacctcagggagcacagtgtccagagacagagacttaggaaggcatgcaaaatcaagtacaatacctaacaacatctgctgtgggctgcagaaaagcataattgctatagaaacacagagaaaacaattttgtctggctgaggacagtggttggggtggtattgtaaaggaaagtagaactttagtgtgaaggtgcacttgacctgaaccaggccctgactcccagttttaagcttgtccccataaatgaatctattccagaaaaataagactcttgatagagagctagatatatacaaatagacatttagacattcatgtatattgcatgtgcccacactattttttgtctcttagagaattccttactctgcaaagaaagccagatgctttcccacatagtttttcatcctttttttcattccatgtaagaacttagcaattatttcatgattatttcatgttaggcactatactaatctctcttttgtgtgcttctacttgttacaccctccaaggcagttagaactattgttcccattttacaaaaaaaaaggactggaaatccagagaggttaagcaaattgctagaggtcacacagcataaaagaagcagagccaggattcaaacacagttctatctgacttctgtacttcatcccccaggtgcactcccttatttagtgaatgggatgaggaagcgaggatctaaaaccctaaggggcactgtgactactgaggaagtagcctgtgctggctggtagtgggagctaatttagtcagtgtcctgaggccagggtgtaataaggaagaggacctcactgctataagaagcactggggctccttgtctgaatttctccagaacagctgctccctggagacaagttcccttgcacatctccagcatctgcatctggcttgatatcacaatccattcaggtttccacagtagattagaacactcgtgggtgctgatttcctgcctctttttcatatcctgtcattaacccagcaatgccggaaagcccaacagacataaaggaaagccaagcttattaagttaaagatgaatcatgtttttaaagttttctttttttatttataatgcatttctttaacttgttgccatgctgattgctggggtttcttttggtacctatcagaggcccacacactcttcttccccaggcggctctcttactatgtcccttccttactcctttttatattattatattccttctttttatttatatcctttttattatatcccttccccaaggaaggggtatcaaatgcagcattttaaagtaaaatttagtttccagtttatagtaatgagagctcctgatcaacttgttgtgataacaagtgtttccccctggacatgccattgttttagcaaaacccccaaataaacaacacctaatttagggttagggccttacaggtaataatacttattttgtgccagaaattattctaagagctttacacagcctaacctcagtaaaaccttataacaatcctgtgaaataaatagtgtcccatctatacacatgaggacactgaagcagagcaagatacatttagccagtatcaaagttaggatttgagccatggcaatttcagcccagggtctctgctcttaaacatgatgccgtattcctccccctgcaggtaagtaatcagtatccattagaaaagttagccaacatttaaaagttcatgctgggtgtggtggctcacagaggtaatcccagcattttgggaggccaaagctggagaatcacttgagaacaagagtttgagaccagtgcctgggcaacatagtgacaccttgtctctacgaaaaaaaaaaaaaaagaaaaaagaaaaaaactttaagcagacagggatggtggtccatgcctatcgtcccagctaatttggggggctgaggcaggaggatcacttgagcccaggaggtcagggctgcagtgagctgagatcgtgccactgcactctagcctaggcaacagagtgagaccctgtctcaaaaaaacaaacaaaacaaaacaaaagttcagaatgtttgctaaataaaccgtctagtccccatctgaaggtctgaaccactcaggacttctggctgtttattttatttttaaagatgagatgtgaaggaggcttccaaacttcctttcggacctcattccctacttttattatcctagaagtcaaagggttattcttaagatcgaaaccagtgtttctcttgctttattttaagtccctgctggcttcgtattgagctgcataaaaatcaatcacctcatattttaaagaaaataagagggaaaaactttatatcttcaaatcactctgtggttttcttttataatttagacatgaaagaccttcagagaccaaaagtgtcatctctccattttacacatagagaaactgggaccaagagacagtgtcagacaggctcgctcaccgtttaggccagtctttagcaattttctcatttctcaggatcatctgaaacctttgcaatatctggtggccaaatgatagataaatatttttagaagagttagtccttcacagaatgtcgaggggagcatcctggccccatcaggctgaagaaatttttggatctacaaggtcacaaaagtgatcgggggttccagaaatgaaaagactcccctcaaaacaagaatgacctcagttctttctgttttatttcagttggctcagcagttcttaggaatatagaagaataatattttatatttcttagcaagttcagaatcgatttgaaggaatcacaaatggcctttatactgagactttttttccccattttagagataaggaaaatgaagctctcagagattgattaacttgcttttcttgggcaactgctagtcacgctcagcttttccttaattctgtggttgcaagggaaaccacacttggaagtatagggggtgctgactggttcattgtttttaagaactccactttaaaaatagatatttttggaattcctattattaaagttctgaaggatactgagtgtgggcaaccaatattttcaacataagcaattttaaataatgcaacagagatgcattaatataaatgaaggagagatgttgtttctctgcggctcttagacttctccctctaactcaagatctgcttgagtttcaagtcttcattttctactgagttgttttatttattctgggctgatttttgttgaaaatgtcagagtatatttgtgtctagaaagaataatgaaaggctacaagaattaaatttggtgccaaattaacatcaccctcccctcccctgctgataagttttacatcccagtcacatttgggatagttggaagctttacatgtatttatcaggctccagatctgattatatttgatcagtaaagagtaataacataattttagaaagcattgtgccaagatttcggatgccctggggtgtgcatttatagctttgttatttgaaacctaaatgttttagctgtaacttaaaaagaaacttgccatgagtttaatcttaatattaaaacaacaacaaaaaaaaacctggcatgtaattaaacaaatatagagccaactaatctatacacgtcattgactgctgtttattccttttttttttttcagtgccctggtcgttgaaaaacagcagcatagacagtggtgaagcagaagttggtcggcgggtaacacaagaagtcccaccaggggtgttttggaggtcacaaattcacatcagtcagccccagttcttaaagttcaacatctccctcgggaaggacgctctctttggtgtttacataagaagaggacttccaccatctcatgcccaggtatgaccatgtttgatgtaatcaagcatttaaaaaaatatatacgtatatatgtgtgtgtgtatatatgccacttcacatccactacaatgcctataattaaaagatggacaataaaaatgttggcgagaatttggagaaataagaacccttgtacattgctggtgggaatgtgaaatggtgcagctgttgtggaaaagagacagtttttcacaaagttaaatgtagacttaccatgtgattgagcaattccacttctaggtatatacccagagaaaattgaaaacaccattttcttacaaaaacgtatgtatcagtgttcatcatagccttatttatgatagccaaacagtagaaccaacccaaatgtccaactggtgagtggctaaacaaaatccgatatagccgtaccattagtcagatatagaaaggaatggagtattgttacatgctacaacatggatgaactttaaaaacactatgcaaagtgaaagaagccagataccaaaggccacatattgcatgattccgtttatgtgttttgtccagaataagcaaatacatagaaacagaaaggaggttagtggttgccaggaactgggaattggggctaactgccacggggtttttggggggtagtgatagtaatggcctgaaatgaggtgatggtttacccaacatagtgaatacactcaagccacagcattgtaaaatcacaaaagctacccaccttacagttattcacagtgtcgtatgaattttatctccaaaaaataaatgctaatatcccaacctgatgaaaacagctttactaggtttaggggttaatcactgggtactttctgttcagatgttctggttattggattaatttgttaaaatatcactaggagacatctcagtatatatgaaaagaataatgtaacataaactaaaattcagcagatgtttctctgtggctcccctgtactaagttccttgggaagtccttggcactatgaaagtgagattattcacagcattggaagtgaagagattggattacattatggatttcattattttttctctcattcttcccttagtttgtcgtggtggaagttctattattatacataacacctggggtaaattaacacctacctagtttggttttcttttccaataagaattgtatatcctgtgaaaaaaccagtgggtttttcctgccttgtatgccctcaaatccaggaagaacataaggtacattaggaaaaaacccaaaacatgcatatatccagtcaaagctgactttgaaatgtgttggaaaggcaattcatctagaaaattcaattggaagaacttaaagctataaaaaaacccattggcaaatgcaaggtagtcaggctacaatttctttacctttagctcatggcagacattgctaatcaatgacagcacttttccttactgagcccagtgcacacatacctcccatataactcttaaggcagccactatcaatcgaccattgttggctctcaagatgaaactgatttgcaatcccatctttacagcctaaaatgatcaatataagaactaaaaggactatttcttttttgagcagggagagctgagctgtgtaggtttttatgatcatacacagcccgtgctatagggaccaatatgtaatgtggtaatcagtgagtcctccatccatccatccatccatccatccatccagaaaaaatatttatagggctagacactgattatctggagatgagttaacacagcccctgaccaagcagaactcttgataacagaaatcatatctgcttgtcaaagagattctcatcaagacaagaagaggagttcagctgaaaggaatccctggtgcatttctgtagcttctggacaggctgcaaggtgctgttctaagaagttatgcaaattgttaagtggtgtccttgaccttcaggctccactgattctcttgtagcaaaatgaaggatttacagtagtgaaatccactgatcggcattattgaggtaactgtgagcatgaatctgggcatcgctgagcataacttgcctctcaaccagttgcatgcaaggagctttgctaagaaaactacttcttccccacattacccccaaagctctgcttgcccccttctcttgcatgctccaggaaaccagaatcatggaaaagccaatgatcatggcaagtcaagttggtaactctctgtaactgagtggtagtggacagcaggcagaagcatactctacctggcttccctgctgttctgacattcaggactcaaatcctcaatgacaatgtcttttcttcctttgtggctacgccacactgtccatctcctgcctagactgtgattgttctagtgattgtcctctcaaaatagctccactccagagacagccccatcgcacatttcaagggaagggaaatgaataggcatgggctgatgtgtgctgaggtttcagtccagctgccagtttgaaagttcactgtgtgttgaggggtcaagtaagcaagccaccgtgccgatgcttagaaattcgcaagacaggtacaatataggggcactgttttccaaaaagaaagaaagaaagaaaaagactccgtatgtattctcacattcattcgctgtcattacatgcattcatgtccatttgatgaactacatttcctcaaggagacagtgcttagctctttgcggggataggcgactgacgtctcgaactattatagaatttctcatttttattggtatatcctatcaaggaacataagttctatggggattggcagtctagccaaggtgactcatttgagctggaaaaagagaaagtgaaagaggtggggtgggggtagaatatgaaattctattggctgtgctacgtgaaatagttgtttaaattttattgagtaccatgctctgaccaagagcctacaaggtttagtatccttgtccaaggatattacatacctgcttaaatttcccaagaatcagagtctgtcccagctgactttttgaaactggctttttatagagatacagagacaacattgcataggagaaaatgtccagaatgtagactctgccacacattaaccaggggaccttgagcacgtcccttaacttctcttaacttcagtttccttttctacctatgtaacctgcttcacaatacttggttgtaattacacaataacaacaaaggtaagatgggaaaaccctttgtaaacgaaagcgcaatagaaagctatgatatatgagtgttctattatacttagaatttatgtgtagccctggcaaatcctgtatgtagataggcaattatacaaatatagatttttttaataaattaatttctagtttcttcttctttctaaagaaaaaactacatttcattgcagaaaagttttacaaacagagaaacaaaagaaaaaagtaaaaacactcctaatagaaagcagtccccttttgctaaatgtttatatattatttttgttataataaaatgtatccatttcagtgaaaaaaaaaagaacctagaataatggtagcctcaaagaacaaaggtttttttttttttcttgtttatgctacaccattagtggctttcaaacaggggtgattttgccctccccgactcccaccctggaaacattttacaacgcctggaaatagttctggttgtcacactgtgaggaggttgctactagtacctagtggatagaggccaaggatgctgctaaacaccctgcagtgcacagggaagccccagcacaaagaattaacattagcttaagtgctaatagtgctgaggttagaaaactctgcttcgcatgtccctcttaggttaacaagaactttgctcaatgtcaacctcattcaaggacacagacctatgaaacttctactatgaggaacaagaaaaggagtagatggagaattgtgtaccaattcctacagaactctgcttggaagtcacacatatcatttaagcacttcttatatcaaccaaagcagtcacatcataactttagtggaggaggacataccatcagatggtgtcccctggaaggagcaccagaaatatcaatgaagatccctaatgacttaaacataaaacgttatgagacctgtcctagtggcctttgtgtgcatcctcaatccttttcttgaaaataaacccttaaggattttatttatattcccaaattgtcctgaaaatgtgtaccaattacactgctactcaccagcagcattgtggaaacgcccattttatttacttgaacacttgcataaatgtaatattattgtttctaaagctttgccaattttaaaggtaggtattatatattgagctttaaatgcagcagttttgacttcatgcattgcatttttaaagacacagacagaaaaaaaaagtcaatctgagtcattcttagcctactaactcaaattcttatggggatggtatgtgtacagtggaagcctaatgtgccttgccagatatctgaaatcctacaaactgtgtcagatttgctcagccctggttctagaaaggtaacagacagaagaaaaagaataatctgacctggctacagtgctaggtgtcaaaggaaatctcagaggcagttgcagcaagtcagaatcttgggcggttaaggcagtgagcaagtttgcttgacagttcatcactgattgctactgatatgtcaagccaagtaaaatcctttgcaagaacaagtcaataattggcagattaggtacatgattaaccggagacaacaagatgcagttaccacttgggagccctgctgggacttcaccttctccacaatcctgtttagcaaatattaaaaatgcctatttcatcactcagaccgatggagccaggaggcaacttaaaagtatacgatgggcttacagctccagcaagttgattaaaagagattctagggattgaatggcggtaagacaggagcagatgctggtaccccctaatgctttatgctgagaggtatctatgggatgggaagtaaaattatccacacattaaactcattagccaatagggaggaacagtttaagagaccacaaattgtcccatgatcataccaaataaatgcaaatatggcagattgggcatatgtggaccaagataaaatgagttgagccaacatttctatttgtccttatcagcggaattcccctaatgacattttttaaaagcagatttatagatggtgattagtggtattagtctttgccagttcaggtttattccttttcatttcagatcctcatttgaaaatgaactctgtctttccttgtccccttctttcttgcctaagtaagcaaacctgcacatggtttcaattagatgtgggactaactgtgttcctgggatgctggggtgcctggctgtttggagctccttggctctgtcatcttgccactctctctttaccctctcagtgcccattgactagtcacataggctccactgggcctcacctttcacatggagctgaaatgtggaggcaatgccagggtttggctgtcagcttgcatagcacatcaaatcgcgctttgcagaagcccctgatacgaagtttcatttcattttggaggaagccagatctttacaggcatgtttttcagaaccttcctttccaaaggagctcgagctgtagagaacgattgtgtgaaaccaagagaaccttggtttcttctgaactggactgaaagtgcttttggaaaggactttctggacagaccccttctggttagctggtggcatcctaacaggagacaggaactgaaactgccatctgagtcagtgggcaccctcctggacagctactgagcagagcaaggagaaatctcatggcatgcttgagtctggaaagagaaccggtgtgaagggtgcacaggagggcaccatggatgttttacaagaaggacaaggcttgagttcatggaactgagagagaaggcagcaacagagaaaacaggaatgagttcagacgggcagcaccaaatcacatatttagacagaggagagtcttggaggtgctgtaattcaggagtttgcaaactttctaagcaaaggacctttatcctcaagtgaaatcttatatagaaccctgtatataaaaagacgaaagtgatagttttgttaccatagagtttacagttcaaatccatgtttagtattatcatgttaatctctgtatatgtatgtttgtgtattaataaatcacatgtataaatatatatgtgtggatatatatccagagggagagagagagactaaacccatgagagtggtcacctctaggaacagtcaagaagaataggactgggaattaggttttaggagtacttacttttatcgaaaaaaacatactaaaggaaaggcaagtcccccatcccccaatctccaacatacacacacacagactggatataattccacaaaatcttaacatttattcatttgagtggttgtaatatgggtatcttttatacttctcttaatttctgtaatctctgtgtgtttgtgtgtgtgtgtgtgtgtgtgtgtaataagtgaatctgtaacaatgttgagtctattttcagtaaaacaaagagaggatacagatgacacctgtaattccaatcactttctcaagattccatttatatactttgtgtttttgtgcaattttgagaggcacgtcccttgccttagatataaaaaaaggggatttgcacccaagctttgaaactctccttatttgaaaaaaaatcaccattatgggacatattacacattcatttggaattccactcctgattttacatcctgaatcaaacatgtgcctctgctctgcctggcatttcgttgaacagtatccatcagtgcaattgcttgtatgactttatctgagcagacacacatcggcctggattcaaagaaagcctagtacagatctttaagcttcctgataaacgacagttacagaagttcaatgtatgctcagagatgttaggaaaagctttattccaagatctttgcaaaaattaatggcttctaaaatgttcattgaagcccctctcagtaaggatgctttgtagggaagctaaagttgttctgagacaacaatattcattaatcattcatccgagctcttataaaaatgtcctgcactcagagatccctctccatttaacatgatgtctaaacccacttggaataatagccagcactatctgagggccacaatgtaacagggactgattgttccatgtgcattatcttgttttatcttcacaacaccatatgagctaggtagcattagtggcagtccccttttacagatggaagaactgagacagaggttatgggctcaaagctgggatgtgcatctagcagccagacaccttcatcttctttctctctggtgctcagtcatttctaggagcatctacagtacaacgtaaacacaatagtttacggagtaaaattacacctgctgccaaaaacaggaattttatcaagtcaaggagaatggtggtggggatcttcttgaacgtgtcagaggaaagccttggtaaatatggatctggctgagggtagcacagttaaacacggaggcagagaaaattaacaaagaaggtgataagatcggcacatcaaagagggtgattataaaaaacgtaaagagagatcctgggaaatttgatgaagatatcccatctgcttacagaaatgctctttttgattatgttgcacttgtcaaactaagtgatgctgcactgtcctgtgtgtttcattgattctaagatgcataaaatgctcctcttttgacatctctaaaaacagcatgtgttttgctatcgatgaagctgatagaacgaaatgtgtgcttacatgtttttgtgtacgtatgaaaattcagtgttcattctcacaactagagcatagttgcaaatataacctgaatttccctaaatatgatataaaataaactttttggcagggtttccttttccaagataaagttctaatcaaacatttttccattcgttaagtgtattcattataagtggcctcttacgaattccagtgattcccagataactagatcctaccatataaatcaagtcagtgtggggttgaattataatttttaaaatatctaaatacttatttagaaagtaaactttaggccagctgtggtggcacatgcctataatcctggcacttgggaaatcaaggcaggaggaacacttgagcccaggatatcaagaccgccctggacagcaaagtgagacttcatctctaccaaaaaaaaaaaaaaaaattaattatccatgtatggtggtatctgcccatagtcccagctacttgggaggctgagatgggaggattgcttgagcccaggaggtcaaggctgcagtgtgccctgattgtgccactccagcctgggcaaaagagtgagatcctgtcagaaagaaagaaagagagagagagagagagagagagagaaaaaaagaaagaagaaaaagaaaaagagaggaaggaaggaaggacgggagggaagaaagaaaggaagaagagaaaagaaaaagaaaaagaaaccactgtggaagtgctgctgttacagaaagaaggaaaggaaaggaaaggaagggaaagggaaagggaaaggaaaagagaaagagaaagaaactgctgtggaactgctgttgttccagacaggaacagctggagagcctgggcagaaggagtgtagaccagtccaaactatctgactctgaactccagcctccaatacttccaagctgtatgaccttgggcaagtcattcagcctttctgtgcctcagttacctcatctataaaccagaggtgatattatgtgctcagagcaatcaatattggatgtaaatgaaataatctttataaagcacttagattcatgctggcacatagaaatggtgtaagctattattattatggtttcaaagcattcatgacacacaaccccaaacaaacaaaacagatttcaatttttttaaagataacttttatttttgtttttctcattataaagtaagacatggtgatgataggaaaaacagaaaacattaacattttttagtatattttccagactgttttctgttcacatatagtcatcatttttataaacacaggatcataccacacacaaactatttttaccctgagtctttgcttaataatagatggaggacatctttccaagtctgaatatttttctataaactcattttaaatgcctcaaaatagtccattgtcttgaataaaatttttttcaagcaatcctcctttttcaatatgataaatcattctacagtaaacattctttcaggtctatgttcttatattttttaataatttccttgtgatgaattcttggagtggaattgccagctcaaaggatttacaatacatcaaggtgttataataacaataataaccatgagagcagctcacattaattgagtgcttactatgagccgagccgaactcacagtgcccctcaggggtggggacttttattattcccactttgggtatgagagagcagaactcagagctgaaaacttgtgcaaagttacattccagcctggtgaaaggtgcagctcatgcttcaagagaagctgcgcagtgcctgtgtttctgttcctcgttagggcttgggaagtcattttgtgactggacacacccccagtttgctccctcttcttggtgatatgtttgatatattttcacagccagcccacattgggccctcctattgatcttgggaggacaaggagccaaatgtgacatttgataaaccattgctaaagacaattagatgggaatgtgcagtaaataagaaatcacatcagcaaggcactgagaggtaaaacattcattcttctggccctatggtgcagcctttgtgcaccttggaatagccttgaaatgctcatcaatttcgctgaccttgaccccaaggctctgtgaggtcaacattatggctcgcttggtcttcagagcaataccttctacccttctcttgggttggatcaaaaggcagcatgatgagggcatgacctcgtgagaagatgaaatataaaatcaatccattcatgccctcaacaaatactcattgaatgtctgtactggggatacagtgattaaaagcatcggctctgcctttaaggagatggagacctgacaagttaagaaatgatggcaacatcaagtagggagggtcgtgagatgcagtccagagtggaggataagagctgacactctacgatcatcctggtctgggtttgaatcttatctctcctatgaagtgtttccggatgagtctctagatttagtttcaacatccagaaaatgaggactatacctcatcaggctgttgtaagaataaatgagataatgcccaggaaatggtaagcaccccatggagatgaatcaatcaatctaactggcctacaacacttatagcgcactctcaggtagcctagcaacaaggcggctctgcagggggaacagcaaggatgctggccgacaccaatactgatatgcaaactgcgcttcagctggttgtcgagactctagtatagactgcagagctcagagtcttcctcctcagtcaagtgattcctgtctcctccccatccttctatgaatatgagaggtagcagaggtttggggtgcctctccaggggacacagtgcacactgcatctacctgtgtgcagcccaagcacagctcttcatgggatgggagatttggaataacatttaccctgctagcactatgctcttgtatgtttcctggagccactaccgtatgtcatttacatgatctgttcctgtccctcacataacatgttcaacaaatatcagctattgttattactagagggttggatacaggaggcttgggagcataaaagttggccaccacttttaacctgtgagggattttagggcagcctcctggaggagaggctacacaaggtgaatctttgagggtgagttaagcaggcaaggagaaagacaagagagggcctttctaagcagagggcaaaccaagacatgccttgttgtgtgggctgtgttgaagcttcatttaacaattgaccgaaactctgctttgctttagtcactcttcgctaatggggacataccttttccttttagaacacgctccgacagagcaagagtgacctaggggggcagcccctctggaagtttaatggctgtccctgtgttgagttgttgcatatttgcagctgtgtacacaactccagctaggaacacatgttacataaaagccctcaagctatgggttacccttctaactgggaatgcacactttcacgtacctggggaaaatcttgttgaaaataacagatcgagacttacggtttctaactgtttcccctgttctcagaaatttcatgtgagaagggtcaacattccctgaaggagaccctgtgttcagacagatgcacattctgccagaggcaggccatcacgttgtattcagccaacatttactgagcacctatatgcgacatgccaaggggctgcagccagggacagggcagagctagccctgccctcatgtggctagtggacactagcaccaatgcctgtcctggaatttccagggaactcgttcacctatcaggaaatgaattgtctctgcctttgtttggcccagcctcgttactgtttctgttgggaatcccattctgaaacagctctgagaagggctgctggaatgtgccaaatattcatagtgatcatattaccttatccttccgttgagacactttacccttttctattcatttttcatttcccctacatcacccccctcccataccagagacattcaaaatatactcctttggaacttgaaaaccacaattttaggcttgatatatggagggaggaaatttggcagaacccataatctgcttatcttcaaccagcaaaccaccaaagcccctgccaaccccagagggccttcataggaaccaggaaacacaccaggcaagatgctttcctattatgacaaaaacaggctctggtctcatcttttcagcctctgaaaccctccactggcctcccgtcatgcaaagggaaaaatctgaagttgttctagaatatcagctccagaaggacagcagctgttctattctctgctgtgtctccatcactcacagctttggccgtccaccgtaggtgttcagtaaacagctgacagaagatcatctctgtggctggccagtccctctgcagtctggttaaccaccagtctcctcctcactccctggactccaccacatcagctcacttgctctccctcagccctgtcaagctcattctgcctccgaacattttgcaccggatgtcttctcttcctggaatcatcccccagatatttcaggtggctccccctgacgtttttactcctcatgcctccataagccctttcctgacaagcgaatctacaacagaatcctccttcatgctttatgctttatttttcttaaatcaacttaatttaggtataatgttaaaactacccaatgtacacttttaaaaatttatttcaacagattttggctaacaggtggtgtttggttccgtgaataagttctttagtggtgatttctgagattttggtgcacccatcacccaagcagtgtacactgtacccaatgtgtagtttttttatccctcaccccgcttccaccctttcccctgaggccccaaagtccattgtatcattcttatgcctttgtgtcctcaaagctcagctcccacttatgagtgagaacatacaatgtttggttttccattcctgagttacttcacttagaataatggtctccatttccattcaggttgctgtgaatgtcgttatttcattccttttaatgtctgagtagtattccatggtatatatataccacattttctttatccacttgttgattgatggggatttgggctggttccatatttttgcaattgctaattgtgctgctaaaacatgcaccaatgcacacattttctaagtgtccacttggatccctaaaatctgaaaactgtatccacctcagtaagcaccaccacagccataatagaggacaatgccaccacccaacagatcccctgtgccccacaccaacctcacctccaggcccaagcaaccactgatctgctttctgtcactggagattagatttgtctccactagagtttcatatgcaaggaatcacgtgctcttgtgtctgccttctttcactcgcagaatgtcagtgagattcacccatggtgttgtttgtatctgtattagtctgttctcatgctgctaataaagacatactcgagactgggtaatttataaaggaaaggaggtttaatggactcatagttccacatggctggggaggcctcacaatcatggcagaagccaaaggagaagtaaaggcacatctacatggtggcggcaggcaagagagcatttgcaagggaacttccctttataaaaccatcagatctcaggtgacctattcactatcatgagaacagcacaggaaagacccacccccatgattcaaatacctcccaccgtctccctcccacgacacatgggaattatgggagctacaattcaagatgagatttgggtgaggacacagccaaaccatatcagtttctgtggcttattccttttattagtgagtagattttcaattgtatgtatattccacaatgcgtgtgaccattcacctgttgatggacatttgggttgtctggtttgctttatttttattttattttattttattttattttattttattttattttattttattttattttattttatttttgagacagagtctcaatctgtcacccaggctggaatgcagtggtgtgatctcggctcactgcaacctctgcctcccaggttcaagcaattctcctgcctcagcctcctgcatagctgggactacaggtgcaccccaccacacccgactaattttggtatttttagcagagacggggtttcacaatgttggccaggctggtctcgaactcctgacctcgtaatccacccacctcggcttcccaaagtgctgggattaccggcgtgagccactacacctggctggtttgctttattttttactcacagctctcctccctccctgacattatattcccccttgaaaatgtcagctccaggaggacaggaaccttgtctgtatcattcactgctgtatccccagtacacagagcagtgccaggcacatggtggttgctcaatatttgttgaaggaacaaatagttttacattcatttgcccttgcaacataacaagcttgagagccatgcttcagatttttctatgaactccaatttagggacccttaggccttctaagtgaaaccagatgttggctggggctcccctgcccatcagagactgggctgaggttgactgtaccctgtggtcctgtgaatacacacacacgtgcaaatgagagaggcgggccagcaccccctactggctgcctgttcattaggcttattgagaagactaatacactggattaagagtgtcctctttgaagctggctgcttgggtgtgaatctcagccccaccacttactaactgttgggtgagctatgtaacctctctgtgtctcagtttcctcatatgcaaaacaggaataatttgtattcagtagggttattatgagcatgaatcacttagagcgtgcctggcctcattaaatgttaactcatagtagcatctgagcagttagcaagcaaaaataagagaaaactacagtgttcactaaaatttccaaaaggcatttcctgaagagattatgtcctttaagtagctgtgtcaccttgtaggtatacccctcactctagatattatttccttttggcctaaatctttttcattcatgcaataaagatctttagtgagtacccactatgggccaagcactgttctaggcatgggggatgctgagttcagtgaaacagacaagtctcccactctttttttttttaattatactttaaattctagggtacatgtgcacaaagtgcaggtttgttacataagtatacatgtgccatgttggtgtgctgcacccattaactagtcatttacattaggtatctctcctaatgctatccctccctgctacccccaccccatgacaggccccggtatgtgatgttccccaccctgtgtccaagtgttctcattgttcaattcccatctatgagtgagaacatatggtgtttggttttctgtccttgcgatagtttgctcagaatgatggtttccagcttcatccatgtccctacaaaggacatgaactcatcattttttatggctgcatagtattccatggtgtatatgtgccatattttcttaaaccagtctatcattgatggacatttggcttggttgcaagtctttgctattgtgaatagtgctgcagtagtcatacatgtgcatgtgtctttatagcagcatgatttataatcctttgggtatatacccagtaacaggatggctggcacaaatggtatttctagttctagatccttgaggaattgccacactgtcttccacaatggttgaactagtttacgctcccacaaacagcgtaaaaatgttcctatttctccacagcctctccagcacccgttgtttcctgattttttaatgatcgccattctaactggtatgagatggtatctcattgtggttttgatttgcatttctctgatggccagtgatgatgagcattttttcatgtgtctgttggctgcataaatgtcttcttttgagaagtgtctgttcatatcctttgcccactttttgatggggttgtttgatttttttcttgtacatttgtttaagttccttgtagattctggatattagccctttttcagatgggtagactgtaaaaattttctcccattctgtaggttgccagttcactctgatggtagtttcttttgctgtgcagaagctctttaatttaattagatcccatttgtcaattttggcttttgttgccattgtttttggtgtttcagtcgtgaagcccttgcccatgcctatggcctgaatggtattgcctaggttttcttctagggtttttatggttttaggtctaatatttaagtctttaatccattttgaattaatttttttataaggtgtaaggaagggatccagtttcagctttctacttatggctagccagttttcccagcaccatttattaaatagggaatcctttccccatttcttgtttttgtcaggtttgtcaaagatcagatggttgtagatgtgtggtattatttctgagggctctattctgttccattgatctatatctctgttttggtaccagtaccatgctgttttgattactgtagccttgtagtatagtttgaagtcaggtagcatgatgcctccagttttgttcttttggtttaggattgtcttggcaatgtgggctcttttttggttccatatgaactttaaagtagttttttccaattctatgaggaaagtcattggtagcttgatgggaatggcattgaatctataaattaccttcagcagtatggccattttcacaatattgattcttcctatccatgagcatggaatgttcttccatttgtttgtgtcctcttttattttgttgagcagtggtttgtagttctccttgaagaggtccttcacatcccttgtaagttggattcctaggtattttattctctttgaagcaattgtgaatgggagttcactcatgatttggctctctgtttgtctgttattggtgtataggaattcttgtgatttttgcacattgattttgtatcctgagactttgctgaagttgcttatcagcttaaggagattttgggctgagacaatggggttttctaaatatacaatcatgtcatctgcaaacagggacaatttgacttcctcttttcctaattgaatgccctttatttccttctcctgcctgattgccctggccagaacttccaacactatgttgaataggagtggtgagagagggcatccctgtcgtgtgccagttttcagaggaatgcttccagtttttgcccattcagtatgatattggctgtgggtttgtcataaatagctcttattattttgagatacatcccatcaatacctagtttattgagagtttttagcatgaagggctgttgaattttgtcaaaggccttttctgcatctattgagataatcatgtggtttttgtctttggttctgtttatgtgatggattgcatttattgatttgcatatgttgaaccagccttgcatcccagggatgaagcccacttgatcatagtggataagctttttgatgtgctgctggattcggtttgccagtattttattgaggatttttgtatcagtgttcatcagggatgttggtctaaaattctctttttttgttgtgtctctgccaggctttggtatcaggatgatcctggccccataaaatgagttagggaggattccctctttttctattaattggaatagtttcagaaggaatggcaccagctcctctttgtacctctgttagaatttggctgtgaatctatctggtcctagactttttttggttggtaagctattaattattgcctcaatttcagagcctgttattgttctattcagggaatcaacttcttcctggtttagtcttgggagggtgtgtgtgtcgaggaatttatccatttcttctagattttctagtttatttgcgtagaggtgtttatagtattctctgatggtagtttgtatttctgtgggatcgatggtgatatcccctttatcattttgtattgcatctatttgattcttctctcttttcttctttattagtcttgctagtggtctatcaattttgttgatcttttcaaaaaaccagctcctggattcactgattttttgaaggattttttgtgtgtctatctccttcagttctgctctgatcttagttatttcttgcctcctgctagcttttgaatgtgtttgctcttgcttctctagttcttttaattgtgatgttagggcgtcaattttagatttttcctgctttctcttgtgggcatttagtgctataaatttccctctacacacggttttaagtgtgtcccagagattctggtatgttgtgtctttgttctcgttggtttcaaagaacatctttatttctgccttcatttcgttatgtacccagtagtcattcaggagcaggttgttcagtttccatgtagttgagcgattctgagtgagtttcttaatcctgaattctagtttgattgcactgtggtctgagaaatagtttgttatcatttctgttcttttacatttgctgaggagtgctttaattccaactatgcggtcaattttggaataagtgtgatgtgatgctgagaagaatgtatattttgttgatttgggatggagagttctgtagatgtctattaggtctacttggtgcagagctgagttcaattcctggatatccttgttaactttctgtcttgttgatccgtctaatgttgacagtggggtgttaaagtctcccattattattgtgtgggagtctaagtctctttgtaggtccctaagcacttgcattatgaatctgggtgctcctgtattgggtgcatatatatttaggatagttagctcttcttgttgaattgatccctttaccattatgtaatggccttctttgtctcttttgatctttgttggtttaaagtctgttttatcagagactaggattgcaacccctgctatttttttgttttccattttcttggtagatcttcctccctccctttattttgagcctgtgtgtgtctctgcatgtgggatgggtctcctgaatacagcacactgatgggtcttgactctatccaattagccagtctgtgtcttttaattggagcatttagcccatttacatttaagtttaatattgttatgtgtgaatttgatcctgtcattatgatgttaggtggttattttgctcattaattgatgtgatttcttcctagcatcgatggtgtttacaatttggcatgtttttgcagtggcttgtactggttgttcctttccatgtttagtgcttccttcaggagctcttgtaaggcaggcctggtggtgacaaaatctctcagcatttgcttgtctgtaaaggattttatttcttcttcacttatgaagcttagtttggctggatatgaaattctgggttgaaaattcttttctttaagaatgttgaatattggcccccactctcttctggcttgtagagtttctgccgagagatccactgttagtctgatgggcttctctttgtgggtaaccagacctttctctctggctgcccttaatattttttctttcatttcaactttggtgaatctgacaattatgtgtcttggagttgctcttctggaggagtatctttgtggcattctcttcatttcctgaatttgaatgttggcctgccttgctaggttgggaaagttctcctggataatatcctgcagagtgttttccaacttggttccattctgcctgtcactttcaggcacaccaatcagacgtagatttggtcttttcacatagtcccatatttcttggaggctttgtttgtttctttttactcttttttctctaaacttctcttctcgcttcatttcattcatttgatcttaaatcactgatactcttttttccacttgatcgaatcagctactgaagcttgtgcatgcgtcacgtagttctcgtgccatggtttcagctccatcaggttatttaaggtcttctctatgctgtttattctagttagccattcgtctaatcttttttcaaggtttttagcttctttgcgatgggttcgaacatcctcctttaggtctgagaagtttgttattaccgatcatctgaagccttcttctctcaacccgtcaaagccattctccgtccagctttgttgcgttgctggcaaggagctgcgttcctttggagaagaagtggcactctgatttttagaattttcagcttttctgttctggtttctccccatctttgtggtttttggtctttgatgatggtgacatgcagatggggttttggtgtggatgtcctttctgtttgttagttttccttctttctgtttgttagttttccctctaacagtcaggaccctcagctgcaggtctgttggagtttgctggagatccactccagaccctgtttgcctgggtatcaccagcggaggctgcagaacagcaaatattgaagaacaacaaatgttgctgcctgatccttcctctggaagcttcgtctcagatgggcatctggctgtatgaggtgtcagtcggcccctactgggaggtgtctcccagttagtctactagggggtcagggacccacttgaggaggcagtctgtctgttctcagatctcaaactccatgctgggagaagcactactctcttcatagctgtcagacagggatgtttaagtctgcagaagtttctactgccttttgttcagctatgccctgcccccgaggtggagtctacagaggcaggaaggcctccttgagctgcagtgggctccacccagttcgagcttcccggccactttgtttacctgctcaagcctcagcaatggtggatgcccctcccccagcctcgctgccaccttgctgttggatatcagactgctgtgccagcaataaccgaggatccgttggtgtgggaccctctgagccatgtgcaggatataatctcctggtgtgccgtttgctaagaccattggaaaagcgcagtattagggtgggagtgtcctgattttccaggtaccatctgtcatggcttcccttggctaggaaagggaattccctgaccccttgcacttcccagatgaggtgatgcccaccctgctttggcgtacactctgtgggctgcacccactgtctgacaagccccagtgagatgaacccggtacctcagttggaaatgcagaaatcacccgtcttctgcaatgctcacactgggagctgtagactggagctcttcctatttggccatcttggaactccagtgacaagtctcccactcttaagtgttggagaaagttcatatccaaaagggggaagattaattctaaattagtaaatcagtagcaagtttttttttcaaagaatcatgagtttttgctgaggttggaaacaagaagaagtaatagacgttttttaaaaaaataatttcagctttttttttagactcagaggtacatgagcaagtttgttacctgggtatgttgcatgatgctaaggtttggtctacaaatgaccccatctctcaggtagtgagcctagcacccagtggttaaccaacagtaaaaatcccagtagttttttaacccttgccccctccctctccgccctctctaatagtccccagtgtctattgttccatctttatttccgtgcatacccaatgcttagctcccacttataagtgagaacatgtagtgtttggtcttctgttcctatatttatttccttagaatgatggcctccagctacatccatattgctgaaaaaaatatgatttcattctttatgactgcatagtattccgtggtgtatatgtaccacattttctttttccactcttggtaggcacctaggttgatcccatctttactattgtgaatagtgctgcaatgaacatatgagtgcatgtgtcattttggtagaaggatttgttttcttttggatatatatccagtaacaggattactgagttgaatggtagttctgttttaagttacttgagaaatttccaaactgttttccacagtggctgaattaattcacattcccatcaacagtgtgtaagtgttcacttttcttcacagccatgccagcatgttgtttttgactttttaatggtagacattttgacttgtgtgagatagtatctcattgtggttttgatttacattttgatagaggtatttcagttgggtagtcagggaagccctctcttaggtcatgatatttatgcaaaggcaggattaacaagaagcaagcagctgtgagatcaggagaaagaataggccaggcagagggaaaggctggtgcaaaggccctatggctgggatgagcttggcatcttccaggaacagagagaagagcagtatggctggaaaacatacaggtagagtggcgtttagggaattgggaaggggccagctcccaaagccacttacagaccaagtacagccaacacccagcaaagccatccagacctttccaggcacccttttttctctgccccagtgtgatgtctccctgtcctcaggccagcctgctctgcccaggtctgaccctagcactgctaagttcttccttcctccttcttatccgctcagtggcattgtgaggggccttaacaaaccaggccagccaccagatatgctggcagctacaactaggttcttggaaaagatggatgtgtcccccaaaattgttaaaactcatgcaaatccaacttcaaatccttgcttggccaccaaccaagctcaatggcactggatccattccttaacttctctagaaaccactgttctcttctgagatgagactagggttttggggaggatgaaatgtgataacacacatcagcatttgctattatgcctggcatgtagcaagtgcccaggcaaaaataggctcttattttttattacttttgctgctgctgcaagaggacatgtaatgaaagaatcaagaattccacccttgtaagataaattctccccagctgctgatttcagggaaccctgtttgtttcctctgtagcttccatctgcttgattcttgcctgtggagcctggcatgatgagctgctacagtctggaaatgcagatgctgtttcctgtccggaagctcaggggctggttcttatagtggcccgagcagtggtgcctgcagctgggccgattgcatttagttaagtgactcagatactgtaagtaggaactgagcagggagtcctgaaaaagacaggcaaggccacactcagggaagccagcccccactggagctgtcattcctcccccttccctgagcactcagcccctttgaaggagagcaaagaaattgtgctgagctttaatgaggaatcagctgggcgcactttgccacaggcctggctggaggcagaaagaaatgaacaggcccccaggagtgagcgacccactgcagctaagtcattcccaccatctctggatgtgaccagagaccctgtggtcatgtggcttcaagcagccctagctcacatgtgccacttccctgcaatcccaccaactgctgagcgtgccctgccatctgaggtagaatcaacatcagacatcgtcaggaggccagcaatgctgccagtgcagagtgaggggagtggcaggcttccccgggaaatgtcagcatttattgcttttcccattcgtgttgaccctcagcaagaaaatgttccaaatagcatgaagtcatcccccctttttggggggtcctggacccagtaataacatcttcccgaagggcaatgagtctgtctttaaccttgccctctctggcaggtgtgtatcaatgtggtttctagaagcatctctgggctgcccggtccctgcctgtggccaccttcccttctgggaaagtaacagcccccgctccacggtctaggctctgctgctctcctcccgctcctctggaaacccactaagttatcttaattaccattcctcctcagtctctgccaagaagtggggagatttataattggatcagtcaaatatttgctatggtttatttctttgcctctcgagctctcgtaaaagttgcattttcatgccactttggggtatgactgatgactcaaaggcacagccttcacattgcatgccaacgtgggttatttttcagaggccagggaaaaggagagaactgggcggggagaggtggtgtttactttgggttattgtgctatcatcctctgggtggctgcaagagacacaagcggctttgggaggcaaacttcctcccgcagccagccggtgcacagacacatccttctattgggatttggtcatgtgcctcctaaaccccttccagagcttctgcagacctaatgggtaggaccactacagagtaacctctttagtcaacgaggcacagtttggtctcccaaagcatccccatgtcccgaattgatcacagtgaggtcctagaacagaggagccagatgtccccaatactaagcctgagttatcaattcccagtgttgagggatgaaaaggaaactctggccagggcctgagcttttggaaaatgctctccttctagtgtcagccagtctgccaagcaagctggccaggctacagcttaggaaccctagagagcagaggctcccctacaccagatggcctccttgcaagccagcttctcactggcccccagtctccctatcctggaaggcagtctccatggctggctcagtttatcctccctgcatttctagcctctagcccttgcccaagttatagcagcagtgaatgatgctgtgtgatgctgcttgacacgtgttaatctatgcatagtgaccctatgtgcactctagagcactttgagatagaaaggaggaacaagaggtataaactgggacactcctgggtaattgtgataaacaaacaccctacacataatagagtggaatttgaccaacagaagatgctaccatcttttcctgggtgatcctgtcctgttgtcctataagaaattatcttgaccgggcacggtggctcacgcctatagttccagcacttcaggaggccaaggcgggcggatcacgaggtcaggagttcgagaccagtctggccaacatagtgaaatcccatctctgctaaagatacaaaaaattacccgggtgtggtagcaggtgcctgtaatcccagctactcgggaggctgaggctggagaattgcttgaacccgagaggtggaggtttcagtgagccaagatcaagccattgcattccagcctgggtgacagagcgagactccatctcaaaaaaaaaaaaaagaaagaaagaaatgatcttgaggaccatttggcctgacctgggaaggaagaagggcagtagttctgaagtccttactcttcaccaccctaccctgcagatgaaacccctgtcttcctggagtttatgttcttagtagaaagacaacacacataaaaataaattatatcattttagggggtaataagtgctttgaagataataaagcacaataaagggctacaggattgagacacatcagacaccatatcatatcagagtcaagatcttctcccagagcccctggctagccgattcttccttaaatgaaaactgccctctgtgcttctgtgcagggggactctgaggagccagccaaaatagatgtcttctctttcccctgaaaaatgcctcttcttagagtaatttactgggctggacggtgagcactgccactagtcctaagccatttctgtttcccttggctggtcaggcggttcggcaagagatgactgatgcccaaattagtaatgagcaatggccccacacaagtaatcaccttccccaaactcttcctcatggggatgattacttggacccgaaatgaagtagatccttctcacctcggcaccaaggaagttacagccattcctctggctgacagcaatttgtagacatgggtctttgcagttggacattttcgaggttgctaaggaacaaatgctttgattagaaaggtctccaaaagcagcatcagtttgtcatatcactttaaatcatttattttatcccacaaagacagctgtgaccaatgggatatggggtagagagaagctaaacactcatttccttgagaaatggagaaaatttcaacttctaagcagcggccgtcaccagcgccccacgtgtgaaactagaaccacgcactgctcgtccgtaatcattatgatttgcaagtaggtgactcatagtccctaggtacttaataaaatggttgttatcttcctggccctgccctaagcattatctcatgtcatccttataacctccctgaatgttaggtgtgattattccctggtatgaaaaccaagaagaaggtaaaagtagatttgcccaacatcaaagaacagtaagtgacagagtcagaattcaaacccaggtttgtctgatggcaaagcctttgtgtttaagattatagagtcttttgttttcagtgatcacatttcaggtggaaaaactagcgattctgacgacgggaaaggcacattaggagattcctggagtttcattctgtgaagttcgtaaaaggggttatagttgatgtctgtaacccataaaaacctttttatggaagggaaagtggagagattgcttaatcctacagtggtggttttcatcggctaaaacctacactttgaatgttctctggaagtcagcatgcaagtgacttttctatgcagtgattttgcaagagttcacaagattagtccagttctactggggttttatcgattttcttgtcaacaagtaagaaacactggtgtcctctttgccttctccttcatcatctctgtccagcccatggtcaagccctgtcacctcttccttagaaatgttcctccaaagttgtcccccgcttctcattcactgtcctgatcaaacccttttcacctcacccctgggtttctgcaatcacttcctaattggtcctcctactttcattttttctccctttagaatatctcatatccttcctacaaactaattccttaaaacatccctttcatcacatcagtcactgctcaagagtcttcaatagctcccacttgcctgctacagcatttcatctattatttagaacaggcctctcttgggtcccgtttgacctccccatccccttatcctggtaggcttagttgaccactctgtctctcattaatcacttccatttctgaacctggtttccactgaaacaaagttaaactttaattgctggtttatccaaggctaggcactataagggcatgaacataaacaccaagccaatctatgtctaaatttttgcttggccacttaggagctgtgtgactttagaaaagttgcttgacttctctgagcctcagctttcttatctgtaaaatatgaatgtaaataacaccaagataggtaccaaatcagggtttcttcaagaattgaataaaatgataataacgatcatgacggctaacatgtattttgtgtttgctgggtgccaggcactgtctaaatattatctgaatcctcacaacaaccccataacatagatactcttattttcagtttgccaatgggaaaaccaaggcacagacaggagaagctagtaagcacctcattcaggattttctcaggctccatagccctcatcatagcccttctgctgtgccatttctcctagtaaatgatcaataaaatggtagctggtaacatgggttcataattccttatctgaaactctcaggaaaccaattacattttggaattcagaatttggaggattatggaaaagttatactttgcatatcctctgtattacataatgcagagggggactggagcaacagcatataccactccccccaccacacacacacacacacacacacacacacacacacacacacacacgatgcacacatacaaacaaaaagaaaaaaactttgggttaaagctctttggatttcaggataacagacaagagattgtggcctagagtaataaaagtattaatagtagcaataattataaagcataataaataatgactgttattattgttacacattttgcggctcttgttttcctggataagttcatagcaaaatgtgctacaaaaaaggtctttctccattaacaaatgggttcggggggaaggtaccaggtatgggaccacatccacaccttgtctcatgcatggtactctctctccttttcccagtatgacttcatggaacgtctggacgggaaggagaagtggagtgtggttgagtctcccagggaacgccggagcatacagaccttggttcagaatgaagccgtgtttgtgcagtacctggatgtgggcctgtggcatctggccttctacaatgatggaaaagacaaagagatggtttccttcaatactgttgtcctaggtaggtgtggggtctctgagatggtacgccatgaagggaagatggaaatgttctgggcttctctgcagaagacacatcttctaaggtagtttctactacagatgacaaccaaccaggatcctttgtttaggccttatagtgtcacccacctgaaactagctctgattaaatggaaatgctgcttaaaccatgaaaaattcaccaaggatgaaattgaggttaagagtttgggtcagactgcctgggttgagtcctgaccacactacctaagcaaatcacttgactttgataagcctcagtttcctcatagtaaaataggaactaacgtgaatgcccacctcatagggccattgtggggattaaataaaacaaatatataaatctctaagcatatagtagagaaactactggcgattcacatcagctcagaatttttcttaaaaattaagggaacctcaaaatactaataaaaagtgatttttaaaaaaactttaaatcagagaaattatatagacatttaaaaatcatgtttttattcttgagtaggtaaatctcaaagtgttttaattaagtacttatcattttggcatagggtagccctgctttctattagctatcaagagaaaagcgaagtttcaaccaaaatgtccttatacatgcaatacaaagctctaaaagggtcattcacttgaggaagatttcataaagtttttctaccacaaaccttaagtatgttaacaagcaaagaagctgcagatattttcattaaagttatgttattgggatttttaatcttctcctgacaataataattgatcctgggtagaacctctgtgaatcagggaagattattagacccatttcacagaagaataaattgagattcagaaagctgaatctctcgaagacccaggttgtggaaacagtggaaatggcatgggcttctgggtcttgtccactgcccttgtacaacaccatgtgtcccaaaaacttttagctgtagatctcaagattcactggggaagcccccacagggtggcttcttgaagaaagacctggtagctccagcattaaatccaagattttcttccccacatcttaactgggcaattcacttatctctctgagcctcagtttcatcagctgtgaaaaggtaatgaccacgtccaggaagtagagggtgatgtgagtatcatgacaaataaaacgtgtgtggcatgtgttggtggtcactaagtgacatccgattattttttttccttaggaatatgtctagtatcgctctttttctattgattacattttaagaacttttctattggtcccatggattttcctgaggggctccctgactcttcaaagagctatgtaatccaacctgaaattcaggtggcaattcttcatcagtggccacaacttcagaaaggtgtaaaatcatatagagttttggtactgaccatgggattcaagtcaatccttattccttctgctaagcaaagactgaccctatcaaagctggccaaatggtccaaagcaggagttggctccactgtagcccatgggcctaatctggcccactgcctgtttttatgaataaagttttattggagcagccccatacatctgtttacatattgtctatggcagctttcccactgtcatggcagagttgagtcattgcagcagagaccatatggcccacaaagcctaaatccttactctctgtccctttacagacaaagtttgccaacccctactctaaagtcatgtcataaactttgtataatgaaagtcagtggagaagcgttccacagagggaaaatacccagaattaggttaggtaccaacggggaagaaaagtaatagggtagagactagctcacaaaaggaaaaaactagaaacaaatttggaaccagcttgagatgttgagatttttaaaaatctttagtttaagaacatgatgagaaacgacttcctttgtgtcactctgtgtttgaactcaagaggcttgacacgtacgtgacagcacacaccctgcacagcagctggctcagctggggtctacaagaattcagagaagtggttcataacaacaagaacagctatgcatttatagagcatcaacggtatgctagccccagtattatgccttcgtgtctgttgcttcctcaacccatggagtagccacatgaggtagcactatcacaattctctgcattttccaactgaggaagccaagactaaatgcagttaaaaaacttgcccaaggtcacacacagccaggaaaaggtgaaatcaggattcatactttccagagcctgtgcttttaaccactggatttctttggattctagccaactaaatccttttccctctaaacttagcaccttttctggggttcggattatttcccaacaacttctgtcctccttttcctttatccacatggacacaggcattgtggtagtgaaattcccttcccccaggccatcactcaccctggcctgttggagctgggaatagcaattctcccaagaggatctctcttgtctggactgtagctcaaagagcaagtcaaaggtaattggcctaatagttgggcagacatcttgatggagcaatgatagtaattggcctgaaatgcagggaaaagaacagtgttttatttggttcagaggttctcccacacattcctatcatcagaacattctccatcaagagcagccaggagtgctgtaaacccccgtgatgtgaaacagaaggaaaatgttagacaggtgcctaccagcgatcacactaaatatatctttgactcagggaagtcttttgatgtgttttggagagaagcagcctgctttcagaaacaagtttcttctcgagacaacagagcagctttctggaagcacgatgccagcctccacttggataaaatcccatttcctgggcttgatctcacatctggaggccacttcttcctcaagaaaatgtaaacaaaaaggaaaactgataatatcttaaaaataatatttaactgagtgctggagaaaggggattgaaatgtgagctcctttatattttagctttgccacgtcattgtttttccctcagaaactgtgaaaatactttaaatatgagttgttgggaaagttaaatgaaaaatactctttattataatttttgtttattttggattctcctaccctcccacacatgcacacacacagacacacatacacatagacatacacatacacacaggcacacacacacataagcacacttcagcaactatttaccaaggacctattgtataccaagcattgagaatacctcgatgaacagttcagatcgagagcttggtgagagaagatagatgtatataagaattacaggagcaaagaggaagtggtacaaagcccagattgaggaaagtgaggaaaacacccaggagctgagacacaatggtaaatacctcaagtgaagccctccagccaagcaaagagactgtgcaaagatctcgggccttttccatgggactgtggtggcaaagagcttcctggacctttgctgcttgatcgccaaagatgtaagttttgagaacagggagccttgacctcaagaatgtcaatttccaccaaaccatccccagacccagatgctcagtgagaagcaatctctacctagctgtaggaatgacttcaaaaaatgcaagctggagaatgatgttcctctgtttaaatgtttcatttgtacccagaagttccagaatagaacccaagtcatccacatgttctacagcaggggtcctcaaccctagggccgcagatcagtattcaccataatgtcaaatcagtggaagccctcagcttgttttcctgcaactagatgatcccatctgggggtcatgggggacagtaatagatcatcaggcattagattctcataaggagcatgcaacccagatccctccatgtgcagatcacaatgaggtctgtggcccattaggaactgggccgcagagcaagagatgagcagtaggtgagcaagtgaagctttatctttatttacagttgctcttcattgcttgcattactgactgagctccgccccctgtcagatcagcagcagcattagattatcataggagggcaaaccctattgtgaactgtgcatgcgagggatctaggttgtatgctccttgtgagaatctaacgcctgatgatctgtcactgtctcccatcacccctagatgggaccatctagttgcagaaaaacaagctcagggcgcccactgatttgacattatggtgagttgtatagttatttcattatatgttacaatgtaataataatagaaataaaatgcacagtaaatgtgtgtgcttgaatcattccgaaaccatccccaagccccagtctgtagaacaattgtcttccatggaaccagtccctggtggcaaaaaggttggggaccgctggtctacatgtccctggatgatccatctctctgcctggatctctccaaactcaactaatgtcacaccctcccttgtttgctaccctgcatccacattggattcagttcctctctttcccaccccagagcctttgcataagctattcctctgacctggaatacccttccctcagctctttgcttgctggtttcagcttatccttcagagtcacctgcatagagtagagaggccctccctgaacattctctttaagtagcttcctttcgttactccatctcagtatcttattctgttcaaagcacttattgtaatttttgcttatttaatttgtttgtttttttagcttgtattctctattattgtgcaaagctttatgagggctttgcatatgaggggactatatctgtctttgtcaccatggtatctccaatgccttgttatatagtgttttgcatataataagtgctcagttagtagactgaatcatatgtaagaatgtgacagatctgagatcttaccctaattgcaagctagcatgttagcctgacacagtttcatggatgccatcagaagacatgagactcatgggtcagagacaagggactttattactcagagcaatgcaatatccagagtgtcagcacatgttctgttccccaagccccagttccctcagagtaacacctcagggcctccctcaggtcgggtgatgccagtgcatatgtcatgggttgcactgcaggagaaaaatcctgagcttactgaacccgagcctcttagaatgggaagtaagcttgcttattctttgttccagagggagatattgtctttactatactgggtaataagtaaacctgccctttactcaggagagagacactatcgctgtctcccaaggctgttcccaatacagacagccttgaaaagatagttcagaactaaggcagtcaatgcctgtgctctcaagacattcagaaacatgacagacccagggagaatgatctcccagcaccgtgtgaaattgctgatttgctgatctacaaaagcacctaacgctttttgaatgagtgatgaattcaaaaaataaatgaataaatgaaacaaacaggtagccacctggatgcttctcagccgacatttacacagccaacctcaaggagtttcagtctgaaatgttaattgttgttacacattaaggaaactggcttgatggggcctatggtcttttgtctgattttgaaaaagcaaatatactcattgagttttcctcagagtgccagaaaccaactacagtgtggttctggaagatgagagctgagaaaggaaacactgtagaaagaaaacaaaactgtgtgattcgaagtttcaatccagagtgggagtaaatgggaaatcaggtttaaaggcaacacatcctttatcactctcaggtacctccattaggaacaattagacttcacagcctttcataccatgtcaccaggtcaaagtccccaactctccaagggtgatataacatcacattttgagaatagtggcttatactttccttttcatcttagtaatttggaacctgaaagtctaaatgtattttgttttaagacaaaaattaggattatggtaataatttttaaagaatatgactatttctgtgcagacccaaatcaacattaaatagttccaaaatcattcctttgaaggtattacttgagagtacacatagaaaggtaaatcacaagataagacggtgatgcaggttagagccaaatgtgaactaattcattttcatgaaaaataacatccttaaaagctaagcataaaaggacatttgtataaccgcaaacctcctatttaaagaattccaaaatcctgcctaatttaagcagtctatgcatttgggtttttcttttattagaattccttaaagcaaggaatatttttactctacaaatctgaggttaggaataactactcctattttgaagaatcactctctatacctaaggctaaaaactgataccctgcacatcagaccaaatcttaactgagtgggatgatgaaggttggggggtggttgtgggtacagtgtttaaaaacttgtcaacatttaaacgtgggagctttcatagtttttaaatccagactgatagtttattttttctattgttttgttttgtttgtttgttttgtttttgaaattgagtctcgctctgtcacccaggctggagtgcaatggcgcaatctcagctcactgcaacctctgcctcctgggttcaagctattttcctgcctcagcctcccaagtaactgggattacaggcatgcatcaccacgtccagctaattgtgtgtgtgcgtgtgtgtgtgtgtgtgtgtgtatttttagtagtgatgggtttttaccatgttggccaggctagtctcagactcctgacctcatgtgatccacttgcctcagcctcccaaagtgctgagattacagctgtgagccactgtgattgatgagactggtagtttattcttaaaaagtgaaagttacagcactactagccctgcattcctgcctggggccatcacctggagagcactgttcaagctgtcccagtccccaccactccctattctcttccttcactcattcatattgctgaccgatcccctatgacaggcatctgagattactaccactggtctttaaaagtggcaagttactgacggttaaattactgcaccagtagacagaggaaaaggtaaacactacatttatctctttttcagattcagtgcaggactgtccacgtaactgccatgggaatggtgaatgtgtgtccggggtgtgtcactgtttcccaggatttctaggagcagactgtgctaaaggtatgtgccgccacttccctgctatggttggaaaacagaccctccctaggcttctctgagcgggtaacagaagggacatccaagtagccttcccatcaaatcccccgagacatcttgcaagcccatgcatgccagaaggcataagccttcgtaaagagtaggctttgatttatgaccattggccaacgtacctataggagcagggcagttatccttggcactgaggtgtgctgagaagaaagatgtgctaaaaatgagatggtcggatttcctgtaaaagcagaagtgaattaccatcactcctttcttataatcattaacttctatgtaatggaagattaagcatctcagggttagtaaatttcattcattctggccagctacactcttaatctaggaagcgctatttatcttggtggaatcggttttaaattgtattattaatttatctacactgctgtgcacagaatagctggagccctgagattcttgggggaaaggtaatataagaaagaaaatgcttctcacaagaacagagaatttagaggctgcacaccttgcttgcaaaacaccttcagtgtgaccttcaaatggctctatcagaggcaggtatagtgaagagcagagcgtctcacacttttacccacaggcacacacacagacacagacacagatacacagacacatagacacacaagggtatatgtctaaatacaagtaggaaattgaaacaaaactcacaaaatgatattttactccatgtttcttttctatttcattttttattttattttatttttttgagacagagtctcactgtcgcccaaactggaatgcagcggcacgatcttggctcactgcaatctccctgtcctggtttcaagcaattatcctacctcagcctcccaagtagctggaattacaggcatgtgccaccacacccggctaatttttgtatttttagtaaagacagggtttcactatgttggccaggctggtctcgaactcctgacctcaagtcatccgcccaccttatcctcccaaagtgctaggattacaggcatgagccactgtgcccggcctcgtttttttttaataccagttattacccattacactgattttccacccaccaataggccatatcacagtttgaaaaatagtgaaggggcagttgagtgcacttgctgcagagtcaggcaatcctgagttccaatcccagctctgccattgggtatctgacattaagtgactgatttaacatttctgaaccttggtttcctcatctggaaaagtggggagttacttcctaggtttattgtgaggatagtgtaagataacacacacaaagctcttagcagggcacaataaggcctcaaagggcttgactttcttatttaattatgcatacgattttatttatttatatgtttaactaatcttcccgttattttcatgtgtgctttattaaaagaccttcctgccttgactttctgcaagacaatcattaataaagctgctctgtaaatactaaatagtgcctctcctttcccaccctcaccgcaattgctctgaaaaatactatttcaaatagtctcaatatttcaaagatgtgagggttccaggcttacgaatgctgataagtgaagggggctttctgtacttaaagttctgggtctgatggcacgtgcgtgagacttaattcctaaatgacaccgcttacaggcatctcttctgtcacacagtatggtgaaagcttcgataaacttaaaaagaaggcaaggtttgtagttctccttgaagaggtccttcacatcccttgtaagttggattcctaggtattttattctcttcgtagcaattgtgaatgggagttcactcatgatttggctctctgtttgtctattgttggtatataggaatgcttgtgatttttgcacattgattttgtatcctgagactttgctgaagttgcttatcaggttaaggagattttgggctgagacgatggggttttccaaatatacaatcacgtcatctgcaaaccacaatgagataccgtctcatgccagttagaatggtgatcattaaaaagtcaggaaacaacagatgctggagaggatctggagaaataggaatgcctttacactgttggtgggagtataaattagttcaaccattgtggaagatagtgtggcgattcctcaaggatctagaaccagaaataccatttgccccagcaatcccattactgggtatatacccaaaggattataaatcattctactataaagacatatgcacacgtatgttttattgcagcactattcacaatagcaaagacttggaaccaacccaaatgcccatcaataatagactggataaagtaaatgtggcacatatacaccacgaaatactatgcagccataaaaaaggatgagttcatatcctttgcagggacatggatgaagctggaaaccattattctcaacaaactaacacaggaacagaaaaccaaacactgcatgttctcactcataagtgagagttgaacaatgagaacacatggacacagggaggggaacatcacacagtgaggcctgtcagggggttgggggctaggggagagatagcattagaagaaatacctaatgtagatgatgggttgatgggtgcagcaaactattatgggtgcagcaaaccagatgacaggttgatgggtgcagcaaaccatatgtatacctatgtaacaaacctgcacattctgcacatgtattccaaaacttcaagtataattaaaaaaaaaaaaaaaaagacaagatgctgcccgacagctctcagggctctgtgtcaggccagaagccacccgacagctctctgggctgtgccaggcttagtgcactctgtcaatggcagggggcacatcagcaaagtgaactgtggagactggacctcctcctagcgcctccctcaggctctgagggtcactgatggagcaaggagaacagagaacagcttttcctagcggaggctttaaaggaaggaaaatctcagtgtcatttgaatggctttccttgcataatctaattttcctgggagtgaagacattaatgagaagaaggacagagtcggccttttatatgtggctgcaaatgggctgaaccctcagccgcacggcccgtgagctgtaaatgtatattaacactgacacacatcgatgtattattaatcctaaaaaccatgtgtgctccgactgcacatccagtgactggccttttaaacctaagtaccccggccgtttaagaaccctttgctctaaatccatttgcagatgaacgtccattctacattatggatctgtaatggggtgtccatttagctgcttaaaaggactctcggtgtgtgttttgcattcaccacctgcagtgtggcagggcgcacactgcaagtgtgcattagccatggtatataattgatccttgtgaaacaaatattgagtggatgttaagagtagttattcctccatactcagtcgctgctcctgaaatcgggctttgaacttgtatactttaatttagctgttgcacacagtggacaaaattgaagtgtttaaagaataaaattgcttttccccgatttctccatttattctgggtgaagttggttgaagagtgttaggagtaggattctaccttttagccctatagatgtttttcccttagtatttttttaaatggccacagtttaagctacttcattgttaacagagtgaaatttcccctcattctaaagccttctttcccagtctttgatctttcatgtaccacctttattatttctggcaatttcatgggacagaagtattattaattacttaacatgtttcttcaagtcaattcattatagttccatagtttttttgtttttgtgtgtgtgtgtgtgcgttttgttgttgttttttttgagatagaattttgcttttgttgcccaggctggagtgtaatggtgcaatctcggctcaccgcaacctccgcctcctgggttcaagtgattcacctgcctcagcctcctgagtagctgggattacaggcatgtgccaccatgaatggctaattttgtatgtttagtaaagacggggtttctccatgttggtcaggctggtcttgaactcccgacctcaggtgatccacccgcctcagcctcccaaagtgctgggattacaggcgtgagccacctcgcccagcgataaatttattttaaaaagaacaatgtcaaaaccagaaaattgaaaaaggaaaaactataggaaatgttagcgcccccattaaccctatctagagagtaatattttcactttgattagcatccaagccaagtcagcttcttacacacttatttcacatcaagaatgccaaaaggggacttgagcacacataagcctggcgtctggagagactcaagccttgaacacctcaactcataactattggctcctaaaataacaaaattccttgaccacacctgtgggatgaaatgagaaacaagtaaacacaagcacacaggtttaactgtaccaggttcaagtgcaaaaatccaatgattagcactgaatttatttctgaaatgttaagcctatacttccagttgtttttaaataacaatagcttttaagtactcaatatgcatcagatattgtgcaaagtacttaatagatactcttatttgtcttcatatcaatgatatgaggtaaattctattttttttaattatacttcaagttttagggtacatgtgcacaacgtgcatgtttgttacatatgtatacatgtgccatgttggtgtgctgcacccattaactcatcatttaacattaggtatgtctcctaatgctatccctccccgcctccccccaccccacaacaggccccagtgtgtgctgttccccttcctgtgtccatgtgttctcattgttcaattcccacctatgagcgagaacatgcggtgtttggttttttgtccttgcgatagtttgctgagaatgacagtttccagctttaaccaatcctccccactacaattttgtaaacattttgtattgaaatcatttgggacttgcagacaagctgcacagatagaacacagagtttccatacagagcgcacccagcttcccctatgtccacattttaaatttccgtaactcaaagatcaaaaccaagacattaacatccatacaaagccattagctaatttacagacttttcctaactttgccctttctttctcatccaggatcccacattgcatttaatcgtcacgcccccttcatccctttaacctgaccagtctgtgacagttcctcgttactccttgtcttttatgaccttgaccctttagaagagcattagtcaggtattttgtggagtgtctctcggtatgggtctgtctgatattttccggtgattggattgacgttatgcatttttagcaagatgctatgccctcctcagtgcattacatcagagatgcacttctgattttaatcagaaaaaaagtaaaatgtggttgtataagtgagtatgtgtgtgtgtgagtgtgtgtgcctttgttccccctcacacataaggcagagacgtgggaagcctcgatcccattggtcctgcacaatttagcagtggctatgacaagttgtcactcacaaacaacttttgggcttaagaagcagctgactgttggcagggagtaaccctgagccaacagaatgaggtaattggctagcaagtgccgagacaggtgcacctgagtctcctgctccccagaacagggcaccccatctcccggctgtgggccatgatcggtgtccttctttcttttctggtttgtttgtttgtttgtttgtttgtttgtttgtttgttttttgagacagagatttgctctgtcacccaggctggagtacagtggtgcaatctcagctcactgcaacctccttctcccaggttctaagcgattctactgcctcagcctccagagtagctgggattaccagtgcataccaccacacccagctaattttggatttttcatagagacgaggtttcaccatgtcagccaggctggtctcaaactcctgatctcaagtgatccacctgcctcggcctcccaaagtgctgggattacaggtgtgagccaccaagccaggcctgtccttctttcttgataaaaactcttaaaaggccccaagcataaggtcctccctcatcacaaattcgcattcacctttgttccttcactgacagctgtgcccggaattccctggctctgccagtttctgtgactgcaggcagccggcagactcaggccctcctgccagggggagaatttgccacgttagcaagagagactcccatcacatccaagcgaccgggtatgtgtccaagtgacagaaatgcggatttactctcttgacctcacactgcgcctcccgtgccctcagatgtgcagtgcaaatggcagctccttgtcttcttataaacctgccagtctgcatcaggcatctgaagacatccttgcagtgaatggaggaatcagtcagcatgcgtttgcaagagcgtttattccgcagccctcacaatctcgggggccctgagaggatccaatggcaaaatgaaactgacctgccatggaaataacatggaatggatctaacacattgtcctgagtcagtcgaggggacagaacttattcgtacattcagtgaatgtgtgtgatctgcccactgtgagacaggtactgcactaagagccagactagagggaggagcgagggaaccacaggctctgccttctgagagcttctggtctgaccagtttgtattaaaagcaagggggtaacataaatgggagtccaaaatactgtgatacggactttgaatgccatagacattccaaaggagaaaataaggaagtttataaagcaataaaatgtgcgtgttataaatgggggagtaagttcccctggtggtgtctttaaggatcactccaactgtggaactcacgctgggagaggcatgtgaaattcagggacttattatactcacagattctagagagggagccacagcacacatgcagagggctgtgtaggaccagctccaagggattgggttcagccaggcaggtgggagctgagagaaagtgagagctggtggccaagtgcctttattgctgagtcagggtggagcaaaaggcatgggggtattttactggtgcatttgaatgtcagtagatcacagtcagggaaggcaggaaggggaacctggggcagaggccggccttatcacacaggtgcacctggtctcctgggccgtgagagaccgggtcatgaggatgcctgtaaggcatcatgaacatttgaagttttcaaagtttttaaaaaattcacagtgttgtgaatcaatgaacatagccaattagcatcagggaatacggagaaaattccaccaagaagactgaatagtatagaattgcattaattgagcaacttaataggcaagctgttcagatccagggcctcaggaaaaatggcatttctttcctggcaatttgtaacattttccatcaggcacctctcctgtccagcaataattgtgtttactattcaagttattgtttattctacggttttttgttattactatttcccttgcatggttttctcattactttaatgctatttgttgtgggctagaggttttttaattattattcctttcccttgtatttgcttttatgtgaaggctttaacttcaggtgcttcctcggattgtttgtaaagcagccttgcatttcagaagagcgctgaggtgtctgggtttttttctgttttgacactggcttctcagatggcttatttgggctgagcttgaggcctcaacctgcagcagaaaacacaccagagccgtagttgttaggtaatgcgtatttaatagctattagaaatgacaactcctgctgctgaacagctgtcactggaggcccagaaatgccacaaccacgggaacataaagtcttctctctgggggttggtttcagctcctacccagcttctgtggagctttaaaaaagaaaaaaacaggaatcttgccatttttctcccgttaactggcaaatgttcccaccaccaaattcctcatggctacatgccagcactaaaaacaaatcatcatcatcatcatcatcatcagagctggcatttattgagttcttactatatacgccaaccaccgtgctgaacaactacataattatgtcattgaatcatcagtagccctcatttatagacgattatcatccccttttatagatgtggaaaatgaggcacacagagtttaagtaacttgctcaaaatcactgagcaagtaagtggaattgttgggattccaaccaggcagtctggcctggactttcaacactagactagccatgagactgacctcagaggtgaggcataaaggaattttgtctttgcaggcagcttgtgcgatggttacacactagaattctgagtttgaacccaagtaaacttttcaggagaggaaacaggagtttcccaggtagaaagtgggagagccagagtttgaaacaaaagcccctggccaggtgcagtggctcacgcctgtaatcccagcactctgggaggccaagacaggcagatcacttgagcccagcagttcatgaccagcctgggcaacgtggtgcaatcacatctttacaaaaactatgaaaattagctgggcatggtagtgaagactgtaatcccagctactgaggtgggtgagtttggagaattgcttgaaccaaggaggtggaggttgcaatgagcagagattttgccactgcactccagcctgtgcagtggtgagagaaagagacagagagagaaagagagagagaaatcttctgacctcagagcctgatgctgttaccctctctcttcccagccgccaggcacgttccatcaccttcctcttcccaccacctgccaactcctgttccgatgacctccaacaatttctgctccatttttcctctctatccttacagctggatttttctatataaatattaagttgtgggagccactgccctgctcactcggctaccaacctctccatgatggtatttctcctccccacctccagagttctccagagttctcccaaagctcttaggggcatgtcactactgtcctcaaacaccttcagtggctcccagtcacctcccacaatggttataaaagctttggtttaaagacatggatctgaagagattgttaccaatgtgtatttccaggtttctcccccatgccagccaatctgacttgtaggactggtgtgcagctcaggaagacccctttttagcaagcctcctggggggggggtctgatgcaggtggtcaggggccacattccgagaatgaagatcacatttcttagaatgatgtccaaggtcatccacgatctaaactgctctcgcactgtcacctcccactgaggcctgaacactcactctaagttcccagtagtcacccctcataaagtgtgaggccctgcttcttcctctttgctcaggctgatttttcagctggaatgttctcatcaatcccagcctttcctatcaaactgctgctcatcatggaaagccatgctcacaggtcaccacctccctgaagcaccctcagatatgaccctgcagtcacctgggcttggcaacatcgcagcagtggcccctgccacatgccggccatctcctatccaggtggttctcctgctgatgacaagcttccagcagtcccctttgtacctccctgtatttagtttggtacctaggacaaaatatgtgcctgctaaatgtctggttacttgaatagaggaagcaaggcttataaagatgaaatatggcttgaaaatgtcacaagaaccaaagcaagtgctaaagaacaaggttctaatttgtcggatcaatcatgcagcaataaatcagccacctttgaggcatggagggagggcatgagcaaaggaaggaaagaaggaggaatgaaaaaagaatgaaagaaaagtttacagaaaagaaatgccatttattccacaatttacgtgcattatgtcataatagccaagtgattaagaaggaaagctgtagagtttgaatttgctaggtttgaattattgctgctctagttaactgaacccattttagaaaattacttaacccctctgagcctcggttttctcatctgtaaaatggagacaacagccatattacctattacattgctgtgaggtccaaaaagtaaatacatggaaactttgtagaaccatgcttggcacgtattaaatgttagctagtatccaccttcacaacaagcctttgcaatcattcattgttattattcctattttacagtaaaagaaacaaagacttagagaaagtaagctacttccccaaggttacatagcagggccacgtctgcctggttctgaagcttgtggccctgatagccatccaaaagagagatgtggcaggaagaccccccaaatccagggcagtgtgaccactcctgaagtccccaacaataagtactgccagcagctggggctctctgagccccctctggctctgtctcacaatatgctctcctgtctccctttaatagacatcttcctctgcaccgcggagaacaatgacaaagctcttagtcccctccctgagggtagctggtcctccccgtcaccaggaatacttccctcagagcttccttctctctccatgaaggaggctcgggtctcagctgtccttcctgagacagccagggctgcatcctagctccttcaaaccttccatcattcatacccatctccttctaccaccccatcttgccctgaaatcctcattaatgcagacaggccatggaccatgactgctgcccaaaagaacgtccctcagcacactgcagctggatggccagatcccacctctctttcctcccacccctgacctaaagaaacatacagggattctttggcagcaaaggcccagaagcaggagcttgaagcaggtgcacttggtatatgctttgcagacagcaactgagcagacacccttggcaaagtcacttttgataaaatagcgtaagaagaatcgccaccgcctattgaagatcaactacatgctgggcactgtgcaaagggttttaagtgaatcctctcatttcatccttgtgtcatacgtcatgatcgtctccgtttcacagctaaagaaactgaatctcagagagattcaagacccttgcccaggtatggtttttgaactatgttcttacccactggattagtgatacccacactggagcccttgttggaatcatctgttaacacacagattgctgggctccacccggaatttctgattcagtaggtctggggtactagcatcaggattttgttaaatatccaaatgctcaggcctcacgccagacgttctgagtcagaagctgcattctaacagggtccccagatgactcccatgcacattcaagtttgagtctagataaattgcccttgaactttgcttggactgcccaaagagaacagagatcgaggcagtcgcatcacttttgacctctcatccccctagcttgccaggcaggcatggaggagccctttcctccccagtttggaagttgcagtgcacattatttggtggccacgtgcaagtccatgcctgcaagctccaaaacgcggcagctcctgatgtttctcatggcagttgcgttaccaaacagaaatcacttcgcggggcttcagtccgtcagccctcccccaagttaaattgcttctgagattaagaacccttcttttttttttttttttttttcctttttaaactactagataagtagcagagcagccctggaaggcagaatgtctaaccctagggaaacttgtacatgtgatgcacacagagctaggggaatcctgtggtttatgggaaaaactttcgtgctgggaaataaaccagtctttagaaagaggtcagctgggatgggggacagggaaagggtgctttaccctgtcttgtctctctacaaagtgaccagttggaatagttttctcccagtgaaaacagtgataataaaatcctatctagtgatgactatgtgccaggctctgtgcacagcactttacatcattatctcatttcctccctttggaaacactatggggtaagtcctgcagaattcttatcccacttcaaagataaagcaatcgaggctgaaagcaaagtgtccatagtcacacagctggcaaaaacaagggaaggaagaaaggaaattcaggctgtctaactcccgtaagcctacaccatgcccagaaccattctgcctgctgagagacagcattggatgaaacagaccccccatgccttcaagaagcttccatgcttgcgggtaataggacaccaacaacttgcaaattcatcttgatgctccaattacaacaaaagcgtaaacctccttcagtctggacttgagctgcagaaaagcttactgtgtactccgaagaatttaaatattcattatgtaattaatgctgttcagtctcacacacacatacacacacaaaaactgagacttttttaaagaacagcttaagtacttatcgattgagaacttttataactctcaaaatggaggcatccccatatctctacaggtattttaaatgaattgaattaatcataggcttaaaagtctcttgcgatcttcgttaacttccctgggtttaattaaaacatctgtgcacttttaatttatcgattcatccaactcatatgtcatgtttttaacacaccccagcatgctctgcatcatttttaacccgatttccacttaactaaagcaattaaattcaccccggattaattaaagcatccatactttcgtgcttaagtcagcgtgtgcttctttccccacatggctcctgaatgtcagagatttgacacacctgatgagttttttgtccttctggaaattcttccctgaatcactttcttgcttattaatgtgccatttgacagaatgggaatgaggaagttggtgcagctgaactttggccctctgagccggggactctgaccccatctgtcagaatgcaccatctggtttcctctcttcacgggggtcctgccggctcttgcccccactgaaaccaactaaagcgtctgagtactctgggcaggacggtggcaggggttgggggagggctgttcaggtcagagatgagcatcacagtcaggatggctggtgatctttgcatttgtatttcataatcactcctagctctctttccaacttcctctctctctctccttccctacatacacagtcctttattgctctgcccatttaataggtcaggaaaactgagatgccaaggtcaacagacttcctgcttgggcacggtgagccagggagctgtccacagagtgacaaatcatctccctgaaaactagatttgatttgctgccatccactgggatggagagagcccatcccctcagccatggcagcattgggtgtaagcagccttatttttttccccgatcagataagccaaaaatatttctcattatcatttttatctgtacttacttaattttgaaggaagctgagtatcttgtcttacctttattggcaacttatattatttctgatatgtgctttgcctaggttttcattcatctgtttattaatttgctagagttctttgcgtatttcagatatcaaacgttatgctgtaaaacatgagaaaaaaatatttcttcccagagttgcttgtcccttaattttgcttagggtatcctttgtcacagagaagatattaattctttataatcaaatctgatcctctgttccttcatggtttctagaatttatgtcttacatatctccctcccaggaaaataaaattagtctccagtattttttcaaatactttggtagtttttgtttttctgtttaggtcattaatctgtatggaattttttttaactttaagttcaggggtgcaagtgtgggttcgttacataggtaaacttgtgtcatggggggttgttgtacagattattccatcactcaggtattaagcctagcgcccactagttatttttcctgatcctctctctcctcccaccctctaccctccagaaggtcccagtatgtgttttttccctgtatgtgtccatgtgttctcatcatttagctcctacttatgagaatatacaatatttggttttctgttcgttagtttgctaaggataatggcctccagctccatccatgtccctgcaaaggacatgatcccattcctttttattgctgcatagtatggaatttatttttgaatacagtgtgcagtgggcggggggggggtcaaactttattacttttctaccagatggattgccaattgcagggatcttgctagaagggaaactcacctttctgacactggtttgctcagcaccaagctaagtccacaacctcaaaagccagtggggttgccttttgagttttggtttgaggggtcaccgagctttgtttgcctggcctccatgacctaaatattacatcctcaattgcttcaggaggatcaatgcatcttcttttctccatcacttatcctctaccacctaaccaagctactaacccatgtgagttactcatcactattgctgactaactgggatataaggcaaccaactattagtgctattttgacgatttgcctggagtactagcttcaagtattttcacctctcttttccaaagaaattttcaaacagacttcagctgggtgtagtggctcatgcctataatcccagcactttgggaggctgaggcaggaggatcacctgagttgaggacttcgagtccagacagggcaacataaagagaccccgtctctaccgaattttttttttaaattagctgggcatggtggtgcacacctgtggtcccagatgctctggaggctgaggcaggagaattgcttgagtcagggaggtagagtctgcagtgaatggtgatcctgccactgcactccagcctgggtgacagagcaagaccatgtctccaaataataataataataatagtaataaaatgaaataagtataaaacagacttcaaataattttttaaatacattatttgaaattccctctacacatctagtccagcccacaaattatttgtgcagatgtaggcattttccctctgcttttatgactgagcctctccaatatccttaacttttctccacgtattctctttactgcaagctccaagtggacaggtggcttatcctgttacttcccactgagtaaataacactgataattcatctcatcccttacagagaactttgtgggggctgggagggcgggggagcttcagctggatcattaaaatgagctttataccatttaggtgaatctaaattctgtcatttttttgtcatcagcctgttaacttgtcagttattagtggttgtggtaatttatttttcttctgtgggagtcttagagcttccatttactagatttagtaaaacaggaatagtcaatttgtacaaacattttaattaattttacatagaagcttgaatgcacaatgttctgctcccgtaagccttaggaagaagagagacatgcggagacagaaaacgctccactttcatacctgaccaatcacaaccaactccctcccacaccagaaaagactggaagaagaaaaaatgaaatctttccattagtatgatttgacatacgtctggtgattgctagtgtttgtgtgtgcgtgtttgagacctatggcatttctttattttattagcccttgaagtcagattagagattcagtttgaaattttgtaagggagcatctcttaatttgcctaccaagtgtcagccactcctgtgagccatacatgttacctcactgaacccttccatcaatgctgaaaggccattttttgaaggggaaattgggtctttgagaggtgcagtaatcttgccaaaatccacagctggtaaggtacaggtttggtttcgaatccaggtctttctggcatcaaaacccttgctacttccacttctgctccgtaatacttcttggcacagagtaggcagtcagtgtcatttttctataacctgtcataaaaaataatgcagcttgcatgatagtaaaaatataagacttattaatacaggaggttccccatttcacatccagcctcttgaacaaaacatcagcctgacctcagatactgggatgctctgggttgagttatgtctgagaatgaatcagttgccccagagggaaggtgctctccaatgcaggacaccccagccaccactggagggagctcatctggtgtttctgcactctgccccatggcaactggattactataaagtctcgctcctgtgatgagccgccttccacttctttgtatggcataagcaaagcccattgagtgtcctgctttccagtgaacatcacagtgtttttgcattttttaccacactcccagtgagcacgcggcaaaccctgaaggaaggctgcgtttggaaggtggagaactctgtgacctattttttatatttttcactgagtaatttaagtaggtcaaattttaaatttgatttcccaagcacctggttttaaataaaacccattcttaccttctagacaatcctgtttttttctacttgaagtttatgcagaagaggaacagtgtcactatgaataaagaaaataattcggtcaggcacggtggctcacacctgtaatcccagcactttgggaggccaaggcgggtggatcacctgaggtcaggagttcgagaccagcctagccaacatggtgaaatcccatctctactaaaaatacaaaaattagccgggcatggtagcaggcacctgtagtcccgctactcaggaggctgaggcaggagaatcgcttgaacccgggaggcagaggttgcagtgagccaagatcatgccactgcactccagcctgagtgacagagcaaggctctgtctcaaaaaaagaaagaaggaaggaagggaaggaagggaaggaagggaaggaaggaaaggagggaaggaagggaaggaaggaaggaaggaaggaaggaaggaaggaaggaaggaaggaagggaaaggaaaggaaggaaagaaaaaaaaagaaaaaaattttatctatattttttattgattaaaaaagacaaaaattttgcaccttactttctaccatcctccaccttttgggaggaaggaggatgtaataggagaccagtgttggtgatttgatgtaactttctctgccatccgtgacagcccatccaatctataacccttaggtcagagagtcagaaacagcccttggaagctcatttaaatacacgttgtgcaaccatacttctcgctgttttttatttcagtgcagggctggaagggggctgagaagtgatgttgattctagtcttcccaccaggaaataccttcactgttacctagatcagaaatgacaagtaggttttctctggaataccaactctgcctgcttgccggtctcagcctgcacactgcattgacggtttcgaggctctatctgggctcaggggaacaagatgccgtgatcaattagtgatgtctgtagaggtgtgggaaggtagtactatagatcatgtgcacacgcctgccatcccagacctagagcttagcatgagtctcaggaggaactggcatggaacaaacttaactctgtcttaaatccctctcaaaactttaagaaagttcagagtttcttgtgctacttcatatttgcatgttccctaattcttaattgggcaccctgggttcaaagctctttttctaccctctgttagacaatcagcctctgtagcaactctgtacaaactcctctgtttaagcatcctgtagatagagagtatgatccctacatttagacagttcgtctaaattcaatatgcggctttgaagttctcacttttgaactcattcttctcctctggtaaattcataagcataagaattctactgaaaatagcgcccccagtagttatggcaactgtcctattataaagcattttgaggggaaatgacccctcaatcgtatgtcaactattgagatacttacatttcaaatcagtttgcaattaaggtaaaacatgcacttccccagaaaaaggcattgtgtttacagcatgagattcactccagggactgttcttcccacgtctttcataaatggccatttagtgcttgcccgcaaccccccaccactgggaaatctctgaatatcaggaacacaggagaaatgtttacttaatcaagccaccattgataaacgtagcaatggaaggaaatcaacaatgataaacatagtccctgtcttgaatagctgactatatatctttgggaaattagacacgcacagaggaaagttaattaccataaaaactacatagaaacatgacaacaaaaggggattcatgaggctgggtggggcaggtgactaggaagtgacatgattaggtatgccatcgctgagtggcacagggcgctcacccgggttgtagatgtgtgtacacacacatgcagaattctcggaacctgtgcattccaaaccatggataacaccaggagtcactgaaacacctgcatccgtcatttctgaaggcctctaatgccacttccatagccggaggattttaggcccaaatttgaaggcaggttggaaagttaggctctttacaaactgatgcggaaatgagaagtccaagacctgaaggagaccgaccactgaaatcccattcttgatgaactctgaaaggtgggaattggcacatttgaggccaaactgattaaagctgtaggtaatctcctcccagacaatccccactgattttccaaccttcttctcaccaacagatggaagagggtacagctgatgggcgaactactagaaatttcatgccttcagcctgcctgctcccttttcttttttttctaataagtcaagcatatttaatcgttatgctttattacacatgttacactttgaaggaggcacaatgacagtagtccctccttatcctcaggggatacattccaagaccccctgtgtgtacctgaaaccacaaatggtacaaaccctacacataccatgttttccctacacatgcatatctaggacaaaggttaatttatcagttaggcccagtaagagattaacaataataataaaatagaacaattaaagcagtagctgtaacataaattatgtggatgtaatttctctaaattccttattgtaccatattcacctattttcagacagcagttgaccatgggtaactgaaactgaaagtgaaaccgcggatacagggggactacttcatttcttcatggtatagataaaactgaggcagtgagactttcagtggctcagctgtgtctcatccccacttcctttttaataggcataaacttattaggaataagagtcgactgatctgagggtaaaataatcagcaaaatggattctgatctccaataccaacaacagaacaaccataaggacgtcagtgtcgcttagtgaagggtaccacttcaaagttgggccaacctggttcccagccgggctcccctgcttgtgggctgtgtgactggacacgtcacttcccctgtctgagcctcacctgcaaaaatggggaccatgactgtagcctccacctcatagggtgattacgatgatgaagtcatgaattgcacataaagccttctttctataccgtgcccagcacataacaagcatttaattggtggtagctgctgttatcagtagcacttgtgttgtttatctggcaatggttctgcacctgcacagccagagtccccagcctagaacactgtaagccaagccccaaggccagacagctctacctccttagactgccatagcccctcggatgctggcccttcgtgacctagtgctctgtctttggtttgtgcagctgcctgccctgtcctgtgcagtgggaatggacaatattctaaagggacgtgccagtgctacagcggctggaaaggtgcagagtgcgacgtgcccatgaatcagtgcatcgatccttcctgcgggggccacggctcctgcattgatgggaactgtgtctgctctgctggctacaaaggcgagcactgtgaggaaggtaagcccgccggccccggggctaggcagcagtggagggaggcgtttgcagggcctgacctttgctaatgagcccagtcctgggctgcgtgttttgcaagagaagtttcaacattttgcacaaaacaacttcaaactcctttgctttgataaatttctttggttgtagaacaagaaaagcctatggagatggttctggaagaaacgttttgttttactctcctttgtagaaattgattccttttctctttcacctttgtttttctctttaaattgctctctctgcctttgtctttctgtcttctctttccttctactcctcctccccttccttctctttcttttcctcttttgttcctttccctcgccctatctttcttcctcttttctcctgctttatttagtaattgggaattactaaagctattcagagaaaagaaacaagaattcctaagccccttgcctcccttccaaacaaaaagctgtttgttgttattgttgttgttactaactcttcctggtaatctaaggcccgtgtatgtctgtgtaaatatttcagcaaaaattaatatcaatagacagcagtcaggcttgaaagactgtaggttttttatgtcatttagaaacaccatgtagggcaaattagcttggttacttacaattgcacaaaactagaggagagtgaggatgcagcaagagggacgggatttgatggatcctgaaaatctcatcctggcagacacgtaagggcctttcacacacatgggtgaaaatcagggatataataaactgaatctaatctgacaatatggtcagagatcaggcttggagatcaggagagggggacatagaagaggggatacaggaacagggagaaagagcacctctctggaggggatccaaaagcagctgtaactactcctagttaccttgatcagttatttcagataaattattttgtgccaatatgttgggactgacttgcagtagctataaggcaagagaaagctatgctgcctgtcagccttcctgctctgtatttggccttgcagaatatggtctctggttgccatttgattacttgtcaccatataaagaattggccacagctggtaggaaggtaagaccatagaccctctcagccccttgcccattccccaatctctgaattggcttcatcattgtcttccagctgaggctccttttctctaagtccatctcccagtgaaatgccctcacacaactcaaacagcccttttccctcccatgtccccaacagaaatagaagtgtcaacttgcccaacaaactaaggggaaaaagtgaagcccctgcctattctgcatgaacttgatgtaaccacccaagatatccccatagaaaagatcctgttggatgccatatgcattctgtgttcctcatggccaggctaacaagggatctcaggttttatgaggttctcagatgctaatggattcattctttcatcccaacaaccaatggatctccagagttctatacaaaataaccaatcatcacagctctcaccacaaagtaatgacagtgctttgtacttagatacacccacatagggttcccttgtgaaaccccgcatttcatcgtttttagaactatggctaccaaaagtcagcttccataacattattcctctaagatttttcaatatatcagcagtaatgcccttaatggggaccagaagtctgacccccagatcttcacttgctcagttctctatataatttttcctctattataaaaggtagcctccctatgtctgcatcataaagaattgggagtttggatggaggaaatactgatttaataaccctgcttgaaaggttaaagttcttaaagataaatggattgcaggaggcaaagctgcattcgctgaaaacataagagaggccaataatacgacaagaaaggttaaaacgaccttttgcatgcatcatttggagaaaggaaagtgctagggcaacaacattgccagtcttcgaattttttctctccagtaagattatacacagctgtatgcatggaatctcaagtgatttctcaactttctcactatcccacccagtcttatttaaatgttcagagtgaattaaccatccaaccaaacaagccacgtgaatcattatgaaaggatgaaatctcctccgttgatttctgctacccaaaaagaatgaaccgaggtgattcatatgctgttttcaaaataggaaatggaatcagaaagtctggatcagcactttttcttccatttagcttttttatttctgatattcgtcatagtcataacgttcaaacaatttacctgaaatggccatggcaatgaaatcaatagttgccatcccttcgtttttcctgcataaacatggttgtactattaacaaatttgcccaagaaaatgaaaggatgtattcgtgaggtttcattcaatgatgtgtaggggagtgggaaggtgatgagagaggagttgacatattagtttaagtcagccatgttttcatgtcagtttcatggttgagtcatttttcaatgacatttaacttcataaatgtaattcatggttcttcaggggcttatagtacatattgtttgtaaaactccttgacctccttttttatccttagggatagaaattgcattcacaacccttttttgtcaaacctacagagggcccaagactaaatgagttctaatgatttcagctgccagggggctgatgtttcgaggcacatggtacttagctggtaaaggccactgtccccttttaagtgtaacactgtttctatttataaagcttcgtaaaatgccatagtccctcctgcctgctaaaggctctaaggacgtggccacaagagcatcttaggaaatcggaaccaaatttaaaattcatagtaaaactgctcctcttgaagtttgaatttagttattccatccactgctgtaattatatagcacaaagggcatatttactggtatcactgaccagagaaagggttagctcatatttttagatacaataaatggtttttttgatggcattctagtaccggcgctaataaatctctgtggattttcctccttcctttatactataattcaggatagagaagagagagctaatttatctggaagaaaaatgccattttcatttttttagtgtattactttttattatttcatccttctaagaaaaagattgtgattttttttttttgaaagctcctagctgctggcacctcaccaaacattttaaatggctaattataggttaagaacaatttttgaagcaataagccacaagatatttttgtgtatattttgatttttccttactagaaatgggggcagagtgaaaaattagaatttcagaatttcctttattggaacaatataaacatgatgggttctgaatgaatttgttcataatttacagatccccaaatacgattttttttcaaaagcaagaaagaagttgttagcacaatttctgcttcctatcggtcctttctctacacaggaagtgtgtcccatcaatgacaaatgcttatagcacagtctgtccttcattcttgcagcaactgtgtattgaacacctggtatattcccttacctgtgctaggcatgagacaccaaaggccctgcacagacctttgtcttttttgttttgttttgttttttgagacggagtctcgctctgtcacccaggctggggtgcagtggcgcaatctcggctcactgcaagctccgcctcccgggttcacaccatactcctgcctcagcctcccaagtagctgggactacaggcaccggccaccacgcctggctaattttttgtatttttagtagagacagagtttcaccgtgttagccaggatggtctcggtctcctgacctcgtgatccacccacctcggcctcccaaagtgctgggattacaagtgtgagtcaccacgcctggcccgccctttgccttctatgtgttcgatgctttcagctcaagtttacgttcagatgtgctccaccaccctaaatggagcaaatctgaaggtatcaaatgggcttatgtcatcaggagttatactccccgagacaatgaattcaactgtaaagtgataataacaagattatgtaacatcatcataaatatctccaactaataataagcaaccaaaattcacctttgggggagtgtacccctgatttttttttaatcactgttttttccccatgcctgaaacggttttgaaatgacttccatatataataccttcctgagaatatccaaatgggatcgtgagaaatatctcttaccactgaaaattattatttttgcctcaagggagggctgccctttggaaacttcatggaatattgtgatttccagtaagtccaaatttctcaagtctgttgtccctcaggactagttaatttgtggcatggatactctaaataatgtcatatttagagccaatacgtcatcagtattaaaatacaccaatggctgggcatggtggctcacaccagtaatcccagcactttgggaggctgagataggaggattgcttgagcccaggagttcacaactagcctgggcaacatagcaagaccccatttctagagaaaaaaaaaaaaacatagctggacatggcaatgtgtgtccgtggtcctaactagttggcagactaaggcagtaggatcacttgagctcaggtgttcgagactacaatgagctatgatcataccactgcattctagcctgggtgacagagcaagaccctgtctcagaaaacaaacaaacaaacaaaaaaggcattattttgtgccccatagggaaagaaaaaaagacactcagcataaaaaatgtcttaggagatcctacagaaagctgagaccctgaggaattatcatctgaatataacagtgaattatttagagaccagaagtcttacatatttcaatcttggcattgtggaaggagagaaaacaaaattttctgagaatttaaaccataagacggtacgcatacacaggaaggatttaataacactgtcagcgtggtccataaaaacttcaagaatagaattcaaagtggtctcaagctagctgtgcccccaggtgatagaagaagcaatcctttaatctgggccaacaggcctgatttggaagccgtgaaaacgggagaaatatgtcttaatcaagtaaggtgatgatacatccacatttgtctgatccacaaagccatatctgagccctgtgctagaccaccatttctcattcaaaccgtatattacacaaagaaccctcttctccaaatgacattgcatcatttcctgagaatacataggaatacataagaaagctgggcttcctctaaaaggccctatttattcaacccttagattgaatggaggtcccaggtttgatatcatattctcatgcaaaaagtcctgtcctcaagaactggcctttgcagctcgctcctctcctcactctgagtttattcaagttacgtactggatgtatatccactctattaagatggccaaacaatcagacagtgaaacaggcaagaaccacaatgactggactctggctatcagctcatctgattgactggtagaaggtcagtgcctcagccagagatagccatccagtcccctggtgattacctgtaggaaggtgatcccttttggatcattttcacacccaacttcgcctcttctatactgcacatttactaactccttcagtgggtgtgtgctcagagaatggatactaattttagacttagcctaagtgaaacctcattaggaaagtgactcataagtttcattggttttccttttcatcttttgttaccttttgaagtcaagtattagtgaagttacaatgagcctctctacttttctctcttatagtgaggggcaatccagtttgacgacacatgtagaaacatggcatatattcacattcctatcgcagatgctctgatatgattcagtcaaggtcctaatctttataagcacaagatactaaaggtggagtggcatccttctatatctgacttctaatgctgcttgagaaatccccttttcgtttctcttgtatcttcttcaagtttgagatttggtgtttgacaaataagaaggcttttactttttatgggtgtcttcaggtgaccacataagtatttcttgggctactccatttgctagcaagtggatgggaactggtgacccactggtccattcagcagcaagcccatgtctcatggtccatcctccatgggtgattaatacttttattctttggtttttgtttttgtttttttcagttgattgcttggatcccacctgctccagccacggagtctgtgtgaatggagaatgcctgtgcagccctggctggggtggtctgaactgtgagctggcgagggtccagtgcccagaccagtgcagtgggcatggcacgtacctgcctgacacgggcctctgcagctgcgatcccaactggatgggtcccgactgctctgttggtaagccacaaggttttctccttcctctctccaacactcctgccctgtgttccatcccattctcagatggatgggaatctactcttaatacttagctggggataaggggactttgatgaatcacattgtgtctttctcattctcttctcctcaatcgtggagtctgtgatctttgagaaacaaacaaaaaagcactgggttggtaccatcaccgcaaatgcatgaggagcccaggagggatgcttccatttgcattataggttttcttatgtacattccctaaaggtaccagaaaacaaaacagaacatttcagccccagacaaactaaatggaacatcccataaaacagaaaaggggctccctcggggtgctgcgtgaacatgttctacagctctgtaatactccagtgacaggaaaataatgaagtcgcgctgtacacttcattttcctaaaatttagagtatgtgtcttccctccagagtgaccttaaaaatggaacagttcaacagttcaagccagtcccaaccttcctgagaaaggttctgttcacactgacaagtccctatccaagcaagcgatcattccgcccccttcctctgggtagtgagacagctgtcagattgccatggcaatcaggaagggaatagacgtgaagctttgcctacaatgggaaagaaatgaatatttcattccaaaaagaaaaaaaaaaagaagagtcagttaaaatgggctattttggaatgtcttctcagcccacttgactctggcttcaactctgttgctggtggtcctggcaaggccgtgcagatgatgggaggaggcaggggtcctagatccaaaacccagttatgctacagatatgctgtgtgactttgagtgagtcactggccccactccccggcctggtcttccttcacctggcatgccaagccacgcctccctcaatagactgatgaaaggatgaatgtctggcacgtgcttgtcctcgcgtgagaggtctggaataccagagagtgcatatctgtctgtctgcctcctccccaagcacaaaagactttgagctcctttgagaaagaagctgtgtaaatgcagcacaattacagcggtcattatcaccgccaaggtaccaatctgggtaacggggtatctgcagtcatcatgggaatggagcagcggggtccccaactgacctcttgtgcttggtcagttcaggctgtcagtgggggaggaatcccagctgactagagagtcaggatccgtacatggatcttttcaggtgggtacttcccggttagctttgccaaactggttggagtggtctcaatctctagaagagtggttctcacattctagcgagtatcaaaaccacctggaggacttgttccaacaaaatctctgagtcccattcccagatcttctaattcacttggtccaacgagggcacaagagtctacatttctaacgagttcccaggtgatactgatgctgttggtccaggggccacactttgagagtcacttctctagaaaaaaagatctaacaatgaattgatacccagccaaggagagacaagcctccaaagatgacagagctgctgggcctcggggcctgctccaggggtctgggccatgtgcgtggtctggactccatggaaggtttcaccagctgtggtgttgagctgtaatcattgtttttcttccagaagtgtgctcagtagactgtggcactcacggcgtctgcatcgggggagcctgccgctgtgaagagggctggacaggcgcagcgtgtgaccagcgcgtgtgccacccccgctgcattgagcacgggacctgtaaagatggcaaatgtgaatgccgagagggctggaatggtgaacactgcaccattggtaggcaaacggcaggcaccgaaacaggcacatattgctttattttcataaattgtagatctatagtgatggtcgcgcatggcaactggctgttccttcagggacacaagtgctctcccacatttcctgctgcccctccaaatctcccaggggatagggaaggagaaaaatgaggtccctaattgggaagggcttttccttctttccaggattccgagttgaaaggaaagggaccagagcagataagaaaacccctccaaacttgcaatctcagggagggagaaatgcacatgcatgggaaactgtcggtgtctgggggttgcaagcacctcaaatcactgtggtctgcaactctcccctttttaaatcctctctcagctggctggatcactggatccctgcttgctggcaacaaggtgaactcactaattttaggtcaggttagacgcaggcaggactctcaggttccctccgtagcaggtaccacggtaaggtcctgagattccccatcaccaccaccgtcattacatgtctcctcctctggtcccattttattctcactcagccacctctctataaaagcttctggaccaaggataatttaaaggtcattttctttgttaagaagaaatagttttggagtttcttcatttttatttttctctctttttcggcacagttgtggtttagggtaggactatactggattaaacgtacctaatcatccctttggtagagaagctgggagccaatgctgtttggctttgcacatctctcagacagttgggatgacaaagttgtcaacttgagcatcattttacctccggtttttacttttgttatttaattagatcaagcctaggatccatttttatactaagctggttaatctacttgcctgcatggaaattctcaaagacgtttccagccaaactacagtttggccccttgaagttacctttgatcccagccatcaagtttgagaccctcccctctgtccctgcctaacaaccccagtcacagatgggccacctggagtgagagacagggctaggagcttgcgcagggctgattcatgagatcagactcaatttcccatgctgttcatttgggtggttatacagagataaagtggactgactctgtattcgatttcttccggttccatctgattgggcatccgaggggcagcatgccaatcagggccacgaccatagcactgggaccctgctgggacagtctgttggcagtgaattgtttttgcaatctctcgatgacgctccaggtcttgctcccctgcagccgcttttatcctcagttccctgcagagtctgaggaataattcaaaagactttcaggggacggctgtgcacagccctatactgagacagttcttacaatagcttccattcatcaggggcattccttttgctgtactattgcatgcctggtgttatttacatgaagattcccctccccatatctccattgccccaaatcctcccctcaaaagctcttgccaatcatcagcgttgaggtggataatcctactttcttttaattcacacaatccaacctcacctcccctttgctcccccttcccacatctgggggacagaggggcagggttagtgtttccacaatgatgcctgctggctctctcctacctacaatctgtctttactttggaaatagctcacaagagggcagtccagatggattcgagcaggagtcgccaaactacggccagagggccaaatctggcctgctgcctgtttttccatggcttgccagctaagaatagtttttacattttctaagggttgaaaacaaatccaaagaaaactatttcctggcacgtgacaatgatacgaaattcacatttcagtgaccataaacaaagtattattacaggacacccacacccattcactgatgcctcgccagcttccatgccacctgtcagcactgagtaattaggagaccgcatggcccacaaagctgcttgtgtggcccgttatgggaaaaaaaaaaaaaaaggctaactcctgaattgcacaaatcttgatggatagaggggagaaaagcaaggcaggtccacacccccattaagaaaaggacaccaactgtagcttgaaggatctgaggggtctactccagatatcgcagagtgggagtggagaaaaaacagtagatgtgctgaaatgcttccggggcccttgaaaaagagatgggaagatgacaactttggtctcagcagagaacagcaaggaattggccaacaagagaacatagatgtttcggtcaagctagtcctttgggtgagataagttggaaaaaaaggtgtttctgccacttgaagtgtttggtacaggtttcacatctttgtgagatgacatacatgagttcttgagagacattcagaaagtgtaaattgatatgccagctaaagctcccaaaatgaagagagtgctggtccagtatagtctcttgttcagaacgatgatctcctgtgactttagagtttgtgctctgtatgttataaagatctttactaccaaagccttttcttgtgagaaattagggctctgtgtctttattagtaggacatgtgccatctcctcatagttatgttcactgtggttttctcaaaaacaaagccaagcataccttgatcagtgagatttgccattcaaaaaccagagagatgttcatacatgcataattgcatctttagcttttctatctccggcccccagagctgctttggggagttttattcttctagtttgagcagacacttctgtcatttcatttaaagtaaatgccacaatttacaagcccagcatcagttctcctccttggggatactgacagagaggaaatgggggctctttggtcctttccaagcacagcctcaaatgctatattttgaaaatagaaaatacagaaaaatgacatggtaccaagtcagcaaacaatgcatagggaaattttgggtaaggcagaattgtgggagttagtgttggacacttgggttgtctgcgacctgtttacaaaaggtcataggtggttttcttggggtcattgcaaatagtcaactgaacaattcacatcagtccttgtggattacatttactgtactaaaaggatcaaaaagagaaatggggaaaaaagatgaggacacaaggacagacttctaaaacttagtcaggtggaagccccaggatcagtccatgtttggttaatgcctttctggaatttgcaaccaaattatttatatttgaaaatgtagtagagattgctaaacatttaaatataaggtataagacttcaatgttaactgttagagctaacttattgacagactggattctaccaagcaatgactgttatataaccttttccttaaaagttaaatatatggcatggctaaaatctacagaattgtgtagataaaaaatatactttgaatacatatcagccacaattcatgtgtatctttggaatatattagcattttttgtatagcgtgcagtttactcttatgactagcgcagacggcacattgtgtggctagaagaggtttattctttaaacataattttaaaatgggttgttgttcctgtcatctgccaccaccaccaccatcaccccttgttaatactgggacctaggccaggtgcagtggctcatgcctgtaatcccagcactttgggaggctgaggtagacggaccacttgagatcaggagtttgagaccagcctgaccaacatggtgaaaccctgtcactacaaaaattagctgggcatggtggtacgtgcctgtagtcccagctacttgggaggccgatgtgggagaatcgcttgagcccagggaggcagagattgcagtgagccaagatcacaccatggcactccagcctgagtgacagagcgagatcctgtctcaaaaaaaatactggtacctaacatcaaaaggccatgcaaagcctgtaacaccaggacatggaggaactatagaatgtgtgtaataatagatcaaaatcactaagaactatatatagtaaatgtagatcagcgtctcatgaagaggtaaagtagatgttagcgtgtgttaatgagcagaacaattgggcaaaatgcaagaagaagccaacatttgcattgccggggaatcaaggagggatgctacatgctaactgtggactcttgcaattatctcctgaacatgggctacccagacatctgctccgaataatacaaactaacccgcagactaaatctgcccactctgggcacttcccaaccctgagtgaactgtttgatatctgggtagtgagtaaaggctgcaatggttatttcaacttgtgtattttatctatgtggtcctaacctccgatttcatctcagaatcataagggcttgattcctaggaccttgtgaggctgagtgacctgcccaggtgccacaagtcagtacagttttcttttccctgtatcgcactgggcccttctatttttcctctttaattggttggggaaagaaatcggtgcttgtgatgttaataaggaaaatgaatctttacccaaggtaaaaccagccgtgcgatgatccgatgtgctgattaagtgattgtcatcagaagtagacagggtcacagtccaagagggagagtgcttcagaacaatagggaacaggttgagaagaaagtgattgtcagaattaaccaacttcagactgaggacagctgcttctgaatctcattccagtctcattctaagttatgaaaactttttttttcttgtggctattgtccttgaacacttgagctttcatgactctacagtgagatcaagttgagatgaaattagccactgtggagccatccttaccaccaggcctgtggaatcagctaattctctgattggttaattaacctattcctccaggggctcttattagaactatccttggagttcctttttttattttaagtgaaaacctaaagcgatggccttttactgataaagattatggataaacttttaacagaatgcaaaagctgttccattgctgattctcccccaccacccccctataatttggccaaaacatgagcttccttactgcagatcaggagtcaccacatgcccagaagttctttttgagtctgggtcagacagtctgccagaggtttcctatctaatcccagaacaaggactgggagacagacttacagaaacatgttttcacatcactgcaaaaacataaaaggaaagaaaataacggctttacaagcagcaagagtctcatcactggaagcatttgctttcttgtcctagacgttgaagggctttcagcatcagtagaaacatagacaagatagacacaaactacattctaactttatgactcatcattctgtagtttagatggaagcatttttttgtatttttatgtgatttagtaatgtctgctcatgttatgagctcccatcaaaaaagaaaagaggagaagaattcttggtgttttagctctgtggggagacagtgatttgtgtcgtactctgcgctgttcccttactgtttcaggggaactggtttgatggactagcttgtggctcacagtgatggggccaagcttgctgagtcaatagcttgatataaggtattccttcctgacttcaccagagcaaagaattgaacagtttggaactcttgcaacataaactcatggatgagagttaacacaagtaagattccaggctcaaagaaaggggaccatgtaataagagctgttgaaaaacatgggatgcattgtcctaatgtatagtgagtgttctgcacttgagcttttatagagaatccacgtgccttccaagtctgtgactctgggctttcacaatacgcactaaagattttccatcaaaggagaagggaaaacaaagtggttcctggagagctgagctcccttagatatttgtgatggacatctttcttatcacttggtagccaattcattgtggtatcatgaacagtagactggctgatgaaggaggacatctgtgttctagctttgactctaccatatacattttgtatatcctggagcaagtcaccaagccttcccgacctcaatttctccatgtggcaaatgaaagggttggatcacatcattgccttccagggcatgatacacaaacttgagatgcttttcattggtgtacaaatataccttattgaatagtcatgtagggctttttaaaatagatacagtattaggaaaaaatataactagcacatcaaactgatgattatacagctattattgcttagggagggggcaaaagtaggtagtgatattaggcctgagtaaatttaaagaaaaatattaagtaaatagtacagatattgcaaatgtcataaatgcagcgtgtgattgactgaatttagaacacatttgaatgagctgatctctaaggacctgtccatttctaggatttcattacttttgatgcagaaacatatgaatgggttattctaatgcaatcaagcctttctctcttctgtaaggcaggttttcaatgtaggctcccataatatacactaaagactttacattcaagggacagatacagcagagtgctgcccagctgatgaggcattgttgaattattgaggatagtgaatggagcttttgttgtttgtttgattgtctgctcacctcagctccaatttatatctggtttacctagggaatcttttgtacattgaaaaacttccttgcataagttgaatcatcaggccccacttcgtccatttatattttttaataaaaagaaaagacatggctcatccatccacgtctgcttcacttgaatccagagaaatgcaagcatgataacagagtttttaagaacacaggattttgtggcaagacgtggtggctcatgcctgtaatcccagcactttgggaagctggggcaggcagatcacttgaggtcaggagtttgagaccagcctggccaatatggtgaaaccccgcctctactaaacatacaaaaattagccaggtatggtggtgcacacctgtaatcccagctactcaggaggctgagccatgagaatccctcgaacccaggaggtggaggttgcagtgagctgagatcatgccactgcactctagcctaggcgacagagtgagactctgtctcaaaaaaaaacaaaacaaaacaaaaaaataggctcttgtgtcattctacctgagattaaatcctggtagcttttctaacctttatgtgtctcagtttctttgtctgtaaaatgggggataccaaatagcacctatctcactgggacatatgtaaagtacttggcacagtgcctaccataaagtaagagccagatacatgtaagctgttatcatcatcaccatcattgtctagcaccaatgcaggacaaattgccaggtgtggtggctcatgcctgtaatcccagcactttgggaggccgaggcgggtggatcgcctgaggtcaggagttcgagaccagcctggacaacatagtgaaaccccatctctactaaaaatacaaaaaattagctgggtgtggtggcgagcacctgtaatcctagctactcaggaggctgaggcaggagaatcacttgaactcgggaggcagaggttgcagtgagccgagattgcgccattgcactccagcctgggcaacaagagtgaaactctgtctcaaaagaaaaaaaaattctcattagacatttcttccacttccaacctccctttcacaaatttgcttccaatccctcaagaagttagtagcatgtcaaaatcacacccacccacttttccaaacaaaggttgttcagcaacctgctggcttctggttcttacagacaaacataaactgcctctcttacccggaatggaacctgcttattttaccagatggcctcattgactgtatgtagaagaaggaagctggcatttctcaagtttgaggatgctgcctagccagcgtcttagaacacagcatcctgtctctccttttcttacttcttttcattcctcatgactctctattccatgggctctgagcatcaagaaatcatttaggagacccaaatttgactcaatcaagtaccacgcatgccttctggaaaatcaagactctcattgattctgtccccattcagcctgataaacttcacagttaccctcattcctcccacgctgcaatttcttggctcctttggagcatgacccatgtgtaacatctggggattcgttgcaattttttggttcatctcctgggttatctgcagccacacagatatcccagatgttcatgtaagcagcagactttatttttcctcgcaagtttcctgcctaattgggttcaatctttaccaaccctcttttttcatagcattctatttcacgagctcttctttaaaagcttgctgttattgcctttggaaaatagaatgccatcatcttgaaaacctgccagtcaaaaatggggtttattgcttgcttctttatccttttcaccatgcacttatatgcattgttataatcagacccacaaaaggtaaccacatcgttggctattattgaacttttccattaatgggtaataaagaacccacacaaaatagcagctacacgaaatttaagtatttcatcataaacagtctcaggataattagaatggattaaattacaagagaaaatgcatttagttaatcttccctctaattaaaaaaaaaatccctagttttaagtaaagtgttcgtttttaaaaacatattttcattgtaatcagtaaaggagaggcctgtttggtccccagtgataggacgaaacatctgcaaagttgcatccggaaacatctgaatagctaccagccagtgtttttttggttttgggttttgggcaggggttttattattaaggtccttaaagaatgagtctggtcttttcccattgctgttaccaagggattctctacaaatagcctcattccatagtccatggtggcattcctttctgttctgagatcgctgatgatgtggttgactccccttgaccaacatgtgtcaagtgagaagattaactcagcagatgtttatatattctgaccgagctggggtaagagtcaaaatgaaactggtaggtgacgtgagaagttttcaagatagaacggacacgtactccagcccttcatgatgctattccaagacagataggactgaaatcaccctaagccctacgagtgtgtcccacaaataaggaatcattcacatcacctcaccaatttcttggctcatcccaactgcaaagctcactccacactttcatcccaagggcctctagaagtttccaagagtgtcttgcatgctcatatttaacccaatctgattttacaagcttagtcccttcattgaaacctgctgcctgagaaatacacttacagggactcctacagcactgcccctactgccaggatccatgccaaggttgtgttcccccgtgccagcagcaccattggtgctcacgctactgaagtcctgctgtgtttacacagtaaaggagagaacaccacactccccagctttatcaacgggtccaaagttcctttgagaagacaaaccttcactttttgccaatagtggctctcccatacatcaaggttttgtcccagcgctgagctgtcgaacagacaccacagagtcctttttgtatcctcacctctcctcacccttagacaggctctcaacccagggtagtggaggatgcttacaagttctttaagctcagccagtctctgaatcccagtttatactcagtcaggacccctaccatttagataagcggctcttaaagaaaatccttttctcttcatttaggttaagggttgccttcattttgagccagctcaactgcaaatgcaagagcccctgtgatctccctccttcataataatcgcatcccagttggaatggagaggggactgcttacatatcccctagactccaggttccaaacagtttcagcacagctctttgaggccactccatttaatcatgcatgagacccagcaccatgcagtgcaaactgaacatcacaaaaagtacgtcctgccagttcccagagaaagaaagggttaaccaatggtctagagacggaaagccccacataattgctgcccaggaggaattaaaagagctgagaatcctgggctatacattccaagtttagccaccacagcacctggtcaaattagcaatgaagttggttagaggttggcccagaagggtcatctttccaaagctgtaagcagagggagaagctctgataagtgtgaattgcatgtcattatttcaaaaagtatgctttaacttcaagagggattgccagacagccctgtctaggtgtctagaaacaatgccagggagtgggggagtccccaagattacaaaataaccacctcacaagcacagaggaaatgtttgtacctgattttattccaacaagttagccagctgtcaatcaccggtcatgctattgcatctgaaacacatcctgtctaatgacacaaaactcaaaacggtggcttctgctttgcagatagcatcctggcaacagggcaaggagattgtttccctatattaggtgtgtgtgagcccagaaagcctaaatgtcactgatgattgcaatccctgtgaataagaaaagagatggaagataccggaggcagtgtgagaaactagctttttcctattaatcccagcaaagcaggcaagtcaagttgggtcccttaagcatgttactgtcaacttcttgctatatgttgaatatgaactgatttaactttttgcttccatttaatggggccaagaaagatcagtatctattcacttacagacctactccctggaggtctgatacaggaagtgttatcgtatcctagagagaagcctagcacagacaacagtctacccaggattaagcagtttaaaatgcataatacacaacaaaacccactccaaactctcaatcatctcccacgttatgtttatagaatgtaacatcttttctctttgctattaacattctttgtcaatgcttgactatggctggttttatgcattccaagtttgaggcagtttggggaattatgtagcaaaagaattaaatgcctgagatttgggatcaaacaggactgccttcaaatccaccttccatcacttgcaagttgggtgacctttaacaagctatgtgtcttcaataagcctcagtttttcccgtctgtaaattgggaataataaataatacctacgacctactgtattgaggatttcactgatggagagcacttaacatatgcttgctactctgtaagtgttagcttaaaaattattaacaccacactttcatatctttactgtagtttcccaaatgtgtcttcacagagtgaatggctaagaaaattgtagagatagcaaacaacccaaaatttcccaaagggtccaaaattccagaaagagaagccaagggtgccacacctcatgtgtccacacaggtgctcgtggccctcctgctatttcactgttccaagacaagttccttggaacagctggtttctattccattcagcagggagcacagggagagagaggaaagcaggaagggacatggaaatggcccacttaggatccatttgctggttttaagaacatggtgttctaaacatcaataagaaagccacacacatcatccatggtaacatgtctggggtctacaccccctccatctgtttccagatgggcagtgataactgtattcaatcatttgggaagcattcattgagtgcctaacatgtgccagcacagtactgggtgtgacacatgagccacctctgtgtgaatatcaccgaggcagcaaggacaagaaagaagtggtttgcagagggtggtaatcatgggaactttagacctcagctgcctttttgcccacttgagactttgatgttttctaacccaagacacccttctcactgtttctatcaataatgtttggttaatttttcaacattgtccttgctcaagcttcccaaggaggtcaatataaggatggaggcctttaacttcaaatagtagtttaaattcatttgcaacacaatgtaattgcataaaagaaagtagtcaaatatcaaactgtatggatacacacaaatgactccctcataagtgttaatatcttccacaatggaggaaacttagttaaatcaaatgaaggtggcaactcattaaaatttgattttccctcctatccttttttatcttttaatcctctgtatatggcacaacttgttctgttaaataacactcattaatgaaatctcatcttctcttagctatatctattttatttattttgaaaaccttcagatgcttataatctaatttagttagattactgcttggacatctctaagtaggaaaactttgagcttttaaggtggaattactggcaaaggctagaagtgagagaaaccagttctcttcccatttccccttggtaggaggtggttgggcaggcctttcctctgtgaggggactgggcctccatttggttaatgagggcactatgaattaagtatctgtgttgattcagggaaggggagggagggaagagcctctagaaagagttgtaaactcaaattcccatacatggggtaggcgagaatgacgtaaagtgggtgcattcaacagggtgtaagaggccagggaggggtgacaaactggaaagtgaatgtcccacctatggagggcagacatgacccagctccagctgaacatggccatgtagaaatgcaagcctagtcttccccaaatttccaatttttcagtagaggccagatatttggattgttatgtatggtctcccaattttcaaatgctggcaagcaactaaaaatgtattaaaatgttgtgcaggccattcaaacaagactgggggccaaatggaccacccatctgtgactactgacacctacctccagggcaggattagtattgagtgaggaagcatcatttgcctggattgagactgggacagctttggcttctcttgtttgatgccccatctctccttggtaactggtttaagctggtgggagtctcattaccatgatacaatggtgatactttgcacttgcatggtgaattttctccaaggagctcaaaagactttgtgttgcctcagtcaacctcacagcaagcctgtgaagcaggcaggtagccattgcccccaaacacaatgagcaacaacagaaagtattttacacaaagcagctaggtggactcattggcttaaatccagcatctacactattggcaaatacagcattcaagaagcgtgggcaggatttcccactaatgcctcccctgccacccttttcagcttatcttccttccatctgctccaaatggcagctaagccccaaatctcaacaacaaataccagcaaaccaagccagtgactaatccctgttgtgtgtatgagtgtatacacgtctgtgtgcatgcgtgtgtgtgcgcccacctgacttcttagcatacccagcccggtacatctgcatccattacaacgtgtctctgcattggtcattggtctaatgccatgctctgaaatgctacttttgcaagtgtttaagacctaaaaacttcaaatggtaccttcaggattctggatacctgtattttgctaacggtgcctaataatttgtgctgcttgggaaccctgtgtccctttctcttccttatgctgataaaattacaactgtgaagtctttccctgacagagctagaatacggccctctctcaggctactgcaggttcataggagtggccatgtaaaatagagataagggccagagccgtgcagtggaggccagggacaagaatcttctctgagttgccttggatagaacacccgagaaagttggactgagcagcagtgactggggctcctccagagtcatcattttcccctgtatgactgggttcaagagctttgctacatagtcccgctgggctatgccttcccctctgcttgatggacatatgtgctctatgtcctgctctactcagagaattccttgggctttgcaggcatgacccagagagaagattccagttcagcagtgtaaacctgttgatctttttcccaggacaggacagcacaacacaagtattctgcattttctagattgccttgctcttccttctaaattgtctcagatcaggctactgatttctgggaacagttcccagcatgatattctactataatcattcacattctctgcatgcaggcatgccataaacatccttcagaggcagatgcaaaaccagggaaacacctggccattttaaatgcatgtgttggagagataactagacttactggcattggaactacaaaggctgacatatctaccagcttcccatctgatcccacaaatcagaacatgcttctttagagccagaggaaactgcctttcccagggatgaaaccttaaagatccagcagaaaagtttgggaagtgtctcttgatctaattggaacaaggaattgattaagcatccagaatcaagaatgatgtttcagctcttcccagtagatcaaaatcaatattgaatatttaaaaggtatatagatttaaaaagccatttctttatatacctaagtgtatagggagaaatcaacttttatttttgttgccttgggagaaaccaacttgtgctttccacttggctatgcagaatgaaaaccgtacaggctttcaaaggccagctgaggcttctctgtatcttcattcatcatgcctctcaaagcgtcagacggatcagtcataatttgtgtttttcacacacatacacaaacatttctattttggagcgattggagcgctatactggagccatctctgtcttagtagcctcaggtgcatacattccagaaattctaaaaagtcagagaagacacatatccccagtgctgccaaatccagtaaaaccgaaagagttcaggttgcatggtttacggacatcccagagaaagaatgtccattcaagcccaccaggctgaactagccatcaggtgaaattaactcctgactaaactaaattaaaaggtgaaactcagggaggcccaagtagacagaggtgctgatcattagggagtttggccactagagtttctactttcggccctgctcaggcttcagaagatgcagaggtgaaagtctagtttagctaagtgtagccggctggaccaacaggtcactttaagtcatgtctaactgatctcagtgctcctggaatggctttaccttgacatttaaatttcggcttccatcaccagtgagatggggttatgctaagtaatacaactttaaaatattttctgaacagtaaggcaaccattaaaacaaacaatttcagcgttataaagttatgtcttttaggagacattaaaatgttgctgatactgatgacagtgaggtaaaaagctgcaagccaaggctttgaggtgatagggcagaggccctgaaagcagcatgaggctgatagataaagaaggtagttgaagccaagctgagaatagcttcagaacctagaggcacacatggctgggggcattgccttttactttgtttttcctcccaggctgtggctttacccctttctcttaaaatcctgacaatacttcccaagaaatgtggtctctgacagaggcaactcctttggatgggccaaacgtggcacctagcagcaaaacatactattcagaaaagtcctaaatgatcccctgccttgaagcctggaatatagtagatgctcagtaagtgctggctggcttgagactcccctgtgtgtgagccctctccacccacctttcactgcccaagtcatttaagatagagaaaatggagaaccacactgcatctaaaaatagttggggagggaattacatgaatccactgtaagttagcttcaaaaatactgtgcttcctaggtgctagaatagcccatttttagggagtcaagagctggattcagagaaggagtagccaaggggctcaccaagtaaataaagggtttctcttgagttttggagcattcaggcttgaacaagggattttttggcctgtgacctagtgcataatttgcagtgggggtaatatcacccccaacacagtgaaaaattgttctaggggtagatgaaagtcttactctttttttttttttcagaaaccacatttattttggggggttcatagagaatattatactctcaaacaatactttataaaaattacttagtatgctatatctattctgtttgttacattttatatttgtactttctttcctaagaaatatactgctgctaataatagaaagtggaagaaaaaaggcataagcaggcagaagtggggggaaaaaaccctgcaatctttgtggcaataaaacattagattgcattaaaataacctaaaacgttagatactggccccagtgcctgggcgcagaactttgttgaaagggtattccagtggtaagatgaaaataaatcctgtgtcatatatttgccctatagcagaaggagggtggggtttaagctcaggaatcacagcctaaagcacaataattgtctggtttcctcaaaggagtttgcaagtttcacataccggaagtgtagaaaggctgaaaggagaaggtggggcaagggcatgagagtttctttcaatgataccagtataaactgtacgtgtctgagctaatattaactagaaatttgtctactacacttctttttttttttttttttttttttgagacagagtttctctcttatttcccaggctggagagcagtggcgcgatctcggctcactgcaacctccgtttcccgggttcaagagattctcctgcctcagcctcccgagtagctgggattacaggcatgcaccaccatgcccagctaattttttttttttttgtatttttagtagggacagagtttcgccatgttggtctggctggtattgaacttccaacctcaggtaatccgcctgcctcggcctcccaaagtcctgggattacaggcgcgagccactgcgcccagcctactatacttcttttaagtctttttttttttattattatactttaagttttagggtacatgtgcacattgtgcaggttagttacatatgtatacatgtggcatgctggtgcgctgcacccactaacttgtcatctagcattaggtatctctcccgatgctatccctcccccctacccccaccccacaacagtccccaaagtgtgatattccccttcctgtgtgcatgtgatctcattgttcaattcccacctgtaagtgagaatatgtggtgtttggttttttgttcttgcaatagtttactgagaatgatgatttccaatttcatccatgtccctacaaaggacatgaactcatcattttttatggctgcatagtattccatggtgtatatgtgccacattttcttaatccagtctatcattgttggacatttgagttggttccaagtctttgctattgtgaataatgccgcaataaacatacatgtgcatgtgtctttatagcagcatgatttatagtcctttgggtatatacccagtaatgggatggctgggtcaaatggtatttctagttctagatccctgaggaatcgccacactgacttccacatggttgaactagtttacactcccaccaacagtgtaaaagtgttcctatttctccacatcctctccagcacctgttgtttcctgactttttaatgattgccattctaactggtgtgagatggtatctcattgtggttttgatttgcatttctctgatggccagtgatgacgagcattttttcatgtgttttttggctgcataaatgtcttcttttgagaagtgtctgttcatgtcctttgcccactttttgatggggttgtttgtttctttcttgtaaatttgtttgagttcactgtagattctggatattagccctttgtcagatgagtaggttgcgaaaattttctcccattttgtaggttgcctgttcactctgatggtagtttcttttgctgtgcagaagctctttagtttaattagatcccatttgtcaattttggcttttgttgccattgcttttggtgttttagacatgaagtccttgcccatgcctatgtcctgaatggtaatgcctaggttttcttctagggtttttatggttttagatctaacgtttaagtctttaatccatcttgaattgatttttgtataaggtgtaaggaagggatccagtttcagctttctacatatggctagccagttttcccagcaccatttattaaatagggaatcctttccccattgcttgtttttctcaggtttgtcaaagatcagatagttgtagatatgtggcgttatttctgagggctctgttctgttccattgatctatatctctgttttggtaccagtaccatgctgttttggttactgtagccttgtagtatagtttgaagtcaggtagtgtgatgcctccagctttgttcttttgcttaggattgacttggtgatgcgagctcttttttggttccatatgaactttaaagtagttttttccaattctgtgaagaaagtcactggtagcttgatggggatggcattgaatctgtaaattaccttgggcagtatggccattttcacgatattgattcttcctacccatgagcatggaaggttcttccatttgtttgtatcctcttttatttccttgagcagtggtttgtagttctccttgaagaggtccttcacatcccttgtaagttggattcctaggtattttattctctttgaagcaattgtgaatgggagttcactcatgatttggctctctgtttgtctgttgttggtgtataagaatgcttgtgatttttgtacattgattttgtatcctgagactttgctgaagttgcttatcagcttaaggagattttgggctgagacaatggggttttctaggtatacaatcatgtcgtctgcaaacagggacaatttgacttcctcttttcctaattgaataccctttatttccttctcctgcctaattgccctggccagaacttccaacttccaactcttttttatataaaacgtgcacatatgacataaacagctatgtagcatatctttggcattaagggagaggaattagaggggaaaaggtctaaaaaggtttctaggatgggagataatgaaaaaaaaaagttgagaaatattaacctggtagaagagatgatagattgatccatttctagagcctcaacagaagtggcctcaagcatcctcagggaagacactgtttcttagaagactctgccaactcatgcttctgtctttatcgcccctgcctgctggctcatcttataccaaatcagtttggactgaaataaccaggcaggccaaataattgatttggtgcatgtttttaatttactgatttactgaattcccttttcagaaaataccagctaacattattgagtactaatgacagaaacggccggtcccattgctaagttctcagcatggctcctctcttctaatcctcatgtcagttttgtgaggtgaatactgttagcatcatcatttcacaggtgacaaaactgactcagagaggttaagcaatgtgtgaaaggcttatctgtcaatgagaggggccggtgagtgctaaatccaggtttacttgacagaaaccaggcttaatcattgcactttgcccccaggtagttgcaatggggttctggggagtccagcaatgaaatcagagaatatgggcatcaggggacccccccttcacctgtcgggaaagtcatcctctgcaggagtgtgtccttggtgatggaggacaattccccttttcactttaccagtgccccctggccaaagagtacactaaataatctccgattccaaaaatgactcactgctactccgcataggcgtagttggccaacttccctaaatttaagttgactttctatcagagttcacatttccaccaacttttcattaaattaattattcaaaacaattcagagttagcgttctcgcagcaactgtaactctgccatgactagattaaggcgtaaattgaacagcatgttttgcaataaagttaattttatattcaccagagaactgagttatagttgctgtgggaaccatcatttcgaatctcttgactttggtgcatttaaattctcaaccacagcgttgcacacagtagcatattttgcacggacgtttaatttgcttcacaccacggcctggctatcctgaacttggaaggcctgtcagaaataaacattgcagctttctagctttcccagccttctacttatcctatacctatgacactatacatagaaacagccaagaaaccaaaatgattccaattttatcttgaaattatctgtttgggggaagtgaatttccttagaagaactgagtctccggcaatgtcaactaaagcaggcaatgccattgcttttgtgtgcagccaggattctcatccaaggatatttttggttctgcgctgtattattcagtacacatggggtgacctctgaaagctccaagtccttgcatgtgccattaatcaagcaggcatgcacagccatacatcagaacttattggagctccggaaaagctaagcaacatttcccagagccacataaaacccgagcatccctaaatcaagacacattgcagggcctctaaaaggtacgttcagcagaaccggaatagaactcaggctaaatgctggtggtatggaattgggaacatgtaccaagtaaagacagaggcttgtttggaaggaatagcagaggaagatgaaactctgagatggttagagatgcgagcattccatccacgaggattatcgatttttgtagctttattggaaaaatcagtcatgctttctgcctcctgggaattgctctgctgcaatttgggagtgtgtacgtgtggaaactgcaggttagcagctgagtaccagctcccattcactgttcaattatccatttagctagaatgtgacttagcagaaacagactgctgttttgcatgtgtaagatgtatttgaaaggagggatttttgtttctctgtaaatgagaggatttccaaggagaagctcttgccttcctaagggcacactcattatgcaaaattgaagagtggcacctaacaaaagcataggccagattgttggaattctgaataccattgtacaagctttcaagaaacagaagtctcttatttctcatactgtgccacacatgaatgtacctcctgatcagaactactgcaaaatttgtagataaagaccctgtaatgatcagtggcctccccaccaagtccttgattagctaaaaactgtttaaaagaaagtttcagagagcaggatatgttcacgataattcagggttccctgggccacgtggatgggatgggtaagtgatagatggctttagattcatgataaaggtgggcaggggaaataccatgccagtcagagcaaagaaaaaagagtgaagaagcaggggagaaactggaatgttttattgcttctgtacaaggtaaaaagtgccataaaacaatataaaatacgggctcctctatgaggtcgtttgacacttactgttttgtgaccgcatcttcacaggatttagacagatttttggtaaggaatgtttgacagattaataaataaatataaatatatatgatagatagatagatagatagatagatagatagatagatagatagattgatagatagcacaagctttttaagcatgtctgagtgtcccattcgggtgggtcaagctggcctatagggttaaagagaacgcaaaggaactaaaagaccaggagtaataacctgggagcatgcttgggtggttcaaagagaccctattgccaagaattagatgaagctggccggatgaatgcagccttaaggtctggagtcgctgtgttaagaaaggcgaggcattcatttgctggagctgttcatatgaggttgtctgccctgaccttgcagatagagctgctgtgactcaatggttctctccgcgtctccactctcagccatgtctgtcctgatgcggcacgatgctcccctgtcaccctttcccttcatctccacatgttatttttagtatgaaaaagcaacttggagaggagggcagaatcctcacaaaatccagcttcagcaacctcatctgcctgctagttccaaccgaggagtctggtttgctgcatcaacaggggtagttggtggggagtgctgtttatagactgtatgtctaattgtctgcttttgtgtctctaaagccttccctttccgaggcatgttaggaaaacagaaacacatctagcattagcggtgccacatagagtcacagagcaggacaaatttgtgccctgcccaagcctccaccctggcttacccagatggtcctgatgggtccctgctggccagccttctagattctgtcctggccccatcctctctctgttcctcacccagcacaaagggagcctttaaaaactcatgtcagatcaggccactcctctgctcaaaagcttccaatgacttcttttcactcagaataaaagcaatatccgtacagtggactatgaggtcctacccctcactcactctgctacagccacacgggcctcctctctgtccttccaacaccccaagcactctcatgcctaggggctttgtacctgcagtttcctctgcctgtgctactatctcccaaatattggtatgatttgtttcctcccctcctttaggttttttgctcaaacaacttatcatcaggggcttccctgaccatcctatataagacagtcacctccatcacacacaacccccttgtggtcccctccccctacatttccctaaagcagtgattaccatctgacataccatattaatttttattgtttattgtaggtctcctcactgtagaatgtgagatctttaagaacaagactttgtctctttcattgactactgtatgccccttgtctagaaactacccggtgcataataggtgctcgataaataattattgaatgaatgaaagaataaactcatgagtctacagcagaaatcagcattttctaatcattcagtaaatgtttgatgtgggattggtatttctcccttggaggtccatttgtcccctgattcgcacacactgaactcaaggattagggacagggcaggagacagaagccaacactcttgacagggagaccaccccaccactcaggcaggacgccatgcgggggcttccccaagtaggatcctcatggatcctattctcagctttagaaatcccattttgtttctgttaacagagtggatcaagctctagactgactccgtcacactacccaaattcccatccaaacctgaaatggccattcagtaattcacagtgaggaaattctacatctcctgctcagtgtattctctccctaaagggaaatctatatgggaaatgaagttaaaagcagaagatttcttggggaacaagaaatcaaagcaagtaatatgatattctgagtctgccttctccctgtacagtcctacctggctaggggggcgcaaagtgcatgggctgagagttgcacaggcctggattcacaccctccctttaccacttgcagtgattatgaccctgggaaagttaattaacttctctgagcttcagctttttcagccacaaatgatgataataatatgtatttcataccatccttgaagtggctcagtgaagtaacaaggatgtgaattgctgagcatggacaaatggcaggtgctgttgcttgcctcccctctgtcaagccggacactctcacccgtgaactgaccctggctctctcttgctccaccacctccctctccacatcccaggcagactacccctttctgtgggcatgcttttctgagcctggttgagatttctatgccctgcgatccttgataatgtcacctcacacaactcttgcgttttaaggggagttctattgacaacttgtcgcatgcattatgtgcagatcttactcacgtaactctcaggaaattacctcatttttctcattttcatttacgtctttggagggcacctttctggggctttgctgtattgactacactgatcctattttaaataatagcattcagtccctcctcataaccaattcaagtgcaaatcaaaggctttcctaaaccacgcacagacctttctgccatcattggaggacacttttaataaaaacaacaacaataataacaggtatctgttgtagaatatttattatgtgccatgcatcatggattctctcatttaaatgtcagcgaccctctggggttctattgctctggttttgcaaatggagaaactaaggaattgaagagcttatgatttttacccaagatcatgcagccaaagggtgaagccaaggtttgaacccaggctgcccagattcagagccactaccttcactattccaagtactgccacatggtgactgaggtgacctgatgcagtggccccgggcagcagcagaatctgttggaagccctaacataccaaaacaagtgacttggtataaaagtctgcaccctctttcttgcccttgggggccttcatctctgtccccacctctgcctctgggacagccaatgaaaagagcctagtcctcactccctgttttcaatgatgaccaatgattccaggctgcctcttggggcacaagattttcagtgcaaaaacttggatcatccagggcaaattggaagggttggtcaccccagttgagaacaggaactatagagccattggctggtgtcaaatcctggctccaccatgaacccaccctgctactttggccaaattacttaacttttccatgcctccatttcctcacctataaaacaggaataatcgttgtacctacaccgtagggttgttgcgacaattaaatgagctaatgcatgtaggggatctaaaagtgccaggcacagagaaatgtccctgtgaggggtttgctatttttgtggctattctataaaaagctttctaaaatccagaatttcatcctggggcagattctttgcctagctcttttgagatctattagaaacatttagtgatttccttacatttcctgaagttacactaggagcaacaacaacaacaacaaaatggcaatttatggttgacctgattttacactagttaaaagagagccgtcaaccctgcagaagtaacaagtccgtgcccacaggcctcctcggtgttatttgtatttttatgaccctcctgtggctataaggatgctcagtgggtgtagaaattggatggttaaaaataacaaataagaaatcaaagtcgtgctttgtccctatttccatactggtaggtaccacattcattatttgctggacagctgtgggaataagctgcacaaggtacaacaacttgattcacctccaaaaaccaaattaaaccactggactctcttattattgtcatccctacctttgtgtaacacttgtcaccctcctaagctaccaacatgccttctcttctactcgctgggtaccctagtctgcctctttcagtccagaggtatctgcttcttacaagttgaaaggcacaaacccacatccgcattcatacacagcccctgtcatcagcttggttttgaacgctgggctgcaaccagctgcttcatttgcttagagaagtgtcatccttccagaggcttggggtgtggcctgtgggaagcttttccttttacctggctgttgaatcaagaacacagtgaagcagcaatgaaacaaagcacagtttgtttgtttttaatgtattcattcaacagatatctttaatgctctagggtgggaattaggaaaacagccatgaacaactgagccaaagcctttacacttgaggggtttggaggctcccaggaagatggacattgaaccgcttgctctcatcatccattgcacataggaatcacctgggtagcttaaaaaaaaaggaaagaaactgatgtctgggtcgcttcctcagagattgtgatttaattgggatgcagtttaacatgggaatttttcaaggctcccaggtgatttgaaagtgcggcccagttaagacccgttgctttaaacaaagggttcattagaattatgaggagtgctacagagaaggggaaggtggtgctataaaagcatgcaatggagcaggaaccctgagctggaagccaggaaagccattcctaaacaagggccagctgagcacaaggtgaatggctttagccaaagtgggtgcagggagcgtagttcagagagacacatctggaaaagcccacaagaagaatccaggctacagagaacagagacaaatgtgacatgagaagagagaaatgggcagggccagataatgcagggcctttgaggcccttttaggggtttgggacttaatccgaaagcagaggctttcacattgagcaggcgtctggatcccgggggcttgttataaatgcagacggctgggccccatccccagaggttctgattcagtagctcaagaatgtgtatgtctaacaagttcccaggagatgctgctgctggtcccaggaccacactttgagaagcactgctccaatctaaagcaatgggagaaactcccggaggatgttcagcaggggcatggcatgagttggggtgcgttttagcaacacggtgctattcacccccataactctcaaaggtaatgttccagggagataaagcaggcacccccaggaaagcacaggccaggctggactccagtgcaaccgggtgataacaattcagtcagaattcactgagtaactgacgtgggatttccctcccaagaagagctattttggttactgttgcctaaattctccatttcctcacatgatcacctactttaaaaaaaaaaaaaaaaaaacagtaagagcttgaaacatcaaaacaccaaaaagtaagatacatcttcctttctccttttttttgagacaaagtctcgttcttttgcccaggctggagtgaagtggtgcgatcttggctcactgctgcaacctccacccacccagcttcaagcaattctcctgcctcagcctctcaagtagctgggattataggtgcctgccaccatgctctgctactttttgtatatttagtagagactaaacaacggggtttcaccacgttggccaggttggtctcgaactcctgaccccaggtgatccacccgcctcaacctcccaaagtgctaggattacaggtgtgagctaccgcgcctggcccctttctcctctttattcaaatgtgaaaggattgtttttactgtttttacaagttcatcatttttctgcagccaaggctgagcctactgccttccttgtcccatgcagacagacatggtgctgatcagtgagaatccaggtgcatccagaaaacatgcagcctagacagctggaggcaaatttatatgacctcatggaagctctgctgtttctattgctgttggggttgtggggagtgatttctgccttaggagcaaaagccagccaatagaccatggaaaggatcactggcctcctaacaccccaacccagcatcccccatacttgcatctacacaaacccttaaagacatacagacaccactgaaacaaagaggaacatctgcctctctcaatttgccacgtcttttctaacaaagcagagtcagctgtggacgtgcaggttcatggctgcgtgtccacgccatttgtgcctagaaacagagtccccgcacagctccctcccgcacacacgggcaagcaagagggacaatccctgccgttttccagagaccagagaccagggtgattctttggcagccggtcttccaaaactagttggagattttccccagagcacctcgaagcatcagattaattttctgagcatttgccactgctgttcagtataaatggctacctgaacccctggtgatccccgatctccaacacctcagctattttcaactacaaagagctctggaatgtaatggcagactctattattaaataatgtccagtgtatgtgtgctctttaattccaacaatgcacagctccagggaaaacaaaaacaaaaaacaaacaaaaaaaaaacagtgatatttaaaacagttggtgaaagggggggggggtccataattaagttaatattcaaaagcacaattcttcccaagagaaagggcccccatgtagtctaccttcgtgtctcctgcacctcataattgcccttagctccagtgggttttcttctcactcagcccgtccaatgtggtattgctggagttttggctggtggtcattgggagaatgagaatttcttaggctgtgacacaatcacacacggaggacacttgatgaaccttcattttttaacttgaaaaaggatgggttcttgtttttttccctgatctcagagtgaggcaaagagaaatgacctacacttcagcctatgtgctaaagggaaagcttaccactaactatgatagctgtcataacaactatatagacactgacaacaattagtgccactatctactgagcacttacaatgtgccaagctctgttgaaatatttagctttatcattccatttaatacctctggcatctgtaaaaaaaaaaaaaaaaaaaaaaaaaaaaaaaattgtaagtacggtcttgtgaccatccctaaattatttgatcagcacatatttcttgaatgtctgttacgtgccaaccgttcttctagaccctgagaatatctcaatgaacaaaagaggcaaaactttctgcctttctggaagctgtatgctattggaagagaaaataaataagattaacaagtaaaatataccattttacaaacaggctgaggctcagagaggtggatctaccagcccaagctcacacagacagtaagagagacatccagattccattcccagaactctgactccaaaccaggttaaggttttccccatagttaaaaaaaaaaaaaaaaaaacactttttttttttcacctcagtttaacttaggatgtaagttctctcctgatggtctcttgaagcaagcagggacatctggcttctctggctttcactgtcatctgtctgcatttccatgcagcctgttttatgtttttacttgcatttccatctggatagggtattgccctttatgcttttcttaggcatgcttgatgttgaatattaaaatcctatttctctcttcgtacccctcatgcattattagccacttatttctacctttaaattgctgcacatggcagaacatttcttgatgcttttttagaaaagccttttatggtaattatagctttcttcaagtgcatttatttttccctttttaccgtgctgtagacattactttgttcatgcctaatttttgttaaggcaaaaagcctgcctagctggtaactgtgtggacagacttttttttttctagtggttggaattttatgtgtagaaccttggaaactctctcatttccactctgccaaaggcatcggattcagccagagttattcgttcatcatttcccccaactacttattgaatactggcaatccaagagtaaacaaactagacatggtccctccctgacagttttacaccatagcaggaacgcctggggcagccgttcggttcacagtaggggcaccattcaaagtgtaggtaatgacaacgggcacatttattatgacacttttccagcaggtgacagtaaaatgtcttaaggaagagctgctacatggcctagcgagcatcaaggaggtaccagccaattgtgatacagcggggcgggtagtaccacataaaggaaaggataaagatgccatgactggtgctgctggcatgagcttgggagctttggaaaagcttccaggaggaggtgacttctgagtggggatttgaaggatgtattgaagttagggaggtgagaaaagtgaaaaggaaaggccgagtggcttaagtctaaccaaagcctaaagtgatattgagataggctgatgtggtaagagtcagttcatatgaagtcagcaagcccaattaaggacttcagactttacccatgggtcaatggaaagctattgaagtgtttccagcagtgtccagaatgtgagacatggatgatggtacaagactggaggcagggagaccagttaggaggtttcgacaagcatctggaccaaagatgagggtggctggggttaatgtggtggcagtaggggtggaagtagagcacagattccaagatatttaggaagaaggacagataggagttcttgcagttaagaggaaaattaggcagaacttggttggaattagatagaagagacaagagaaggtaggagaggaggggaacaattaagaatgcctccaaggtttcagtggtgggcaatggggtagatacctggatgtgccatgcactgctcaaggggtcagagtttgtggggaggaaaggtaaagagtcagaattcttttgagtttgaggtgcttatgagtgtacaggtggggaatagatggctatgttgagacgcaagttggagttcaggtctagaggtcagaagacttgagttgaagatttaggggccatcagaatataagggtgtgggttgttgtttgttgttgttggtgttgttgttgttgttgttttgagaccgagtctcactctgtcgcctagactagagtgcagtagcacgatcttgactcactgcagcctctgccttccgggttcaaatgattcttcagcctcagcctcctgagaagctgggattacaggcacctgccaccacactcagctatcttttgtattttcagtagacatgagatttcaccattttggccaggctggtctcgaactccggacttcaggtgatccacccacctcggcatcccaaagtgggtttttttaaatcccaaatttcccatcagctctctctctataggttggaatgtgacagaactagcccattaatatcactggcgtccttaaaaattctccctgggaagaggacttttgatctcagagaggaagtctctattatcttctcatgattctcagaagagtttatagatatgaggcaggcagacagaaaagatatagtacgccccgattgtttttattcattcaagcaccttctatgtgcctaaaaccaggccaagctctgggatccaacagcaaacaaccaaatcttggatctcatgggggtttatgtctagggctaggtttctcaaccttagcacagttaacattttgggctgtatcgttcttcattgtggggcctgtcctgtgcattgtaggatgttgagcagcatccctggcctctacccacaagatgccaatagcaccctcctcaaattgtgacaatcaaaaatgtctccagactgggcacggtggctcatgcctggagtgctgtaatcccagcactttgggaggccaaggcaggcggatcacttgaggtcaggagttcaagaccagcctggccaacatggtgaaactccatctctactaaaaaaaaaatgtgtgtgtgtgtgtgtgtgtgtatatatatatatatatatatacacacacacacacacacatatatatgtatacacacacgtatatatatacatgtatatatgtatatatacacatatatatgtatatacgtatatacatatatatatgtacgtgtatacatatatatatatacacacaaaaaaaatcagctagatgtggtggcatgcacctgtagtcccagctactcaggaagctgaggcgggggaatcatttgaacctgagaggcggaggctgcagtgagccgacattgcgccactgcactccagcctgggcaacacagtgagactccgtctcaaaaaataaaaataaaaaataaaaagtgtcttcagacaatgccaaatgttttctggagagaaatagggagacaaaattgccttagttgagaaccactggaatagggtcatgatagaacctttagtctccaggcagccagctctctctagctccataaaagaggaaccaaatgggtatgctttaaggggctttatattggtggtcttggagacaggcagtaccagcctgaaatccagaagacttcctataggagacttcttgggtgccccagtataagcccattagcccaatccaacttcggttatagcatcctctccagagaaaagcctctacctcatacccattttgccctccagactaattacttcctaggttttgtttttccttaagcagaagctggctttgcactttacaaacacaaaggatcacttcctcagaaggccaccagtagaatgaacttgtgctggggttagcttggggttgcctagcaacgccatgcacctaccagggctgttctcttcctcttcaagctaaaagcaaagtcctgtccgttaattaccagctgccctgaaacttctcagagatttgccagcttcctacttttcttgttttcatcttcctcatgtgatgtggagaaaacctgctactgtggtctgtttatttcacttcagttggtctgcaggggcaggttggggaggaagcaagagaggaagagaaggggttaaaaaaaagcctcattcaatctagaaatatatgtattttgagtgcgtatctctgactgacacgctagtgttttttgcagatttaaatttgatgtagcggacgtgggtttcctatacaatgaggcttctgttgacacattggacatgaatttagtcagacatgagacctcaaagtagctaaataacaaagctccaccaaatagataccatgctgagcaaatgttggtaggtctgtcatttagtgtattttccgtgatccattccccaaaactctaccagtagaaattgttaaagctgaaggtagctggaggttggagaaattctcttttccttgagaacctgtgaaatgtcccttggtcttttcctactgagctcattttgttcctgcagaaatgtttgtggcatttctctgcaactggggacggctttccctccacacaccgtctcacggtatgaagtgaacaggggttttccaggcaggaccacagtcaggaaaagcatggaaatgtgaatctgggctttgtgaggagaggtgtgtagaccaaacaagcctttccaggtgtgcaaacactggtgctttacttgcctgctggacttagtgccaggctgtgcaacaaaagaaaacagattccctggtaagagtctccttatttgccctctcaagacagcttggcttccctagggactggcccacataggtctcttctgttgcatgcactccttgctcagatcctaatccaataccaccttctggaaaggatgagaggcagcaagcactgaagagtgaaactcctcttcctaaagaagtaaagcttaattgtatacccttgagaccttgcttcttaggaagatgcctttaaattcccaccactggccaagcataatgcttcatgcctgtaatcctagcactttgggaggctgaggctgaggctggagggtcatttgaggccaggagttcaagactaacctgggcaacatagcaagacccaatctctactaaaaattaaaaagaaaaaatcgctgggcatggtggcacacacttgcagtcctagctactgaggaggctgaagcaggaggatcactcaagcccaggagttcaaggtgtcagtgagctatgatcatgccactgcactccagcctgagtgagagagtgagaccctacctcaaattcccaccactgccatatgcatatattaggtttatcagcattctcataaggggtactcaagagaaaagaaggaagatgctaggtgaaggcctctggaacaccggagagaagagcaggggagatgcatgcttttgatccacaagatttgggccaggaaggtttcaaatcaattacctccatcattacaaagctttttatcctctgccatggcccaatccagcctgcactttatgtagtttaaaaatagatgtagaaaaaaatggaaacagagatggtggcagaggtagagataggactcgagatagatattcaaggaaattactttctggggaaaagtaaattaatggtcactggggtatatttaaattaagcaagaaaacatatcccaagtgcacaactctgcaaatttactagaagtcatcgcattgtacacttaaaacaggtgaattttatggtgtgtaaattatgccccaacaaagctgtgaaaagaaagaaaaatgaaaacatgtctaggaattcttgccagcacgtaggttttgtgagtgtggccacatcctagtagttctctgcttctctcctacctgttataaagagtcacggaggctctgctagtgagacctttcccatgtctctttagtgtacctcctttctccacttttctcccccagtctccctttgtccaaactcaggtcaggagagtgctggctgcaattgttttgggtcctggagtaattagaaaattacacaggcagccaattttgcacagacacgtgagcgcatgtatacacacacacacacacacacacacacatcaataaaggaaaagaaatccacaaaataagaactactcctaccccaccacccttccccgagcacatatattttttcttctatctttccccaattcgtggcacccagcatctatccactccacagccttcgaatcctgcagtatttttaaattgtgccataaatacgttgagtgataagcagccaacatctttaagtgccccttaaaactaaatattacctgtacaagcatatgaaaatagcccagcagaaccatccagttttcagtcatgagaagctcatgataatcctatgtaaatatatctttaaaactctgaaagatggcgggcactttgcctccatcctgggttgatagggaattttttctcttctacagaagagcacttcttaaaaaaagagagaaagaaaagcttcttttcagtagcatcaatcctgagctattggctggaaaccacagcctagctagtctggttgtcagctcagcactggtttagttgtctgggatgtgcattgaactccccgctttgggaaggttgcctctgacctaggtcagttgtcactggggatcccctgcatctgtgaccccactgtgtcttgctactgcatgcgttgcctgctcccctgactctgtggaaggcaggcgcgggccccactgtgaggctggcccagcggctgccctgcggccttgctcccctctgcatggctcccctgcttccccagcgcggcctcacgtccctccttctcatcctctccatttctccaaccagatggctgccctgacttgtgcaacggtaacgggagatgcacactgggtcagaacagctggcagtgtgtctgccagaccggctggagagggcccggatgcaacgttgccatggaaacttcctgtgctgataacaaggataatgagggaggtgagcacgcgtcttctcattcccagcccctaagagcagagcgttgtccatgcttttgtcataagtcatttttcttcggaaagacctcccctgcactattgtcaaatgttgttgtaacattttctttgaagcaaatgcagcagagaacaggtgtccttatgccaggggggatctctgggagacaccggctggaggcactgggggttgatactggctgagaattcccaagtgcccattgccacataaaggtggctgggccctggcgctgccttcagggtcaccagtcctgccagaactttcagggctgcggataacagtcggtgacaatgaggatgacaatctatgcctaacgcacaaagctgtcataagcaatgcctgctgccttcatccttacagccctttgagatgtcactctacagatgaggaaaccgaggcctgaagagtgattaagtaactttttcgagataatccaaccaccattagtaaaattgagacccaaacccagctgtggctccaaagcgtcttttctaaccagtagttggcaaactatggtccatggaccaaacctggcctgtaagctaaaaatagttttaacatttttaatggttggtggaaaaaatcattaaaaagaacaatatttgataatgtgaaagttatgtgaaattcaaattttgatgtttataaatttttaaacagctttattgaggtataattgacatataaaaagttgcgtatatggccaggcacagtggctcacacctgtaatcccagcactttgggaggccatcaccaccatcaaggccataaacatgtccatcgcttcccaaagtttcttcctattgactgaaccaagggttgggctgcttgttttcaaggtccaataacaagatgcagacacactgggaaagtaaccagaaataaactctcccaggtacagggagaaggccagagataattcaccaggccatctctaaattacaaagttttccagtgtgtatataccttctaagctatgtgtctacatgtaagtgtgcattcatctgaagacacaaatgattgattccatctaatctataactaaggtttgggtcctggacaccttcctccagagcctcagtaaatttgcttagcctagatgggtcctggtgccgggggtgattacccttatcttttctccagctaaggtgtggaggtctggggagttcctttagactcccagtaaaacttgtttaatcctaaatgggtcctggtatgaggagcatgagaatttcttcattatcttgtgaaggttcaaggcccaggaaaggcctaggcaagactcttggtgagcttttgttacattccagcctttgtgtaagtgcgctggctctttccgcctttaatatttaacctaaccattcattcagtgccaaaacagttgtcatggaggcctgcctgttcagctggtggtgagacctggcctgccacactgctctctttgtgattattgtcttggggtgattttttggttttaagagtttttgtggtaagaacattttaacgtaagatctaccctcttagcaaattttgagtgtacactactttgttagccatagatactatgctatgtgtagatctccagaatgtatttatcttgtatcgctgacactttgtaccccttaacccacacctctccatttattggaatacagccatgcccatttgtttatgtttggcctagggctgcttgcactctccatgtcagagtggagtcaaagcaaaaaccacttggccatcaaagcctaaaacatttactctccggccctttacaggagaagttttctgtctcctgttctaaacctctgagctgaatttccccatgttccttcctgatggagtgctaagattctggggctaaatgaggttgggttagcatgtgggccacctaatctcctaagaatactgtggaatgttccgtagacttcagtacaggtatgttatccacccccatcaaaattactaactgatcagaattcactgggggcagaggttgtttcagagtgtaggaagatccatgagtccaatcatttgatttaacaaaaatgtatttagtgccaccttggaccagtcattgaattctagggatatcaatgaccaagtcaaagtcagccactgccttcatggccccaacaggtcctttcagtggtgtccagagcagggtggaatccatcggggtggtggatgagagtattagatattctatttttattttttctcatcctcttaatgggtattttgcagtttccataatttatgattgccattgtgcctgtatgtaatttgtaaataaacagatgtacatacactgataggagtacacaatcaaaacagtttacagacctgatgtggtttacagagctcccattcattcattttctctttcctgaaacagagccaaagagaagtcactttaattcattttttaacaagttaaggcataactacataatgcattttttttcaagtcagaatcgcacgacttttgctggtaaggttcactgcttttccttctgcctccctggcgatttcattgagcacagcggttgcttacagatcagcttctacttccagaaaggagctgctctcctggctcccttccccgttcctggtgtcagcagctgaaagcataacaaatggctggaatgccacacagaggggagagaggaaactctgggggactgtctccccagcataccctgccttacccacctccctccccaccagccctacccctgatcccagcttccacccggccaaaaccaaaatcctgaagtgatggagctaaaagaggctcacagggtccccgggcctaagggttgcccaccaggcacaattcaggatcccccccccaaccccccccccccccccggctggcagagacaaagcagtccaaaggcagggcacaaaagcaaatgaggcagtggtgattatgctaaagacaataatggccttgttacgggaactgttaaagcaaacctcccaaggaagtaattaaccacaaagaaaaaaaaaaaaaaaggctgcatggtgtttatgaaaagaaactcccagttaattcagagttgcttatgtcaggtgagaggggtagacaccaattctctctcacctggcataagcaattcacaattaactgagttctttttttggaggtgattcctcagtgtagagtatcctttttatggttagtgacttccctaggaggtgtgctaagcactttgctgtttattgataaatattaaggttgctcctcatcaactccagattcaatcctgcagcacactaattatatcactctttttgtttggttggggtggggatgggagttctgccctcgtctctgtcctgcttcgtgagttatcaggaagggctatgtgagtttataaacctggcagtgggtcagagaggcacccgggcagaacatgaatgcagacccggggagcagcagcaatgaacacatttgttataaatttcatgaacgagcaaaataatagagctatctaccaaagtggactggaaaagacaaatcacttttccatctagaaacactctactttaaaaaaaagaatctgtttgaagggatatgtattttttattttaaactgagatagatatagatacaaataacagatagagatatttgaaacctttaacagccttttttcaacctgggttcctctatgagagaattaagccctaatactttatggccactagtagttctgaaacttcagcatgcagcaaaaccaccttgattcaacacagagtgctaagccctattcctagagctcctgattctctaagtctggggagggcagtgcaagactgaatttctagtaaatatcccagcagtgctgacgcaggggacgctgatgcaggtcctctttgagaaccactgtcctaagccatccattctatgtaatgaattaacttctctcctatgcatctagaatggtactggataaaataactcctttggaagaactgagaaaactttcactcaaatatgctctgtagtcagcagtgttgagatgaaaatccctgttggagaaggctgccttagaatatccccaccaaaacagtttatgccaactccctgccttctcacccccttggctttcaaagtctccagacacccccagtcatgtgaccgccactcatgtaacctcaggaagcaatggctgattctgaagggacaagccacacctgcccatggccactaaaaagaagtggaaatggttcagacagacacggcagctggcagactgtctttttaatagtgagagatcttcacttgaactgctcaccccaatttgaaaaagaagagactcaaagaaatatttttgcttacagaagacaaataccagctcattaaagtctgagaatacacacaacatgtgcaccaagtgacaggcggataatatttaattatcaccaccaagacagaggtgtgagatttagttcatcacagccaggggtaggagagagggtgtaggtttcctctaaaagtgggaactgcaaggtgaggaggcgttgttagactgtctggcctggtgagacagtccttacttcttccccactcccctttatcaccctgaacttagagtcaggagccctagcccttccatcatttcaagccggcatcggagtgagtctgaagctcctgtggaatcctatgagatgctttctcccatctgtgggcagcggtgacagtggagaccaagggaggtgatgtcataaccacatcacctggaggtagggtaggaggaagcctttttaggctgagcctgtcccgtcaccccgcatcactttcttccttactaaactaggagagatgtcttttcccctcgttccgtttcaacacagcactgaaagatgttttgcaccttctctttcatgtccctggtttctgaacaggtgacactgtatcatcataattgattgagggcttgggcttcagagtcagcctttgtattccagctctgcaagtcactttgcttctcaaagtctcagttttcttatctgtaaaataggcatggcaatgccaatgtcactagctggtgtgaagtttaagtgagaaaatgcatgtgatgtattttacaagacacctggctcatagatgccctcacacgttggctgctgctagcattaacattattaatattaatgttattttctagaaaggagactgaattcatatagatggaacccaaccaataatttttccagtgtacacaaccacaaagattctaactttgtgcttattgaactttagtgctgcgtgactgtgtggagggcttgtttaaaagtcagatttctaagcccccacctttgaggttctgatttattagtcagacatagaatgcaggagtctgcacttttaccacgcaccccagagtgtctgatacaagtgtgtttgctctgcagatgacattttgagataaactttttaaaataatggtgttccctgggtgggctcacccagcctaatgtcatagtgcttataccccaaaccctttcccctaaaatccccagaacacaggagtgcagtgaggagaggggaattttatttcaggaagaaataagtagctgaaaagacatgaagtctgggcatggtggctcacgcccgtaatcctaacactttgggagaccaaggtgggtggattacttgagctcaagagttcaagaccagcctcggcaacatggtgaaaccccatctctacaaaaaatagagaaattagccaggcaggcatcctggcatgcgcctgtagttccagctactcaggaggccgaggtagaaggatcgcttgctcaggaagttgaggctgcagtaagccgtgattgtgctattacactccagcctgggcgacagagtgagaccctgtctcaaaaaaaaaaaaaaaaaaaagacatgaagatatctttatgtttaggtcctttgtgaatgacttcagtatgatttagaagttctccattcttgggtggagagttggctgatgtttgtttcaaagtttaaaaacctttaattctctgtcattagggtatgaattcgtctatccactcatccatccatccatccattcattagcttattcatttatggtttaacaaacatttgttgagggtttactaaatgttagaccctgaaaataagcctttagaaatactaaagcaaacatgacatatgtccacaaagagctcactatccatctacaaagatggataaacacattgttattattattattacagtccagcatgtgagaggtgacagagatggaccatcttattagacggcaatagttcagtgggagcatagcaaagggactgtcacgtgtatgggtgtcaggaacatgacatgagagaaagcgcagcccattgttaaggactggctcttcagctcgtctccatggagtgtcctcaaagccacaaatccgtgtgatcagtaacccgtggtagaggctcttcaggtcactagcagttactgcagttccctctctaaatgaagcactccactctggcttctctgcagagcagtatttcccaccctacctccatctgcaaggctcggttccttggttcactccaaaggaggctgccttgggttaagagacgtggatcctggcctgagctctgggcatgccatccaaggcactccagccaggtctaaatgaggagaaataacactggagtctgtccaaagcacttggaacagacaaaactcacccctcgcccactgcctcctcccgctccctccccatcccgtagccatccaaattggtttgacacgattcaggaatgctcttccggcatttatctcacttgctaattaataactcaccttgtctgtgcatttagcagagccaagctagggacttcagggactccaaaagggttctggttcccatgcccaaatagtccagtttcttcctccaatgagacacaaagcttggtgaacccactgtaaatgccttgattaatgtatcccaatcgtgttgatggattggttgggtgggggacagcttaaaaatacaatattgagctattaattgggttggatgaggattccctttgcagtccaaagaccttgtggcaaatgtagctggagccataaacagagtccctgattagctcccagagagaaaagcaatgtctctaatgcttaggaggaaaacttggccttgaggacactgccagctggccagatgctgggtctctcttctttaggagggaagcagaattagcctcaactgagatcttcagggaacacatagcaacagggatctgaagttattctggctcttccagttgaaataagatctttgacttcctgggcatatttgactagagaatcttctgtttagaaaactgtaaggtaggggttcagttttctcttatgctactgaggtttagaaaaaagatagaaccagctgcgcacggtggctcacacctgtaatcccagcactttgggaggccaaggagggcagatcacttgaggtcaggagtttgagaccagcctggccaatatggtgaaactctgtctctactaaaaatacaaaaattagccgggcatagtggctcacacctgtagtcccagctactcaggaagctgaggcatgagaatcgcttgaacccaggaggcggaggctgcagtgaggcaagatcgcaccactgcagcactccagcctgggtgacagagcgagactccatctcaaaaagagagagagagagagaaagacaggagggagggaggaaggaagaaaggaaggaaggaagaaggaaggaaggaaggaattctcttgcatataaaaataataatcagtaagatttttgagagcttacatgtgccaagcactgtgctgagcttgctctgcacctgggttacgggaacagcctcccaagtggtctccctgcactcctcttgccgtctgctctctgttcctccacacagcagccagagggagtgttttagtaggttgatgcaaaagttattgtggttttggccattgaaagcaattaattttgcaccaacctaatacattgtaaatctcatcattccatgttctcaaagggtttctcatggagttagaatcaaaatcagctgtttttttcaccttggcttagagggccctctgtatatcccctgccttgtctctgacctgtcctcccccatcctctccggaagctctgcctcatccactctggccggtgtttagactgcacaagtgcaaagattagttccacccgagggtctttgctagtgcaaggtggaaatgctcagtcaaggcacattgtatcactggctcaatgtagtcattcagttctcagctcaaatgcctcagaaggacttattacgaagtcttcctctgtgtctctcccatcaaccattagtgtttcctttatggaaatatcacactcctaaattttctcacgctgttattcttgcagattgtctgtttcttcacactagactgtaagttcaatgagtctatttcatcatattattttcattatacagataaggatacaaaggctcaagaagttaagactcagaatagccctttcagctaaccaccatgatatatggcttttctcctttaaaaccattggctccttttttctaaaacactcaaaaaatttggacagtgtttctgaagaagattcaaacaagtacagaatgtgtgctgctgcaaggaagccttagaaaaaaacacctcaaagacaaaacttttccattgaaaaccttttcctggtacatgtaattgaccattgaattagttgtgttcttttttaaaaaaaggggtttaaagtttataatttacccaacacagcactttcagtcttttttaatcaagtctttattagtttaaatggttattaagtgtctcttaagggattatgtttttttccccctgattagatgacaaatcaaatatccattatgaaattgtgatgaaaatgcataatctgaaaaaaaattttaatcatgtaaatcactatggacttattttagggaattaaaggatgaaaacgcagatttcactggtggcaaggaggtgatattgatagcgttatgttggcttcctgtatttgtgctttggccagagccttgccctagatggtggcaggcacacccttgccatcccccggtctctgtgaccagcatttgaataaagaggcaaggtcctcgtgccatcactagctctcttgctcccacagtcttcccccaagtccagaccagtggttccctaccggggcaactcgctcacccaggaacatctggcaatgactggaagcattcacgagtcatggtggtggggaggtggggaggtgctactggcatccagtgggtagaggccagggttgctgccaaatgccctacacacataggaaagccccaaatcaaagaatgatcccacccaaaatgtcaataacaccaaggctgagaaatccgatatagacatttaatgtcccaggaacacatctgtctgagggaccagagggtcccaaaacaggcagtgtccatgggcctgatttgaaaggacgtgatgtccaaaaccctaaggcattgagcccttactaagggccaggcccttgctaaaacgtcacccacattgcctaaataaatcatgacaatccccacaagagccctgggagtctttcattatcctttatatagaagcagaaactaggagccagagagaacaagtggcttgtccaagctcccacggcgaaaacatagccaagccaggattcagaacctgggtcaagaaccctcctctgggcccctcacagcacctgagtgtttgttgtgtttgggctcagagcaaggcagagcataagtgcttgaacaacctccgcccctcagaaacacgaattttgcagcatgcttaaaaataccatcggcgttagcttttccctccggttttggatttggaatgcatttttgccacaaagcacttaggcactgaaatgccagggggtgagcaggggagagttgagcagctggactttaaatagcaaggtgttagcaagcagcacagcaagagcagctgcccaaggcctgtgctcttttctttgactttctatcttctcagccaagagctctgggggattggagaggggccagaactctgtggccaaatgcaaatccagagaaaactgcgaggtgttcccccaaacctctgtgcctaatgcttctcttcctccccactcacaaccaagaccaaacctttccaaggtgattctcctcctctgcctgtcctcagggtatgtcatcatggagctctccccacctccttcagtttcctggaactccatggccacgtgcactgaggcacactacctctttcatttatgagaatcacaggatgatttcatttatgggagtctggaaatgtcagatgcaaaaaggctaaactatagagtccccggcagctgcaaaacccaaggagggaagccacttactcaaggccaaggagcaggcagggcagacctgagactggagtcctggtttcctggctcaaaatccagtgtgcttttgtcaatgctgcgttgccaccaaaaggactcagtgacactcaggagaatgggtgcctgccactactggttggagccaagatctatttcagacctgggacctagattagaatgagtggagatgcctagggtacctcacagtgagtgtcgccttcactttcgccccctcagcccctcattcacctcttcctagttgcaaccctgctcagacctcttgtcattgatggcaatgacagaaaacaccctcccccacaccagccacactcctggacagaccactcaccaccaaaatcatttattcatccaacaaacatataccaagcccccactctgtggcagggcatgtgaatgaataagactcaaactccgcccataaagatgctctgtctggtgggaggtaaaatacacactaaagctgtcactgcagagccacattttaagggtccataatagaagtaaggccaagagaccatggccgctcacaagagaggcactgaagacttccaaaataggtacagcttgaatcttaaaagataaaaaggaattaggcaaggaaggagggaaaagcattgtgaacgaagggaacggcaaatgcacagaggcaaggaacagcaatgcctgtgtggggacctctgagaagcctggtaccttgcagcctagtccacatggagaatggaggaggatgaggctagaatggggtttgcgtgcagtgctgggcagagcgcaatacagccatcatatttgtttgtgcctcccatcaacatagcatctcagtcttcaaaattgcaaccatgcctgcccctcagacagaaggctgatatatctgcttgagttattataaacacacacaccacagctgagaagcaggcgtggccttttgttgtgttgcctccattgcacatgggcattctttctcccagggaggggagacagcctggcagggtagtcaagaggctttgggatttgagcttcaggtcacgtcccagctcctccacttcctcaagatatgagcttaaatttaagctttgtcctctgtaaagtggagctagggctaatttctacctcataggatactgtgaggcttagatgagttaatggatgcaaaacagtcagcacaacggttcgtatacatcttatacgtcagtgagcatcagaatcacctggaaggcttcaggcacagatggctgggccccaccctcagagtttcagattcagtaggtctggcaggaagcccaagaatgtgcatttctcacaagtgcccagatgatgctgttgcgttgagaaccactgacttagcgtaatacgtgccttttgaagggaagctcaagtgctggcagagggattcctccgagcgtgtcagccctgggccagctgatgaggagagacaggccaaacagctctgcatcctgaggcggtggccacttcattagcatatggaccttgggtacattcctgggttcactgaggtcctttccacagaagcttgtcatccggagaggagtcagggctccaacttcccgggatccatcctcctccttcaagagtgttggaataaacgaaaaatgtggaaggagtttgctgggagagagcagtggtagctggccctggttccttgccttttatgacattctgctgcttctcccatgccccctgccccacttaggacaggtggtgctgtgccatttactgatggggtccacagactttggaatcagacggacctagctgtacattctgactcaggttcttactagctgtgcttccttgagcaaaggacctaacgtgtctgagactcagttctctcatctgtaaactggaaacaatgatatcaacttcattggcctgttgtaaggtttgactagaaagtttatagacagcaacttaatgcccctttacttaaatggctgctctaagtgtttgcatctccctgtatgatgtgagttcagagattctaaaaacatacactgccttccaatcaaaaactcatcatttcaaataatacatacatttcaaaatcaggaacccatcttttggtccctgttataatacatttccctcaatttcatccccactggctctggaatgagtgctgtcttccctcagaggtcatgaaccggtgacccccaagctgggtgggtcactgtcatgttccctttagccacataggcttacaaaaatctttgcattcattgctgacatttagaggatttcatttaactaacaaagaagctgagggcctagaggttaacttgcccagagtcaaacagtggaagggctgggattggagcccagttcttttgattctaaatgtcttgttcattcttctctcagaccctttttctgaaagtatttttatgccaggtgtgccagagtccaaagccactaggtgtctggggttatgctggaaaagaggaatccatggagaagacagatgcagaaaagagaaacagcagtccccggagcaagcttctcctgctcttacttctgccatgctcactcagaaagcttgtggctcagggagtgtagaaccagggagaaaaccccagcctacctggggtccatcactcaaagtcttagccctttgacgagcaacactaatatcatcactacccaactagcacaccgtctgccagggaggccattgcataggcctttgacatgccctctttgtctatgcatcttgccacacagattttgggatgcccccttacctggcctctccattccctactcttaatccttaaggccatgatttcttaatagctttccacctccactcagatcatgccaacaacttctctgcgctggactatgggtcctccagcttctaatctgttccccacagagcagctagaagaatcctttcagaagtcagatcctatcacacccctgctcaagccttgccagggcctctcatctcccgtagcatggcacccaggttgccgcagtggcttccattgctctgcattagtgagtccctgcttccatgctgatctcatttcctctctctcttcctcgtcctctctctgccatacctgccatcttgccattcctacaactcacagatacactttcaccctaggcttctgcacttgctgttgcctctgctcagagtgttcttcttccagatgtttccatgactcatttcctcatttcgtttaggtttctacacgaacatcacttctttagagaagccctccctgccctccctgtctaaagcagaaaatcccctccttcatcactgtccagccctttaccttgctttacttagtgtcttcagaacactgtcactgtaattccatcatgcattcattgtttattgtctattttccccctctagaatctagggccataatcacagggtccttgtctgccttggtcaactcattgttacacgaattgaatgagtaaaagctttcacgagaagtgtttgggatcagaagcaattgtcttttattcaatagatgattgggagataaatacatttcattttaggatttcaaaaaacatgcatacagtgacacccaagtcactatataccgctgatatcgttttatcagtgcaaagaaaatccagatataaaatacatctttgcttttcagtaaggcatgaagacatggttgtactgctcttcatctgtattattgacttggcctcatcctgttcattgacttcgtatgggttggtgcagtaggtatgcaagcctcataatcctcctttaaaacaagaggaaaggcagaggcagctgcagattgttcttgggtgaactccgacctcccaaactacagcttgctggagaagcatagagtaggggagaagaacagcaagtctaaggctgggccagctgcgtgtgaatcccagcttccccacccaccagcagctgcccaaccttagtcaagtaactgaccctctctaggactgggtttctccatctgaaaagtggaagtaaacaaatggttactatacaacaagtccttctgcatacagtttatttgatttttttgcaacagccctattaagctggtgtgattatttttattttacagatgaaggaaccaagactcagagaggtaaagtaactagcccaaggccacacagccaatattttgctgacctggggttgaacacagatcagctgcctctagatcccgtgatcataattggcagtatgatactaattcctattatctacaccatagagtagatgcgaagattaaatgacagccaggcacaatggctcatgcctgtaatcccagcactttgggaggctgaggcaggaggattgcttgagcccaggaacttgagaccagtctggtcaatatagcaagaccttgtctctacaaaaaattaaaaaattagctgggcacagtggtgggtgcctatagtcccagctactcagcaggctgaagcaggaggatctcttgaacctaggaatttgaggctgcagtgagccaagattgcaccactgcactgcagcctgggtaacagcacaagacctcatctctcaaaataaataagtataaaacaaaataaacgagaaaatctccagcgagtgctaagcacagtgcttggaacatggcagcagccacgtttaggaatgacaccgtttagaaattagtacttccaactcctctaattccacaggaagctcgtagaatagccaagtccgggcccttctcccagctggcagtctggggcatttctttatgcagcagaaggagaagcatcatgcgcccctactaatcctctccactctggggccaagcctcccatcttccccccagggacaaggtctcccctcaggcggaaagtaactgttcaccttgttgctctgaggtgtcggtggtgacagccccttttctttctgagggccccagcaggtcactgtctggcaccaggctgccaccccctgccgggcctcggctgcactggccgtcggctcagttctgtgtgacctgtcagtgggctctttgaaatggaggttgatgaggaacagagcagggtagaccaggcagcgagaggccaggaacagcaggcagagggcaagcatttggggaaatcagaggccaagagcagaggcccctgctctctgttgccagtggtttttgtaacagcaaagtggggagacagctgcagccaggatagaaatcccccaggtataaaaaacgtggctctaggctaacaagggtgagactgtgccagagaggcctgtcagaggctgtccaaggtgggaaatttctgatcaaatgagatgattcccagaggccctttctgggttgagagtcagcaggggcgggacagggagaggaaaagaaggaaggggaaagagacagaaaaaacaactaagaaatgaacatgtcttctgaagcttcagtatttcccttcataagtcctgtgacattcagagggtacctatatatggctgtgactgcttccagccccctgtgaaaaaccgagaacagaagtcaagaggctttggaggaggctgggcatggtggctcacgcctgtaatcccagcactttaattccagcactgtaattccagaagtcaagaggcttcgggaggccgaggcggatggatcacttgagatcaggagttcaagaccaggctagccaacatggtgaaaccccatctctactaaaaatacaaaagttagccaggcatggtgaagggtgcctgtaatcccagctacttgggaggctgagccaggagaatcacttgaacccaggaggcagaagttgcagtgagtcgagatcgagccactgcaccccagcctgagcaacagagtgagactctgcctgaaaaaaaaaaaaaaaaaaaaaagaagctttgaggtagacaaccaacatgtgaatcatgaatcacttctccatcatttactagcactgtgaccttgggcaaggcccttaagctctatgaacctcagtttctttatctgcaaaatgaggatcatagaacccaccacaaagggttcttgagagcatgactggatgctggctggatcgaagcacagcacaggctgagcaagcacagagggacttaagtggctggcagagggccaagcacttaattgtaaacttaagtcaaaagtgtgaactggatgaagctaggagctggggcagagggctggccaaaacattctgctgcccagtttcccaaaacataaatcaccctgtactaggtatgtaaatggttactctcactaactgtcttagataaaagagctcatatgtacatgcttgtacaaacatgtcatggcagagggtacaacaggctcctgtgtgttggacactcagcataacagtcacacaaccttacatggcagctttgtgtaggatttcgttccagagtgcagcaaacagggtccaaaacccagtcctaccacttaaaaacagggtgaccataggtgaattatttaatctcgaagtctcccatttctcacctgtaaataatgatgttaatagcacccaggattctggtggtgtcttaataaaggcatgcgtttaaagtacctaacccagtgccaggcacccaggaagctcctcctgagcaccaaccattggttctcattagacatggttgccattaatgttccattgtcttgctgacgccaggatgttgtcacctagcacagggtccccactctaaaatgcactggccttgggagacactgggagctggaggacaggggctctgaactgatatgctagtagtaccgacgtggtttgtgttgggcctgatcaccaaaagccctgcactttataggaagtcaatcaaggatgagactgccacttgtgactattgagtagatggaggtatggctggtccttccaagaacaaagcccccaaacctagagccctatgttctcatgaactgttttccaacgtgcatggcactagatgcaattgcagggagaggctcggagccagaagggtccatggtcaggaaatgctgcgtactccatgacaatattaaagactcataacgtgtatccatatatcaaagcctccaggaagtcctgctgtaaagtttaacttcgtttaactgactcccaaattacatttgatggcagatcctcccctcccacctccacttttgtgtttcagggaatgcgtattaacatcctgcaggagacagagtttggaaaaactgttgtagcccctcagctgtactgctgtggatatttgaaggctttttctcagtcactcagaacagaggtctcaagctttagtgagcaaaataatcattcttgagaatcttctttaaaatgcagattcccagccaggcacagtggtgcacacctgtcatcccagcactttgggaggccaaggcgggtgaatcacctgaagtcaggagttcgagaccagcctggccaacatggtgaaaccctgtctctactaaaaataaaaataaaaaaattagctgggcattgtggcgggcgcctgtaatgccagctactcaggagactaaggcaggagaatcacttgaacccaggaggcagaggttgcagtgagctgagatggcaccattgcactccagcctaggcaacaaaagtgagactccatcttaaaatttaaaaaaaaaaaaaatgcaggttcccaatatttagtctcaggaattcagtacgtctgggttgatggcatcttaacaccataccggagcaggtagtcagggagcacaccttcagcaacgctggtttaaagcttagccactggaaatacggtgctcagagcaacaacatagacatcacctgggagctcataaataatgcaggctctcaaaccccaccttaggacacgggatgagaatctacattttaacaaggtccctgagtgattgtgatgctcattagaatttgagaagcattggtttaaaaggttttgttgatggcatttgtttttggtttttgtccattagttgctggtgaagaaccattttttaaaaataactggacaacactataatccccttgtcaaacatttcccccagtggcttcaaggtacagtctattaaagagaggccttacctgaatcagatttctgcctttggtagcagagccttgattttcttaagcagcccgtgctttttttcccacatccatcctaaagagtagaaaagccagcaaacagctttcactggggcctcctctctgccagatctctggtcagacatgattcatcttccatgactaagtcataagaaaggccagaaggtgctttggtacaacgatctctggacttggaagtcagagtctgaccaaaagagttggcaagaagtaggaggaaaacttccaacaggtcttcttccagaaggagtgcaaatacagttttacttctttttttttttttttttttttttttgagacagagtctcgctttgtcacccaggctgaagtggagtgatgcaatctcagctcactgcaacctccacctcccgagttcaagcgattcttctgcctcagcctcccaaatagctgggactacaggtgtgcaccaccacacccagctaatttttgtatttttagtagagacggggtttcatcatgttggtcaggctggtctcgaactcctgacctcaggtgatccacctgcctcagccgcccgaactgctgggattaccggcgtgagccaccgcacccagcccagttttacttcttgcaatatttgagaatggccgttgctctgtgcagggaaggaggatgcctgaggagcgacggttcatcaggcagccagggtattaatggcaggtgaaaccttccaaacgagcatcctgtcagccaatctattgctttaaaaggttcgcaatgcaggagaccttacagaggcaatgaagaactaatctcatattgccaggttaaatcaagtcagccttgcctattcctttcacttcttagttacatcaagcccaaatactttcaattatcctcacttccaacttgtcagcaggcgtagggtaaaatgcaaatggaacagtacctttctctcgtggagagcaggaaatatcattaagaataaccttcatgtattgagctttgcctccatcttaagtgctatacattcatcatctcatttcacacgcaccttcttagagcacctctgtgcatttcagtgcagtcagcattattaagtccattctatagattggaaaactgagccacaggaattcagtcacgtgcccaagatgacacagctgataaataatagaccaggttttaaagccagaccattctaattctaaagcccgtgtttgtttgctgtttttcaaactgagccaaaagtccagtaccaccctgggcaaatggggcagggcagggaccaagcattgcatctcagcgggccctgagctttgggatgactcccttgaaattttctaagttgctccccaagtgtcagggactggccagagtcagcaatgctaactgggaggagcacctcagtccagactaggacccacgtgagccctgatccctgttcctccccttcagggtgctctttttttttttttttttttttttgagacagagtctcaccctgtcacccagcctggagtgcagtgatgcaattgggcctcactgcaacctccgcctcccgcgttcaagcgattcttctgcctcagcctcccgagtagccagaaccacaagtgcgcgccaccatgcctggctaatttttgtagtttttaatagagatggggtttcaccatgttggccaggctggtcttgaactcctgacctcatgatccacccgcctcggcttctcaaagtgctgggattacaggcgtgagccaccgcccccggcccagggtactctttgaccctctgccacccctcacccccactcctgtgcatgtagggtcaataagatgccccaaattgttttggcatttgcatctatgggatatcctaaggcctaacggccagccccagttccagcaggcagcctagcaagcactggccaaaggactctctcttttgcaaaccaagcttccagaatggtgctgacctgctgatttggggtgactcaaattgtttatatagccaggggcccagcacaaaaaaaaaaatgccctttgactggggtgctgcataccttaggcatgccctgcaggagtttacctcaaaacaaactaactcccaaggcaaaaccaatcctatggttccccctttttactcaggaaactctttccatctctatctcaaattcagcaggagcctttggcctttgctggccagcattaagtgccctccaggacccctgcaccttcttcatttccatcacgaacaaccagatttcatctttcttgccccaacttattgcttcttccctcctttttattgctgcattaatttttcacctcttcatcattattagctgatctcaaaaacgaccctgagtcacggggttcaccacctgactacccagactttccttggggaagtgacagcttggcaagcacctagctctgtataggtaaaaaaaaaacccatatgatgccaagaagactcaaaaagaaaaagaaaaaaaaaacatagaaatgactcagaagcacttagtaggtgacaaggtgctcacaactgttgtaaggacctttcgtggattacctctgtggatcctcccagcactcctttgggtataatcatcactgccctcactttgtcaattcacctggggaaccaggtgactaagatgaagatcaagagcatgcccagtgcccagaaagtttccctgtgccctcccaactaatacctcctcatcaaggtaactacaacttctaactttctatcatcactgattaactttgcctgttcttgaacatcctatcgatgggtcagagagtactcttcaaagctcatgtttttaaccaatccactctatggcttcctggcccaatgagtaggaaaggtagatttggtgcttggtggttcctctgtgaaaccatgactgcaaagagtgcagcttatttttaaatctgagcttctgaccagtccccaaccagcagctgcgtgcagacactagaagagccatccacagcacctgcagtgatttgttagaggccatctccaccactctgtcacaaaatgaaacttagaaaagtaaatgtaggtgttcttctggagcctttaatacctaggaaagccatggagttcatgcacattggagagagactcacttgcaaaccaagctacagggagaaaagttgaacaaaatgcttccattcaaattctctataagctgcccagaagatcaaagaagaaaataagtgaaatcaacatcttctcattccctgagccatttcctatgagaatgatgatgcaagaattcacacagcctcctccaggcagaaaggtgtgcatggttcagccaactccaaaggatccagatgcttattgtggctgctttacagcctctccatcgacacagggcctccttcctcctgagtgtagctttactagtaagcgtttaatggaggctttgagcttaaatctctttactagttaggagctccttttaaaatctagcagagtacactagacaggggattgaaacggctgacaaaaacctatagccagcacaaaagtaagtgccaccttgtgccaatggtaaacagctgaaaggggattgtgtctcacaggtaaatagtgtggtcctctgcagcctacaatgccaggaataaattcccaggcatctggtttctcctgctgattcctcttcagatgctcatttcaaccagccacattctttcccagctataggagtagacaggccttcagaagtgattaaatctcacagctgcccacacttacccctgttgatgggtgtccactgccttgtcttcagacttccttggggaaggaagcgtcacccctcctaataatgaagacaaaaggtgataatctcatcggctgcctttctctactttttattcatagctgcttcttagccacttggatatccaccttctccaagcctcagttgcatcctctataggtgggtatagagtgggtggcatggtgataatggagctaagataatgtactgagcattcattatacgacactgctctgagtactgtacagacaataactgctttaaccctcccagcagcactatctaccatcgtgatcatcatcatcatcaacatcatcatcatctccattttatacatgagggaaactgaagcacagagcagttaattgcccatggtcaacagctaggtaatagtcaatctgagattcaaacccagataccctgttctataatctgacatttaagagttacattattctgctttgcaggatttccatgaatctttaaattaaaaaaaaaaatgtaaattctgctcaatctatagcatttgttattcctattaattattattattaacctatcactgtttggaaattaagtatttttgccaagattcaaccagcccatagcctacaccagtggatgactctaaatataagggaatattaatttcatttacttttgcatctttttttttaaaatgaaaaagtggaagacttcagggagtttctggttatagttatagttcattggacatatactatataccagactgacatatatatatatatatatatatatatatatatatatatatatatatatatttgaatttatatatatatatatatatttgaatttatatatatatatataaatttatttattcttcatcacataaccctatggcatatgtacaattataactcagtttttaatgcaaggaaactacaacccagcaaggctgattacctttccaagctcacacagccagggaactagcagagacgagcttcaaacccaaatccatctgattccagaggccaggctgtcacctctgatgctgtgtagaatttttggctttttaccttgggacttctaatccaaaggtttcaattcagcattaatgaacctgtttcacgttgccagaactgttatggaagaatctctctgatttgctttatcaaaagcaataaatagaatgccttggtatcattcccagaaagtttctccatgatcacatttctctgaaattgtcattacaattagcttatgacgtgtatgagtagactagaaccagagctgtgatttagcgtccgttctgacagaaaacacctagataattctttttggccccgtttcactgagtgaagtaagattaagcagacatgagccaccgcagtgtgggctgattcagaaggcctaagtcgctttcccataaccgctgagtcagtattgggccctttttgaggactctgcaaacctctcctaccatcctcacccccttccccaggaaaaagccaaccagactaacaaataagtaggtagataaataaataaagaaatcgtccattgtcataggagggccaggccgctttccctctgctgttgaatggagacatcggccacctctcaggtcctgaactggcaattcagaacagtttgattgcctgcttgattgtttgcgagataactgcaagattgtcagtgacagggtaatttactgaagattgcaatgtcagactccatccaaggggcttgctggcataaagacgcgattctcatgactgacaggccactgggagattggagtgccaatttaaagttcacagtgtcgtctgaaagtgtttggcggctgcagcccataatcacgcagcatgatgaggtcattataggcataacgtaggctcctacttaataacgggtagaaccccaaatgcacaatctctggagcaggtaaatgtaaatatgtaggaggaaatcatttgtatcctattttctttctgttttggcatttgtcatctgctattgctgatgtgcttaggccatctcctgccagacaggcccttgaatcaaaagcccaggatcaacaaaacagtggggaaatttgaagttcacaattctgaagcagtcacaagcccggaaagagtgacaggctggagggggagggggaggcaaatgttcagcactcaataggaaaactgtcttaagttattcttcaagcccaaagaggtcttcaaggcggttatatggagcgggtggtaaatgggttggagggggaggaaatatttccccagcttcaggagggaaaggccaccagagatggatgatacccctaattggaagaggcctgtgaccttaaagaaatctatagtgctaacagcagtgggtttcttctcacctgagaagcttcttgtggctgctgaaggaagccctgccagcatatctcagcaggttattttttaaatctgaaacaggcattccgtggtagagcccttctgtcttttgaaggcagcccgtggacagtgatgttcaaggcagaattctatgcactttttttcttctttttcttatgctgccaatggtcctccagattggacagcctgaatgtggatctgaaacaatgcctggatatcatcctgctactaagatacaatctccagtgctgtttctagggtctgaggtttgccaggctccggggaactggggagtatccgattcagccagcatatcagcccgagatgttcagagccttgattttgaaagtctctcaatctaaagtgtgcatgcctgctcaccctcctgtgtctgcatttctaggaaattgtgtaaatctaaatgtgttacgaggcacatgagcaacatttgcccatgtggaaaatgagaggctagttttagtaatttaaagccaggcaaaacatgcaacctcctaatttgtttgtttgctaaaaagaaagtaatgcattaaaataattgcacattaattgctaaattacagtggaactttggtgaaattacatatttcattttcattagcggaaccaaacgaaaagggtaatgccaaaaaattacactgtagtaaatttaaagcacccagccaggcctctgattcagcgttccagtacaagtgtttgtcaaggcacagcccagggtttgagtgcgtgtttccatggttctaattatggtccaaaaaaatgccttgctatcaaatccaggaggtgcaagcaagttattctccaagcttctccactgtgtattcaatccgctcccagccgagtgaataaggattgactaacgaattcgttcttatcagaaattccaaggagcaaacactgccctaaacattcccatcttcagccctcacagacaggtgaggaatgggaaacagtcattttattcattcaacaaacatctgttgagtgcccgattctgtgcttggtactaagagaggaatgaatataaaattaataagacatcatttttctcttcaaagagctcattttccagatagggaggcgagcattaagaggtcattaattctactataagaaagttggcattaacaatggtttttaaatcgtattgtgtgttagaatcacctgagaatcatgtttaaaatgcagattccagggcctgctcctggaggctctccctggggagatgtggggtgggccgtttattcttcctgcaggattctgatgcagaatgcttctttgagaacctctgattcagggatgtacagaacagggattcctaactgtcttggtcagtttgggctgctacaacaaaaataccatagactagggggcttaaacaacaaacatttatttctcgcagtcctggaggctgggaagtccaagatcaaggcaccagcagattcagtgtctggtgaggccctgattcttgattgatagactgcagtcttcttgctgtgtccacacatggcagaaagagtactgaagtgctctctggggtctcatttataaggacactcatccatttataggagttccaccttcatgacttaattacctcccaaaagccccattcctaataccatcacattgggagttaagttttcaacattgaacttcgaaggatcacagacattcagtttgtagcaataacctggccaggggcatcatccagaaggcttcctggaagaagaggccaacctaaacttgatcttaaaggatgagtcagtcctgtcagtttcccccactctaccattagctccttaaagacagtctccatggttctttgctctctctcatttccagcacatggagaccactcaaatatttgttgaatggtagttgagtaaataggaatcagcccaggtaaagggatagaggcacaggactctaggcaagtgcataataatgttccgagtcctgagggcgtgcaggaagacagaaccagaaactactgcggaaactgcaggcttaatttccagattcccaagccaaagccatttctccacatttcctagaaaatgtaatactctcagcacccaggtttccaattggtcagcagttcccttcctggcttagagagagtgggatagaatacttttctccgttaaagtgagatttaagggattccatgcattttagttttttttaatttgataaaaaaattgtatttctaatagagacagggtctcactatgttgcccaggttggtctcgaattcctgggctcaagtgatccttctgcttcagcctcccaaagtgctaggattacaggtgtgagccaccatgcccagccagaaattccatgcattttgattacttgtgcacccattagcacggacccctgggaactgaccgtgggtaatttgctgtgctgtgttgtttaaaagcgaagtttttgtttttattttcccactcaaataatacgtgttcatagtagaaaaaagtagaaattccagaaaagcacaataaagaagagaaacacactaatctgctacatgaggataaccatttgtcaacattttaaattatttcctttcagtcttttattttctatgtgtatggattggaattggatgaggcttgctgtgtgaaacctgccacctcaggcccttgggtacgtttgatgctgctcatgcctgtgctggtaacaaaggtgttagtgtctccaaacagctttatgccatgaaatctgctgactctggctctgcctctgcccttccagatggcctggtggattgtttggaccctgactgctgcctgcagtcagcctgtcagaacagcctgctctgccgggggtcccgggacccactggacatcattcagcagggccagacggattggcccgcagtgaagtccttctatgaccgtatcaagctcttggcaggcaaggatagcacccacatcattcctggagagaaccctttcaacagcaggtaggcaccctctgtccctgcaaactcctgaagtctctgattttcttcctgttggagccagaggcagttctccagctttcccggggacccaattggcctggaatctgcccccctagaggcagctccctccaagggggactcagagaagtgccctttcctcactttgtgttgggctccagaacagagccctagtgtctttgcaggatgtcaacatctttaacccagaacctgctggagacacctgttgattccctggtttttagatcatttttaaaatctgttattttatgatgttattgtcattatattaaatctccctttaaaatgcctctgatagtggcttttgttcgagcattgctgaaatagttcattcaatagagtgtttttgaaagctgttattaacttgataacataacctatcatttggtggcatcttagagtcaagaagatgttggttgcaaggatttattgagcacctaggatgagccagagactttgtgtagattatctctaatccacacaacaatcccatctattgcctctcctgattacctattgcatgcaagccattgtgccactgcatttcacccctcattctctccagtttattattgctcttagttgctaatttgaggcttagaatattctagggtcaagttctagattcattttgtcttcaacttcaccccaggacaagttagaactgtgctcctggagaagagagcaaggggaaggtttgtcttggagacacttccccaccaccccatcccctcctcttttctatgcactacgtatgattctgagggtagagaggaggggtaggagaggctgggggtcttcttatggcttggccatgcttgatcttcctctcagttggtccaagtccagatgtcgatggtgtatgctgatgcaagaaggaggagcgtggtctaattggggatgccccgccccatctctgtggtccttcacatcaagaaataaaaactgctggtcaggtcctttttcacaaaacttctagatactaggaacttgggtaggatggtcctggcccctttgcagccctgacgacccccattgtgccatctttgtcttatttctctttagcctcattcaggtaggcccaggagcaactctggatgtatgctacttctctcggcttccaagcagggaagaaatactagacttcccttcttacagaagcacctaactttataagtgattctctcggagcccctctcatgagcctttcatcggtccccaaccgagacagcccagcgagggtgggatggggaaggaatgggtgtcagcacagctgattctacagcctcttagagctctctggaaagttggagagccccaattcctgcagctcttttgaatatgagtgtcttaacaaggtcaccttaggccaacaacttttgcttctctctgttgtcgtttttactaaaaataaaatagaaaaagaaataatagaaaggtaaaaataatctcagccctcttctatttcagccctgatacctcctagcgatatcatgttgggctcgtaaacctcattttcttgattaataaaattaggataacactatttaaatacgtaaaagttgatcagacaaattgggtcattcttgtcatacccaactaaagcagaggcaagaagccaggaagaaaaagcactctgggcacataacattgccctagaaatgtaattctccccaggcctggctactgaaactgtctgttgtaaccggaaaccagttgatctaatagcgactgaaacaacctactatgactctaagactagttttacccaccaccatcattcaccagtcagaactcaccagatcgccaaaactttaccagtcccagtgaactttctctcaaaagaataagtaacatttctccttataaaacctccaaacttctctttgatcttcagacatcctgaagactacccccatgcatatgccctgaattgccattcttgcttcccaaataaaacattttaaatttagagattaatctttctattttatttgactttaacatatactatacacagtattattactgtttcttttagtagaagaacctctcaagaaaataaaagaaaccacagatctctgataaataaaaagcatttactctgcttgttaaatcctagctctagaacagattctgtaagtatgcttccttttaattatgaacataattcatcttgctagagacccgtgactgggcagagcttgcactgggccataagcatttcagtggggtttgtagtttgcttatactgaaaatgcatcctctgaaggcctgtttcaatctgcttcctcattaacctatcattatttctaccctaaatccagtcatttcctgatattctccctttcatgctttctccacctggcccttctggttttatcttattctcctcatcaatggttaccacttccagaaggcaccttgagctagagccaaaatacaggtgaacagtcaggaaccccagaatatttggtagactatgccagcccaggagacctgaaagaaagttgctttagagaaagcgtctcggaagctttaaatgtaaacaataaatggcacttcccaaatgagcccaggctctccggctgtctgcatggatacataattcagaaatatgaaatgtaactccaagacataggttgaagttcagtaagcgtgtgaattccagtacattatcatcttacaaataacgaaggacaaagctaggagtaaaaaagaactcgaaaattcaagatttctaaaagggcgttcccctagataatggcatacaaaaataactaaaatgccttgactccaccactataatttatagagcagatctcactatctagataatgcgataattgttacacatcaataatcataaatagaaatgaactgatagtatgtcttagctgaatcttttctgcaaattgactgcctggaaacgataggaagccagcagcaaggaagaatttgaaaaatagaggatagaaatcacaggcagcactactcctgttattcctatggcacactgcaaagccttctgctacaggaatgatttaaaagaaatagcagttgtagaaaaaggaagggtggggggactccattgtggaatgtactttcaattttgttttctcatcacgagcactgtgtaccttgtggtcgtcaacacacatcactgattttaaagtagtgtctggtaaggtcttaaagaaatcttagtccgagctaagataagaaaatggaattgaacaaaaggattattttcataaattagttttccactttaaaagagtctagcattgtggttaaaaccagctaaaaatggcattcatttgttaggcagccagtagcagacaattagagctgtcagtggaacagtctaaacactcctgagatcatcaaagggttggagttgaacagctgggggtattgctaataaaaagagagatgcgtggagacagcatccctccggttttcaggacacccaggaatgcaaaagtaagtgcatccaaaaatcgagccgactttgacaagattgtgacaaaggacgggtcagttgatcacctagttcagaaactgggagtgtgtccaggatgctgggagcctgagaacctctcttcttttgccaaattgcccagtctgctgggggcttggtgcagaaatggagcttctcattgtcccatttctctgtgaagtcaagagaattcagatgagaggaggcatgcacattctccctccatggactttgagcacaatattgtagcatctctctggctttataggactttcccaggggtagctggttggaaaccgggatttgtgggaaagttctagttactgtgtctggaaagagggagatgttctgtaacactggaaataaattggtaggatttcaaaacccttcaagatagcaggaattcgacataagagaaatatgtagtaacacagaatccagaatccaatatatttctagcagaaaaaaagtgtatatagatatatacacatttttattgaatgtgtatattgaagggttttgctatatatatctccaaagttctcgtttcctcagaccctcatggattatgagaaattttgctcttagagggcagcaaaagacaatgcatgtgtatttcccagccataaaactctctgtgctcccctctacccactctgacattctggcctctagaagagtaacatggccatcctccaaagccaaaaaatggaaataagtagccagatgtggaagctctcacccgagtatggcactctcggtgccaggctaaagagcacctgggaatgatgagggacagcctgaagctcaggccaaacaaaagccaaacaatgtcaagaaatggagcaaggccaagagtggaaggcgggtgcccaggagacccctgggcccagctcagtgacgggagatgctgcccatggatttcaccccaaaatgtcactagcgtgattgtgcaaagccagaagttaatgttgaaagccttctccttgcctgagggaccagatgaggatgagggagcagaggcagtggggaattgtctctgttctcctgcatgtggctcaaagacctctgtttctgtctttctcagcttggtttctctcatccgaggccaagtagtaactacagatggaactcccctggtcggtgtgaacgtgtcttttgtcaagtacccaaaatacggctacaccatcacccgccaggatggcacgtgagtagctttgtggggctcggacctactcaggaccacacgtgtgtgcaaagggacagacggtgctgttggcttggaaccacaggattccccctggtggactggaatgtccaccaggcctgtcccctagtgaggattcccccaaagacatttcatgctttttgatgtgacatcaaaaacagaaaataaataggaaagccagcttacctagtacagctcacagccacctcgtttttttaatgtcaggtcaatgcacgtgtgtgtgtgtgtgtgtgtgtgtgtgtgtgtgtgtgtgtgtgtgtgtgtgtgtgtgtgttggggtgggggcaggttctagaaaaagaagggaaggtagctcttagaaacgaactcctgttttaaatcaaaggcagtgcagggtgacaggaatccacatgacatagtgtcctgtggtgatccccttctgctttcatctgtggctttaggagttgtgttgttttcgctactgtttggagggggtggcgtgtaatcagagaagtctaattaaatacatttagcagtcaccctgctgtgtgaaggaggcaacctttccctattatcttctgattggaaacgtgtacccgttcagcctccatcaagatgaaagctctgtcatttccttaatccatttgggcatagagtagaaatttaaagaagaagaaaagaaatctatgggagggagaaaacactaacttactctgggctaaaaaacacacagacacacacacaattatggcattctgttttaaatgaaaagggaactgtggctaccaatctgatccaacactctttctgtaaaatgcactctggaaaatcttggatgtatcacagaagtaagaacagggattttttacctttctctggcgaagagtctggccttattttctttcttgccctaaggtagccttataggcagtttcaacaattaccagcccccaggagccctaacttcactctcccacctctgaaacccaaacaaggagtctaaggattcatatcaaatcttcaatattcatgaaatttctgatatctcactcatacatttctgtagccaaatctaattattttaaagcacaggatggcagatgtgtgccttgcaaaattactctggcccttgttcgttcttagaagccggtggggtttttttgtttgtttgtttgtttttgagacggagtctcactcttcttgcccaggctggagtgcaatggcgcaatctcggctcactgcaacctccgcctcctgagttcaagtgattctcctgcctcagcctcccgagtagctgggattacaggcacccgccaccacgcccagctaatttttgtatttttagtagagacggggtttcaccatgttggccaggctggtctcgaactcctaacctcaagtgatccatccaccttggcctcccaaagttctgggattacaggcgtgagccaccgcccccaggccagtgttcttgaagaactgacatccttgagtcaattgctgtgaagtcccatgaaacaacagaaggagacatttctgagtccctgatgtgctattttccctttcttctgcatccctctccactgcttcctgagtaattatgccccaagtccacttcccagatcatctatccaacctcctggatcagttactcttcagcttgttcaggttgtaaagctgtggaagtcacaggacgtgcttgagaatgctctgaggaatcccacaatctgttgcatagtggcgtgtgccccaaatattcatgttgattctaccgtgccaactaggaacaattttacttcaagacatttgactctcttctgtactctatgcagaactatccccagcagtgtgcatgcccgataaataagcacataaataaagtaattaataagtaaactattgtactgtacatgctctgatatttgtcttaatattcctatgctccctgttcattcacatttactaaaaaagaccaaatgtgttactaagattggatgaaaccagcgagtcaagtatatttttaccgagtttttactgtgatccaagtactcttagctgctggggattctgaagggagcaagacagacagcaccactgccctcaaagagatgaaattctaaggccaggtgcagtggctcacatctgtaatcccagcaccttgggaggcagaggcaggcggatcacgaagtcaggagatggagaccatcctggttaacagggtgaaaccccatctctactaaaaatacaaaaagttagccaggcatcgtggcaggcgcctgtaattccagctacttgggaggctaaggcaggagaatcacttgaacccaggaggtggaggttgcaataagcccaaatcatgccactgcgctccagcctgggccccagagcgagactccatcccaaaaaaaaaaaaaaaaaaagatgaaattctagaggggaggtaaaataaagcttaacattaggacacctctctgttaacgtccttgttttctgttaattgggaaagagctacctttattctactttacaggtaatacacctccatccagctcttaagaaacgaacagaaatatagcttaagaaccattggcaaagaaatcagccacagagcagaggctgattagaagaatgctgtaatgagctcctctctgtgtcctaacgtagtatcgttataattacactatttattgaacattctattagcctaggactgtgctaagtgctttacacgagtggccagcaaacattttctataaagggccagagagtaaacagtttaggctttgctggccatgtggcttctcaccaacaactcagctctgccattatagcagggaagcagcctaaaagatacataaacaaatgggtgtaactgtatgccaatgaaccctttttttttttttttttttttttttgagacagagtctcactctatcacccaggctggagtacagtggcgcaatctcggcccactgcaacctccacctcccaggttcaagcaattctcctgccttggcctcctgagtagctgagactacaggcacccaccaccatgcctggctaatttttatatttttagcagagacagggtttcaccatattggccaggctggtcttgaactactgacctcaagtgatgcactcacctcagcctcacaaagtgctgggattacaggcgtaagccaccatgccctgcccaataaaatttatttaccaaaacaggtggtgggccggatttagctcataggtcatagtttgttgagctctgctctacactcatgatgtttcactcttagtcatgccatgtgtattggtgtaattattcccattttacagatgaagaaacttgggctgagagagggttagtaacttgcccattgccactcagctagtaagtgatagagtttgggttccagccccacctgtctgcctccaaagcccatggtctcctctgtgctctgcccatcgcatggccatcaggggaggaggagaggcatcctgccttgtctaaaagtgagtctaccccctcatcagctcatttactccctctccaggttcgacctgatcgcaaatggaggtgcttccttgactctacactttgagcgagccccgttcatgagccaggagcgcactgtgtggctgccgtggaacagcttttacgccatggacaccctggtgatgaagaccgaggagaactccatccccagctgtgacctcagtggctttgtccggcctgatccaatcatcatctcctccccactgtccaccttctttagtgctgcccctgggcagaatcccatcgtgcctgagacccaggtaggaatggcagtgccagggcgggactctcaggacttccctaacgaaaaccaactggacactgcctctccccgagtggaccagaaactaatattgtaggggagtaaaaaaagtgggagcataataaaatttatagccaccagagatgaaagtttgaatccctcttggctgttctggatgtctgcagatagtcgttcaagactttggcagtcatcagagcttttaataaaataaaaacaacatacatatgtgcaacccacctgcaaattgctttttgttcctgttagtcacagagatacatggtaagaggcgctttaatgatctacatcggtgttacgacagagggcatattacattattgcctccctgttgctttatacggattgtcagtggaagttgtaggttcgtataattacagcctctcgtggcctccttgcatgcagctagcaataaagcctgctgttcttatttacatcttttgccaacagtgtggctttttaaaaagaaacacaacagtgaccaagaataattattaatccaaaaatcataacctcagccccatcactctatggtggaagataaagtttttgttgttgttgtttttctttctcagtggtggtaagtggttcttgcacccacataagatgtgatgcctcagtgagggacatagcagacagacagtatcggggttacagtttacctgcacaggtgtgttttaggtgtgtgtctgccatgtgtttcctctccaggttcttcatgaagaaatcgagctccctggttccaatgtgaaacttcgctatctgagctctagaactgcagggtacaagtcactgctgaagatcaccatgacccagtccacagtgcccctgaacctcattagggttcacctgatggtggctgtcgaggggcatctcttccagaagtcattccaggcttctcccaacctggcctacaccttcatctgggacaagacagatgcgtatggccaaagggtgtatggactctcagatgctgttggtatgttttggtttcaaccacttattgatcaatggatttagtcatgtgttaattcgacccatatttattgagttccgaggatatgccaagcaccatttcagtagataaggacacgatggccaagaagacagacaagattcctcttccacggggtttacattttggtgaggtattgagataataaatacaagtgaaacaaagaaatatcaagcaagataggtgctaataagaaaataaaagtaaatgatatatattggggaggagggacaactgtggtgagcatttagggaaggctcctctgcagggcagcatttaagcagagactaatgacaagaaggaaccacatgaaaatcagaagaagaggatttcaggcagagagaagagcagggtgtgtttgacagacagagagaaggccagtgtagctggagtgtagtggaaaagaaaatattcaagatgttgggagagaggtggtcaggggctagttcattttccagacggagcacttgtaaatggcacagaatgaccctgaataatcagaaaacagggtttgaggagatcagaaagtcacatgctatgttccagggctttgccttttgaaggaatcacgattccctccttatgaaagatcttcgtaacagaagtgtcctaccgttatcagagttgtgagctgtagattaatcttaacctaccttgtatcttcctacttgtggaaagctatctaggaattaattaaaatccagaatcctgtgttctcttcaccaatagtcgtgtgtattttaaaaactgtaaagataagttaccaaagtaggaaactagcaacctcagaaattttcactataattggtagccaatgtgtatcagacgttccttttgtgtagagagaattgtgttaaatcttttgttgggtaacctctcaataacccctcaagtaggcaccctcataaccccattgtgcatatggggcaggagggagagggtaagaaagttgcccaagatcatgccactaacaggtcacacctgctcagaatacagccctgggggtctgctccatcagtgagtggtgttaacttaaccaaggtagtaagaagttcccagagtaactagtgtatttaatatacaacactggctaatcaaatatatgtatatttgtgtgtgtgtgtatatatatatacacacatacatatatacagatatatatatgtatatatgcacatatatatacatatacatatatctgtagctaataccaaaatgacagccaatattaaaaagtagactaaatattgtaattcacttccatacactccagctcctgccattatcaactcatgatgaggcctgtttttccatacccccgtctactcccctttctcctgtatttttctgaagcaagccctagacgtcacatcatttcacctgtaatatttaagaatgtatctctaaaaacataaaaacaatatcatcacaacaaaaaaacacaataattccctaatgtcatcacatagcccatcattgttcagtatttcaattgcctgacaaataccataaactatcaatactttgtctcaggatcccattaagatccaccttttgcaattggttgatttcttttaaactgtttttaaagttctttcatctttccttatctttctctctctctctaacctttataatttatttgttgaagaaattgggttgtacaatttcccatatagcgtggttggttggttggttgattaattggttggttctcgaattgcataattacggctatttggcctgttcctctgttccctatatctcctgaccattgatagttgggttttgaagctttctcaggttcaggtttgattttttgattttttgttttggcagaacaacttgataggtgtggctgtgtccttccatcaagaggcacctaaagtcaagttgtgtattttttagagatttcagtagccattgatgctcattgcctagtctgtctggccattagggattgcaaaatgatagtttaattctgtacttccttcctcatctattagctgaaatacttctatatagagatgctttctccttaactacttggttatttaaagtacagttcaaataggaaagaatagataaatgcttgattatttccctttatttactagttttcaatataatgagttgattcattgtccaggggtggcaaattaatgtttcttaaataccattatgaactcatggactgaaatgcatccagtatgtttcaatccattgaagttattattctcactaatggccaaatggccccatctttggtcagtgggcaccttttcaagctcattcccaaatccttttgacatgaccctaatagattttgattccttccttgctatctagtatgataaagtaggctggtgtcattgtgttcatttcttgctccagccatttcttccagaagccctgattccttttaatgagaaataatatatcaaggccacaagccaggcactagcaattctctttgctgctggggctggtcatttggcctttgtttcttggcattttcagaggacaagctaggaaatacatagagttttttaaagataaaaatgcatcctccattcatattgacacttctatatctcaggaattttttaaagctgcagagaatccccaaaggtgacacacatagttaagagtttaatgcagtaggaacagcaataatagcaatgcctcatatttctagagcagcattccaattaaaaatgtatggcatctcagcacttcatctcatctctccttaccacatctgtctgagaaattgaggcttcacttaacccattttacacgtggggaaaatggagccccaaggaagcgtgagcttggagccaagctaggactaatgtccttcatttccacctctctctcccatttgtccatgtggcaaatgcaggatttttaaaaacagcttttggattctgttccccattgaatccccatgtaactggcaggctgtactcctgctggtgcctgcctctcctggcactttctggaatcctgagtgaacacaccaagtgtcttaatttacacaagctattgctcccagaatctccatgtcaatgagccagtacgatcccaaagggctttctcctagtaagtggaaataaataacacaaaatataataaatgcatgctgtgaacagcaggctgagagaagcagtctcctgtccatctctaaaggggaattgtgtcaggttttcaaatgattcctttcctccctccatgtcaccagggtcatttttgaaagccagtcgttcattggaaaggtctttccattcccacagagtactactgtgtaaagtttcaaggttgagttcagctcaaaaatctgaatttaatattgtagcatcacaaggagaaaagcaatcagcctgcctctttgagtgagtttttggaacagaatctgtattactgcgaacacgtgcttctcattcttgctacagagctctggagtaatcaagtaaactctctcttttctctcactctgccccaccccttttatctttcagtgtctgtcgggtttgaatatgagacctgtcccagtctaattctctgggagaaaaggacagccctccttcagggattcgagctggacccctccaacctcggtggctggtccctagacaaacaccacatcctcaatgttaaaagtggtacgtgaacacatcttctttcccaaatacagccttgccacttctctggaaccttgtctctagcctcagcatttaagtgatcacacctccccttccctgggtcattttttcatcaagtgcccaaaatatgcatggattttcctaccttcttcttttattatttttttatttaaatatttaaaatatttattatttttttaatagagacagggtcttgctctgtcatccagagtgtatgtgccatcatagctcactgcaacctcgacttcccgggctcaaatgatcctcctgccccagcctaccaggaagctgggattacaagcttctttggttatcctcccaagtgtcattttacccaatgccacagcatttggggtccacctctcccactgcagctctctccacattgtgaagaagttggagagctccccgagcactgaagattcctaatttgtctcttcccctccctcccagttggccaatacacatgtcttccccagagggcttcagtaacccctcccattctccaacccccacaggaatcctacacaaaggcactggggaaaaccagttcctgacccagcagcctgccatcatcaccagcatcatgggcaatggtcgccgccggagcatttcctgtcccagctgcaacggccttgctgaaggcaacaagctgctggccccagtggctctggctgttggaatcgatgggagcctctatgtgggtgacttcaattacatccgacgcatctttccctctcgaaatgtgaccagcatcttggagttacggtaaatggcctcacaggcaaccttcttttgctctcttgccccccataactcctgagtttgatcgggtaactggggctgcatttgggattctccagagaagatatagtccttgtgatccaaaacctaggcccagaatcaaataaggaggtgggaaaaatgctttgtgtatctgtgaaaaaccatacacagatttgatacaatagtcaacaactgacttacagacaaggcttttagtctccagactggagaacaaccaaagcatcttttatttttaagaagctctgtagacacacatcaaagtttgagaaccactaatgttcatttgctaattcaaaatgttgtattgagcacctctatctggctagctctctataaagtctctggatctttgcacattcactaggatagcacttcctttactgcataggctttgctgtgtaatttctggccagcctaggtagattcctcctgcccattgctggctactaagtctgaaagccagacccctctgtgctgggaaaaaactgacccctaaaagctcttagacatgctcttgccaggaaagttgatttcagaccctcaactcagaggagatctgtaatcaaagagagaaataagatctataagaaaggggcaaaatttcattcaacaaatatttggtgaatgtataccatgtcccaggagctttctggctagaaaaaaaaaaaaagtggggtcaaacaaagcacctgttgttgtgtttgtgtttgtgttctggtaaggagccacagacaaaatcatgtgggcaaataaaaaataataatttcctgtatccttaattgctttaggggaaatataacagagtaagaaacaggaactgggcgacagggagggtacatggatgaggaggctacgtaaggtgaattagttggagaaacctcttgtactaggtcacgtttggctaggatctgagtgatagacgtcagccatggggagatctggggaaaagcactcaggcaaagagaagttgttcaaaagccctataccagccaataacctggctgatttaaggactgatagaagcccaatgtggcaggagggtggtgagctcagggaagggtacctcaatgcatcagagtctcactaaccacttagacaagagtacattgtattgcaatgaacaagcaatggaggttgaagtagggagtggggtggaattgatatgatctgatttgcatttttttaaagatgactctggctattgtgtatggagtagattgtaggactgcaggagtggaggcaggaaaacccatagggaagctgcagcgattgtccaggattggggcaatggtgatttgaaccagaatggtagcagaagaaagaggagtgctccaattagaatatattttcgaggtaaatctgataggatttgctgatggatcaggtataaggaacgaacaaagacagaaacgaatcaagggccctgcctaggattttggcctgacaactgagtggatgatggcatcttctgaagcagcctcagcctctctcctagaaggaactgcaggttgcacttgcatttgagagtctctgaggccctgtctgggagaaatatcagtggcctgcccccagcaactgctgctgagcattcttgggagccaagagtgtgccagggactgagaggagtaaaaagaggaaaaaacaagagcttcaccctgaggaggctgcagcctcagtgatccagtgggcatttattgagcatggaggcgagccaggcatgtactgggctctgcggtacagaaggggatgaaacacaggctcagaaaacacccatgtgagcatgagaggtggcacctggggaagtcagtgcagttcaagctgagctgaagggccaaaggccaaccattatggagatccagagacaggcctggggtggaggagggggcatggtaaccagagggtgaacaatgagagcaagaaggacacacgtgggaagaggccaggtagccctcacgctgccaaactggcgatcagacaaatcgcttttcctagacttgcccatccatatagattcccttcccaagatgttgtttttgtttgctttttttaatcctaggaaagcctccttttctcaggcaccctgtgggcaacagagaaccatgggagaagacagggtagggtggaggtagcactgtgctttgccattgcctataggaaaaaagggtggaaatatttcatctggcccttgtaatcttccacatcaggcccttcctcctttgtcactgttcttcctgctcagaggctaatcagccctcacctggtacagtctcacctccaaaccttcactcttgctgcttgctctgcttaaaataccttctctacctaatctaccacatcacatccacctgcaaggcccagtgtcagggccccctcttccacgtagcctgatctccccagcagaaaccattgtcacccacctctgagtcactacaccctctgatcctccattagagttgatgccactgaatgccttgttgtcattatctccatgtaagtctttagggcctaagcatgtgaacttctgcagcagaccccttggtcatctttgtccttttaagtactagaggaggtcctggcccacactaggtgctcaagataggttgcttaaattaaagaaaacacagacccgtctcctccctcttgttggagttggtccctggttccacgtctctcgagttgtggaggccacaacgtcaatggtgcaagctaagggcccaatcagaacaagtcacgccatgcccacgtggtgacattaggacagcttgaggcggaatgtggctcccagtttccctcgacagccgtgtgattcttttttctaactgcctttagacttgttcttactttcatcagccaggtacccagagccgattagaagttaagcttttataagaacactggttttattcttcttttcttcccactacatacctgaaaacaaagggctgtcaatcccctctcttcaaaacagcaaccagcagagggagggagggggaggaagagacctgtcttgcttatgtcttttctccattgtaagttggcagctgaatgattccatttcgggagtcagtgcccatccctatctcgcttacccaccccggagctgagcctctgaattgggatcctattgaaatgtttccatggttctctcactatccttcccccttcctccttcctttgtctctccaaaacatgcagggacaagttctatacacttaaataacttctgatgctacaaagagccttctcttaggtaaaatggttatcacctgcgtgctctgattaggcagacatttaggacatttccatactcctgtcccatagaagcctgatatcccatctttactagtccagttcccactgcccattccaagtggtctttggaaaacctaaagccctggagcagagtaaatttgtcagtcactaacattatagggggaatttctctcatagcaaaatcttttctccctccccagttttagaacatcttaggaattagacctcaatatgaggcagtaaattatacgggatgggacggtatctctctcccttttcttagcttagctccttttaataaacataagaatctcacaccttacataatttttgaaatttccatttttttattttttaaacataaaataatattatgatattaaacatgcttttttccaactaaaccgcttctccatgctgacattctgatggtgctttcagcatggagtcaagggcaccaatcattagaggagaccttcagagaagggacatgtccaacccagatatgttagtaccgggcggggggaaagtgggagcctgggaaggcgggcaaagccagcagacattggaaggaagcgtcagcaaggacaagctctgcctgagagtttcagccaggacagaccctgcttgatgaccaggtagactgttagggaagactatgtggttccacttaaagaacggaaatgcttttcctatgtggtcaggctttgaaaatgggggtcaggaaagaaaagtcatgaagcactcaatcccgaataaaagtaaaaacaatgtccccataaaattttggagactgattggcactattttcaaagtctttttaccaagggtagaacccagattttatgaagcctaagactaatacaatttcagaggctctatctaagaagaaaaaactaaaattataaatatgaaatgagaaatgaaatggaatatttaggatgagaaaggaaacccaaaaaattgcaaagtttagaaaagccaattctatcacaaacatcacaaaatccacacaaataacctaatatttttattaattaactcctgtaacacttccatgatacatgtttttctatactttttggctgcatatctttgatcatcttttaatatcacagttattttgtaatttcattatctatagaaagaacagagggattttcagtctttagtagggctgatcaaaattagtttcatattattgataaattagaaaagtttcttttgtgttcataattgattattggtgatgtgtaaatcattagagttataaaattggggaaaatctttatcaagtttcctttttaatatctctgggcatttcagattttcctgtggagtgaataatctaaatagtctttgaaatgatgctcattaaccagtttgtcattgatgtccttgtattagtgaaatatgaattctacatggggacttttactctctgcagtgatgctagacaaatcaacattgtagggcaggagcattcctcaaagacattcctattcaagaatggctagcaaccatttaactgggtgctaaagggactgcaagccacatgagctcatcctcctgaaactaaaccaaatgcaccccaagtcaacttctctttagttagaacaacaacaacaaaacaaccctgtggctactccaagtgcaccttcctcaaggggaaaatgtggcacagagagagttggaatgaaaaaagacaacagtctccactgattacagatttgtaattctgagcagaacatgagggattggagttagtccaaggcaaagtctgcccagcactaagggaagcagcctcattccttgcttccttcactcaagaaactgtttttccagccctaactctctcctgggccttctactaagtatctgcaattcagagatgactgagtcatgtcctattcacaaagaactgagggggacaggcacacaaacataaatcaccagacagcatgatggcagctctgagagacgggctgagaatgccacaagagaccctgaaggcttcccagagacatcattgagaccctgcagtgtgaagaagagctaatccatctcaattctcccatctgaaacaccactttttcctcaaagggctcacctaaagagtctgtggtattaaaaccatgcacacaaagcctaggcctatcccttgtaagtaggacatctgtacccagctgcatagactgactcggtgatgctgttattctggtttgttgcctgctaagcacccagcctgctgtgatcctggactggaatagcagtgacctcagcctttctccaaagctcatattcgtatgatcattcaggctctacactctccaacaacttgatccttcaccccgcccttctccttcccccaacatagatcttatattaatcaactgaaagcagatgttcttaggaaagaagtaggtcaggcctgcagacccaaatcccatccagtatttttacaaaatcttgactttaaaaagtgaaattgatattgcaataattaagagccaaatatgactaccactggtggcagataacatttcactttcattaagcaatataaaatagacgcgagaattcccggctgccaccctgacacaccaggctttgcagaatgaatcttaaattgcactatgtcagtcagagctcagaagttatcagcatcatttaattaactttttttttttttttgcaaaaactaacacattggaataaaatataaaaacgtaatccctgtgcaaacccaccactaatgatggcccccggcagaggactgagctacacctgagcagaaatcagggcattaaactctctttgtcccttccctgaagcctttctcctcaactgaaagggaaagaggggtcaggggtttcttccactttggcctagaagcctcgagaatgggagtggttctccttaattgagaccttggcatcttctcgtctctggcacgtcaattttcagccacaatttcctattgaaattgaatgtatttcttcccttaaaacaacaacaaaatttttactagttctctgataagaaatgataactggagtctttgactccaattccaagaggatattattacctataaatttcatttatggacgttattgcaatattggacgttaccttttagaaagaatgcatatttggggtcccaccccaagttaaaaggagacaatgaaggtgacatggagcagggaaaggaagtggttcagagtctcagggttcaacagcctttgcccaactgcagtaggctgtgagcagggtctctctcttgggtggtactcattctaccctgaaatgcaccaatggcaaataggtggtacatgtgtcaccatcctccctcccacactcagaggggacattgcaagtgagtcacagtactctttatacctgatattaaatttggtttcaaaatccttctaccaccacactcccagtggccattactggccaacacatgttggcacccaagatataacctgtttgccatcccttccttagtcaggaggcatatttcacctgttgccacctctgtcttgtgacagccacattgctgatgagagaattcaagctttcttgtccagattgtccaatgtctgggaggagtccaaaatcaggggcacttctcaagctattgagccaggagttgtcagttacaggggaaaaaagaaaaagactgccttttttgggcccctttatacaagaaacaaaaatgttatgtttgctttatcatcaattcttctgctaactgtttgttcttttttcctttctgttttctttctataaagaaataaagagtttaaacataggtaagatgaagaactctttcccatataatttgatatggttcgtttgcttccttgtgtttgctttttttgttttgtgcttcttgtgtaatgttgtatatttttatgtaccaaatatagtaacttttttatgtgctaattgtgtgttgtggatatgataagctttagcaattatgaaatgcagtcaaaaagcaaccaaataagctgacagtaattagaatttccgggagattcaagtgcaagataatgaaccctcagcgaacttctatcccgactgctcagtgcggtccataattgggctaaacagttgaggcaaactcctggcttttgtaaatgctggactgggttcacaaaagctttaatgaactggaaacgggttaaaaactcattttcaactcattaatgattttttcccctggatatatggtcatctttaaaaaaaaaaaaaagttaattgccaatctgctgatcagaatgaatccaacagtcagatgcattgagaattttcatggagtaaaatcacttttgaatagtttgaaggatggagaccaagtattctttgtcaaaaccgccttggtcattacattgatccaaggttatcatttaaaaccacactagtacaattcacagataaagtgtaaaacacacatacacgtgcattcacacatgaaccacactgaaatgaagatagtgtgagctttcttaaggaaaaatgaccttatttttattcagaagaagagaaaaaacaaagcaatctgtaccactactcaacggaatgcttctgctcactttttgaaatgaaacatggacagctctccttcatgatattaggtcaaaattagacaaaaagtagagtcaaattgcacaagatcataacagtcagtggaaaggccatgcattgacaaagtcctctgtcttcttctcaggcaccccaaaattggcctgttataggcaccccatttgagccaaattttaaaaatgagtagaaatgccctggaaggacatttttccaggaaattcaccaacctcatgtgatctttgccacagccacaggtatggaggcatggctgtccctctgacgtgagtttctctgcaagcatcttggtgaaaacaggtatgagaccatggagaagaatggtctccctaagcaagaactgacctcacacccaccactgcctgctcttctgccagagcttttgaaaagcctcctcaaatcaggctccctagaaagtccaaaattaattatctctctcataggtaggcacagatgtgcaatgccttgatccttctgttgataatgccagctactgttcattcagtaacagagtgcagcatctaattaaaaaatggcatgaatttttccctttctgccctaatttgttttgcatatatggatagtctctaatgacttaatagccaaaaaagaagaagaaaagaggaaaggaaaggaatgaaaccaggtagtctacgctttagttatctgggctggaatttcagaaaaactttgacttctagttcagggatgtgtcttaatagcaacctgaagagaaacgggaatgaaagaccatctcaactccacccagattgttcctaaaaatagcttcctagttcttttcttttttttccttaaatcagagaagaccccaaatggtggtgttttaattagtaatttactagctaatgtcaacaggacaaatgcatccaatgctgtcatctctctcaccttccctccacctctcccagcccctgtcttcccatcaccccaaagtaaaattgaaaaataataggaaaaggctggttgcatggtttatacctataatcccagcacttagggaagccaaggcaggaggatctcttgaggccaggagtttgagatcagcctgggcaacatagtgagaccccatctctaccaaaaaaaaaaaaaggtttttaattagccaggcatggtggcatgcacctgtagtttcaactactcaggaggctgaggcgggaggaccacttcagcccagggatttcaggctgcagtgagctagaattgtgccactgctctccaatgagaccctgtctctgagaaaaataaaataaaatagcaggggaaaataaagggggcctgtgctcatttcaaaacctagtctaccacactgaggcagaaaggcaattactgtttgcatcctagaggtgctgattgtaataaccagtataggaataacatgagcacctattctggtcccaacctcaaaccagtgacaggcactacaaagggaagaactgcagggttttgagccagaaggaacattagcaatatccagtatgattgatttaatccctccagcccctgcaaaaaagctaagacctgacacagtcaaatgacttaaccaaggtcaccaccagctgggtcagaattgagtttagagtttcctgtgttttagtcctgagccacttctacaagtcttactctgtcctagttagcctcacacagggcagccagacacatggcaggggaagcagcccaggtctcagaggctcacgccttcctaatacacttcacacacacacaaaggtattaatcccctagtgtggctgggagccctggcagaccgtggctcacgcctgtgacctcactgttacctagatttgaaaagtgcatctcctgtctcagtaattcagattccagacacagtaccagcaagatacccacatttctttacactaaatgccaactttatccatgtccacactgaagagcagtaaagaagcaagctctgagcctggagattgggggcggttatggggtgcttcccatgataaaattaggaaaactccaggtcaccctggtattaatggcctagtaccctggaagcataggttaaaatgagaacattgtcacatggaagtgttcctctatcccacttgagaatacactaagccctcaaggggaaattaaggagactgcacacacatggactgtagatggtcttgaataactatcctgcttacaaaaacaggatcggagtgggagctctcgtactggctaaatgaagcaacagttgtttagcatggtgggaaatgaattttctaatagcataagaagcataagtccaattagaagtagctaagaaccatgatgtgttagaacactgagtttgatgttagattctttccagttcactaaagtggaaagacactagagaaggtaagcgtcttgctaggatttttgtcattcctttgatctaggaggccagctccatagccccctcctcatttctctttgtgcttcttctactaaagcaacaacccagcacacaagtactacttggcagtggaccccgtgtccggctcgctctacgtgtccgacaccaacagcaggagaatctaccgcgtcaagtctctgagtggaaccaaagacctggctgggaattcggaagttgtggcagggacgggagagcagtgtctaccctttgatgaagcccgctgcggggatggagggaaggccatagatgcaaccctgatgagcccgagaggtaaaggacatcaaggaagagtctcccgccccagataaagctttgccaccagcttggctttcttctcatcagaacttaactaagtccagcagtccaaaacacagctttccctgtaatcatttaactcagatagattgctttggtgtgtggatgggtgtttaaaaagaaaaccagtcatgaggtcaggagatggagactatcctggctaacatggtgaaaccccatctctactaaaaattacaaaaaattagccgggcgtggcggtgggcgcctgtagtcccagctactcaggaggctgaggcaggagaatggcgtgaacccgggaggcggagcttgcagtgagccgagatcgcgccactgcactccagcctgggcaacagagcgagactccgtctcaaaaaagaaaaagaaaaccttatttatttatttgaagaaaactttatcatgcacataggctccaagtggaaagtgaaggggattgcgcctggagatttctgactgctgccagtcaggagaatcagaggaaatcctggctccatgggccacagtgccagctgtgtgggctggagacagaacaaagcccagcgaggggcctctggccacgcccagacttccgtggtagacagcaaatgtgtatgaagtcgaaagtgcagtgcctcacatgttgtaaatgcccaataaatggtagtaattaagaatgggtataatttccaggggtccaggatggaggagttctgggaacccatgggtctctatttgaaaaggactaaaaatacttaacattaaggagcagtcatctgagagtccaattcctgttagcatttttagctactgtgaaagcagcagggcagcatggattaaggaggcaaagccttgtacttgggcactggggcaaagacacaaaataaatagaagccatatctgtgcctttccagccctgctgcaacaggggaatgctaggccccagtgtccccctggggcattgaagtgctgattggagtcaagcttaactgggaatacttcctgaagcatacaccttgaattaggagtttgtaactacaagaatcatcatttctcagcattactgctgcaatcggttgtgaagtatattcaagtaacttactactaataatgtttagggtaatgaacttaggaaataacttcttttctaaggagagcagatgcaaagttatttcctgcttcattcatttgcggccttggttcatttgcagtccaaggagcatgctttcgtcagttgcagggaagaaggtggtgatatagccagcaccctaggaactatacaaatcccagcacagtgcccatgggaaaggatcttgcgttagaaggctgagaaccactgctctgagggtactaatcaattccagtaaggtctctggtctaagcagagtgctcagcaaggcatctcatctcccacctccaccccgcaatcctacacctttccaagagataaatccacaccgcttgtcttgctcaggtattgcagtagacaagaatgggctcatgtactttgtcgatgccaccatgatccggaaggttgaccagaatggaatcatctccaccctgctgggctccaatgacctcactgccgtccggccgctgagctgtgattccagcatggatgtagcccaggtgagactctttcttatttctcttcactaagcaacacctgccccttggcctgaggttcttacctgtttcctgtttggtttggaagtggaatgggagggagagatacagatacagatcacggggttgtttggagaaagcctgagatgagctaaacagtaagatggagtggaaaatgtcagataggtatgagagagagagagagagcaagagagagggaaaactgttgagaaaagtggaactggtgacacactccagccgtggcagattacagggtagaagctgctctgtaattacctcccttctccatcattattgcaggtttgagaatgtactgtacagtgttatatgtcaatcagaacttcccctttaatctgaaatgactgcatcctcactatataaacctttactttgtgcagtagtaactagagcagagccctctacaatatcacccaaagtgtgtgtttagtttgggctgttagagaggcagagaacagaggctcactcaaatatacagcatttgttctcagacagcctggaatatacgttcagcctttctataacggccttttcaacccttggcgagcctcataaatttcagctcaagttccacaacagacaacttgctactgagatttttatttcaaattccatagaggaaggatgcgttcggttccgtttattttttaaagcagacactcaagttgtagtttgctggagagcctgcactttggctccccttggatcagagccatcttccaagtcacatggctcctttttgtgaattagatacaggtgccgcctctaaatgtacatagcttccgtaggcgtctgcttggagagcagagtatgggctggatggcatggtctcttgtgcagtgaactacctgtgcaaccatatgtaacagctctgatgctggtccagccatctggagctgagaagcagcatcataggtagagctgatggcctgttctggtcatggcaggtgacacggtagaaaatatatattatattatctcttcttctccatcacacccactcatcatgggcaatgagcagctggttcaatgaagagcatttctaatacaatgtgttattaaaaagctgtcttttttcctagatatataaaaccagtaagtgccgtacggttaaacgttggacatattaaaggctgttctttaatctgataccacgtcatccacaggttcgtctggagtggccaacagaccttgctgtcaatcccatggataactccttgtatgttctagagaacaatgtcatccttcgaatcaccgagaaccaccaagtcagcatcattgcgggacgccccatgcactgccaagttcctggcattgactactcactcagcaaactagccattcactctgccctggagtcagccagtgccattgccatttctcacactggggtcctctacatcactgagacagatgagaagaagattaaccgtctacgccaggtaacaaccaacggggagatctgccttttagctggggcagcctcggactgcgactgcaaaaacgatgtcaattgcaactgctattcaggagatgatgcctacgcgactgatgccatcttgaattccccatcatccttagctgtagctccagatggtaccatttacattgcagaccttggaaatattcggatcagggcggtcagcaagaacaagcctgttcttaatgccttcaaccagtatgaggctgcatcccccggagagcaggagttatatgttttcaacgctgatggcatccaccaatacactgtgagcctggtgacaggggagtacttgtacaatttcacatatagtactgacaatgatgtcactgaattgattgacaataatgggaattccctgaagatccgtcgggacagcagtggcatgccccgtcacctgctcatgcctgacaaccagatcatcaccctcaccgtgggcaccaatggaggcctcaaagtcgtgtccacacagaacctggagcttggtctcatgacctatgatggcaacactgggctcctggccaccaagagcgatgaaacaggatggacgactttctatgagtaagtgggtttgtaaagcatctctgaagagcccttcccttgccctagctggcattaggactgggtcgcttgtgtagctttttaaattgctttgtcacgttgtctttctaactttaatgatgtcttatggcctcaagacattcatgtcccctctccctgactctgaaatgatttgctctaatggatctctgatattgagcatcctccctactagagttgggaattcctgttgcctgcttgccgttcaaatttcaggatattggacatgcacagcacctgggaggtaaaatgttgattaactttgctgattattcaagtttgccatgggtgcggaaattagaatctaaaaggcaagatcccagtggggttcctgtaatttgccaataggtccagcaacacacttgattgcacagacaggtagataaactctgaatttcctccttagcagaagcagatcgatacagataaagcattaggtatattaaaagatgcgagagctggtcatatttcccctaacaattatctcatacttaatagtcctgacgcttgttttgcaaaaagctgtttttcctagctcctgcaggcagttcttggtcaaagtgtctgctgctgtaggtactaatggtgggatgctggttggaggaagttactaggcatgattctcccagtggctggctgagactggagcagaatttataaatatctggctctcctaggtgatgaaggagtgtgttaacccctgtgtacttggagtccttgcttgtgttttgtctggatgctgctgctagctcagaatgtagttaagttagggagagttggcacagcaaaaaaaaaaaaaaaaaaaaaaaaagcgggggacaagagggagaacagaaaacctcattgttgatcattcctaaacccggcaatgtttacttcctgtttgtatgccaatggtcttgggagaatgtaaaaggaagctgttgccacctgctggatatttagtgcattgcagaagaattgcttcccctggttctgactttcttctttgggcaactctttctcaagcaccttaacgatgcttgagatttctgaagcatcttaatacccttcaggacactgtagttttgatcaaactttaccagccagtgattctgccctcgagggtaccatccgagtgctgtccttggctctcataccgaattaggctgaagctatacactcacccaaacacctccgagattttcatcttcctttctgacagtttcaaccaaagacctaatgcatttcagaaacaatttgttggctctcctgaaagagggggaaaaaacatccctctcagggaggccagcctgaactgggcctggtttacagactgtcataaagaagcttgggttcaagtgcatccacagatctgaactctaaaagggaaagtattttccagaaagtgtccctagtttaatgaaaacataggcatgactcgtaattgtgttttaaaatgttcagaagttacattgaaactgaatttttttatcttaatttgataagctgccctttttttcataatgtagataaatccagtgatcacaaattctccattgtggggttcaaatgtatagggttttcttttctacctgaaaagatggtgagttctttttgttttatggcacttttggcacatgatcagccaattggaagacacacagccaacttaaaaatcagacataacttcacctcctgtcagggcagtgtggtcaagaccaacactgcatagccttagccaaaactttagagaaagggtgatgaagaaaaccacacagaggctgtgaggctactagaaaagtctgtcctggtcgggagtgatgcctcatgcctgtaatttctgcactttgggaggctaaggcaggaggatcactggaggccagcagtttgagaccagcctggccaacatggaaaaacctcatctctactgaaaatacaaaagttagccaagtatggtggtgcatacttatagtctcagctacttaggaggcaaaggcatgaaaatcacttgaactcaggaggtggaggttgcagtgagttgagatcacgcagctgtactccagcctgggcgacagagcaacactctgtctcaaaaaaaaaaaagaaaaagaaagaaagaaaatgatttgtccttcagtgagagcttccttagggggattcctctcttcccactctgttacagggggcagagtacaaatccccctataggtgagaagagtggccatatcttttttttctgcatagaacatgaggtacagaagccatttatctgccgtgttgtcacagtgactgtctaaatatggatttgattatccccattttattgataaagaaactgaggctcagagaatcgaagtgactcccctaagaccacacagggagttggtagtgaagcaggactggaatccagatctccaagcccagcgttctttgcattgcacactagcgttgtaaagcagggctatgaatggaatttgtaactccaccttcagactccacatgggaactgtccctgaatttttgggaagatgtaactcaataagaccagcctatcaatgactctggaagcaggagagagaaaggggtaggaaaaaataacactatcgaatcttcctggacccattttatgatcagccagttccagaaacttccaggacatccaaccgtggaattaagatttccccagatgcaggccactgggtcttgatagaagaagtatcctgatttagtttcatccctgagggaactcaggttttcacagtcttccccaaaaggcagcatcttataccagaaagctcctaggtcttaggaccaggatgacaggggtgtggagtccatctctgccacatgcttactgattgacgttggacacgttatttaacctctctgagcctcaatgtctcatctgttacatggggataaaaatgcaaattaacaacaggagccctgtgctaatccactgagataatacatttttagaaattagcaaagcgcttggcatatagaagtttaactcagagtataggctaatgggatttgagaggaattattaagcacacctctgtctccttcctacccctcaggtttcactcaactaactgtagagtggatacaagagtcagacagatagagacttattttggaaaagcagaattgaagaatgcagcttgcacattaggtctttttaatacctcactttgcatttctcctgctctcttcccacctcccagtgctgcctgctggtctctcatcccctgcaggagcagagtctgccttagcaaacttcgggctcagaggggcagaaaaacacatcacccttaaaaagaggccctccagaagacagaaatgataaagagcctctttagtcatgttcaactccttctcccaatccagcaactggggaaggggcaaatgtcagatcaaaggaaaagatggaagttgacttcccatggtgtggggttcaagagtgattttacagaataagctgccatgcaattcatgaaggctggaatgggcccctttaaaagttgcctctctctcctctttgtcctgggaagtgaagagctgggcagaaatagagctgatacagaatgccttttggaaaccctatcatgcctgctaagttcccagactagggaagatgcatctgtattcctgaaaagaacagtactgtccttaaaattacactctctactccctatactctctccttctccactccctcccttctttattttagtccttagcacctattactcaccatctgacatgctgtctattttctatcttggtttagttttgccctcttcagctagcatgagtgcaagaattttgctccattttcttcccagccgtatctccagtgccttgaactgtgtttggcacatcacaggtgcttgatgaatatttattgactacataattcaaaggcagcctccagccccactccagccaaggctgggccagttccattgggttggcattgagatcccattgctggaacttacagcgcttcactcctacatgcagtcatttgcaaaaagacctacatctgaagacgttccttgggggaagtaagtagagctggaggcagccgaatcttcttaaaagttaaagaaaatctgtttttctccctttggcccatgagattctagtccctaccctaaagctctgctccctaaagtagaaactccaattcctactacttctctcataaggaaactcagcagcctatgcattgtaagtgtccccaaactacagtggattggaattaaaatccttgccctggtcccagagaatgtacttgtcagcaggaggagaaactgtctgttactgagtaccgcactagacaccccgtatccaaatacttagaattgctttgttttctgatgttttaaataccttttgtttctgtttattaaacatgaaagtattgattacaagtaatttcttttttttttttttttgagacggagtcttgctctgtcgccaggctgaagtgcagtggcacaatctcagctcactgcagcctccgcctcccaggttcaagcgattctcctgcttcagtctcccgagcactgggactacaggcacacggcactgcgcccagctaatttttgtatttttagtagagacagggtttcaccatgttggccaagatggtctcagtctcctcacctcatgatccacccgcctcagcctcccaaagtgctgggattgattacgggcacaagccaccatgcccggctgattacaagtaatttctaaattatgggaaaatgcaaagaagaaaatgaagattcgtcaaaattccatacagcaaaaccaccattaacatttaaatgtctatattttcagagaatttctgctccatatagatactgatattttttacccctccctgaaaaaaaaagctactgtcaagggagtatattttgtaccccacacttccactcaacacgtgtagatttgtgtatgccaataaatagaaacccatgttgtcgatcctgatggcttcataggtttctactttatggatagatcatcagttatttaatgaatctcccatcaaggaacatctaggttgttctaatttgtcactattgtaaatagcacctttgtccccctgcctgagaggtggcttctttagcaggtaagaaagcacagaggagccctattgatttagcagacctaagtccccatccctgattacaacaccagggctttccagggagtgcatggtctgcgccaccccatgcctggggccctgggcgagtgatagcggtggatcctgagctcacagacattcctgctccaagatctccctcctctctcccccaacacctttaggcagcgcggtgtacagcttaatgtgattgcactctcagctttcaaacttctgcagagcttcactgcttctagttcttcccagaagcaaagtttctcagatccctgaaagcctgagccaggtctgcaattctttattccaaaaacatttcctgagtgctctctgtctttgatgttgtcatcctaagccctaagcgacaacatccaacaggccacagcggtcctttccaccgctcacaggccctccccacagggatccttctctgaggaccccccatccccacgcgctgcacaagctccagttcccatccctcagaccctgccagctttttccctctccccagtccaaagggagtaacccgcaggagttgagccactttcccttcttttttaccctccaagcaaaatgtcttcatagctccgccttcttcctccccttcctcctccagtaacaaaactcatctgggagagctcaaaggcctggaaacgagcctgctttcctttcctgggtgtgagaagggcccagctctcagagtacagtggatcttccaaagtggggaaaggctgtcccaactagaacaaggcttcttgctaaaggtgatgtggggagaaaactccacggtgtgagaaaagaggaaagacgacacatatacataaagaaggaggccccagtgtcaggccatttgcaggcagtagggcatgatcactggtgtccctagacttacttgggtgctaaggacaactgctgatggtaagggagtcattgggaaactgtctaagaaggctgcttgggaagtggagccatggcggtttagtggggaccaaagaacaggttccatgcagccaggccttctatgctgagccaatttgtgcaggtggcatttggcacaggctgattgtccagaggcctaggagatgacaagtgagacaaggttggactccagtagaagactcagggcatggatggtctcaaatgcgagatttttatttgatttagcaaccaatgggaaaagagtgtggtttgttcagcagggaactgacatggtgaaactgctatttggggaatattgatttgatggctttgtagaagacctaaattaaaaaacaagagagggccaagtgcgtggctcacgcctgtaattccagcactttgggaggccaaggcaggtggatcacctgaggtcaggagttcgagaccagattggccaacatggcaaaaccccatctctacaaaaaatgcaaaaattggccaggcatcgtggtgcatgcctgtaatcccagctgctcgggaggctgaggcaggagaattgcttgaacccaggaggtggaggttgcagtgagcggagattgtgccactgcactccagcctgggacagagtgagactccatcatctcaaaaaaaaaaaaaaaaaagaaaagaaacagaaaagtaagagaagctcacaagtggctgttttctctaactaactagaggaagcctgagaccaggtgaaatgttttccaggagctgaagtcagttatatcagcgggtagaagaaagcatcacagctgtttctccgggcataatagggttttgactgtgacgaggggcctcagtgagatgcgccacccagccaacccaccttcccagctctttctctggccctgtgagtcttgggaacactgtcagccccaatgactgctgctaaccagggtttatctatctatctatctccccccagctatgaccacgaaggccgcctgaccaacgtgacgcgccccacgggggtggtaaccagtctgcaccgggaaatggagaaatctattaccattgacattgagaactccaaccgtgatgatgacgtcactgtcatcaccaacctctcttcagtagaggcctcctacacagtggtacaaggtgagcctccacccataccatcctacccccaaactcacccatagacccagaacccagccaagcccaacatgtgagttatgcagcctgggaggacttccagagacccagcgtacccctagctttctattttattcaagtgtccacagcaaactataagaggtcaatcttgtagaaaatgacttaatcagatagaacagaatgtcatctacacccagccaaatgtctagatatttgaactgtctacatagttatctgaaaatgtccatttccacccgccccccacatactctctccctacctcttacccttccatcaccacctctccccaccaacccaaaacacatagttatcttctcaaaggccatttattctcctggctcaccactagacttcatattttcttgttccatcctgattctctcttttaagcatttgtttgatgagttggttgccctgggactggagctctttaacattctctctccaagactgggatctcaaaggtctctgcccaccctgtggttattgttgctactagacatgttttgcagtccagggcaagcactggggctggcaagaaaatgaattgtgccgattaatttttcttttaattaagatataatgtcggtgggctagcccgttgtcagaggataaaagtgtcctctcagtagataaatggtgacatttctggactattatcccacagcggagcctgtttcaatgactctatttctgctctgccaaatgattaatgatgtagattctgtccttctgcgtgtgacggctggagtcacaggagcgacaggtacacacttgctcactgccccaaaagctgacatctcagaggccagcccaggccagctcctttgcccagacagtcaggaagcagtgtatctgtaaaaggagtctctgactcacatttccttcccgtaacttttcggtaaaggaaaaggtcagacgtctgattgactcgtgtagtttccactggggaagataaacacattatcagcacccacccactgactccagctccctgatgtatttgagtctcttcagagttctcttgagtgggggtggtatcaggtgcagtcggcagtaaaagcatgaggatggggaaggttgacttcttctctccattttctcaaagaaagaatcctgggctttgatttgtagtggatctggcctgtggctagaccagcaaccttgggttagacggcaggcaaaaggaggaaaactgaagtcatttgcctttctttttttttttttttttcctggtataagctaaaatatatatgttaagcttcgggaatttgattgacacaaattgtgtaggcaatagacatctttaaatgtttaaacgtgctattaatagtcttcagtgagtaaaagaaacatcacggcataattatttctggagtgccacatattatgtttttctttacgtggatcagtagtatctctgctacttaccttcacatggtatgtatgtgtgctaattgaaggcagccttcgactaatggctgcaaagtaccatggaaacctattaaaaaaaaataggggttctattctcttctgactaatagagcggataatttatttccctatccccacccccacttacatttttccagatcaagttcggaacagctaccagctctgtaataatggtaccctgagggtgatgtatgctaatgggatgggtatcagcttccacagcgagccccatgtcctagcgggcaccatcacccccaccattggacgctgcaacatctccctgcctatggagaatggcttaaactccattgagtggcgcctaagaaaggaacagattaaaggcaaagtcaccatctttggcaggaagctccgggtaagtggttccacccaatctgttaccacagagtgggaggggatatacactttcctcacagagctgagaaagtttctctgttaccacagagtgggaggggatatacactttcctcacagagctgagaaagtttcccagcttcaaagcctctaatacccctttattccctggaaaaggcaaactctccactcagaaggtagaatccatctccctttgggactcataccttgggaaaaacgttctccatttccatttcctaggactgaaaaaggcggccatttcctgctatggggatttacattacgctgtaactagagacagctttggtcttcttttcacacttgctgtcttcttcttcctcagttttcactgtctggccagttcaaccaatgaattggtgttcgtgcctactatgtgctgagtaatttgctaagtgctggaagaacaaaacttttaaagtatgttctttgcactcaaggaattgagggtctgataaaatatgcagacacaggatgatcacaggttaagtgaaaagacagaggtacatgcagggtctgatgggatcccagagggatgccactcagcctgagaggttcagggaagatttcccaagaggaagtaacaactgaacctcagtggggagttttagccaaccctcgttttcccagaccaggcaacttgccccacgtgacatctttttaaaaccaatatataacattaattatattattattataattattatataatgtaattttatattacatttttatattataatgtaaaccctatattatattataatgtataattatatacattatatgtatacataatatacatatacgtatacataatatacatatataatacattatatgtatacataataatatacattacattatatataattacatatataattaatgtataattatatgtataattataatattataatgtaaaccctatgttaaatgctttgcttgtattattttaactttttcaatagccccacgaggataattattactatcttcatttttcagatgagaaaacagactcagggaagctaaattacctgtccaaggacacaatagctagaaagggcaatgccaggactcgatcccacgtctctctttctgtctgactcacttgccaatatgtcacatgccttcctgcttatccgtggtcatccagagcttctcagcagaagtggattctgctccagtcacttatctgtcaccaagagggaacagttcctaccatcatgctaaccccttccctggggagggggaatgtaatggcatacaaagcaaaggccataacttcctgcaccttaccttcaggttgcggggagatgggagagaggggtagatcataagtaaaaactaataaataaaaataaataaataactgcagaacaagacaagcactaggaagtcagtaaacaatggaacaaagaaagagtttatcaaatgctttggaatccctgagagtagaaggctcagcatcgccaaagcttgggttgtaacttttttgctgtgtaactggattgaaatccagccagcccaggtgacctccctgcagagccaggcccctccatattaagattccgcctttgtctggctgaagtttaagtcaagtctccacattaggttagcagcagtctcccaggtttttcttcctctgctggtatctgcaaagttgcaaactgcagtagcctcctaaagacaaaaatggaatgagattagtagttaaatccttaatgactggatttcagggctgtgtaattgatttttgatatgctgcactgtagaagttgattataagtagtaatcgtgccttttctctgataaatcagttatgcattttgactaagttttccaaataaagataaatgtggccctaaaataaagtggctataatcccaactccaaatattaaaactctttctttaataatggtacttgtggtaattagcccaagttaggcacacaagtcttataactgaatttctgccagggttagatttgctggcatcgtgtttatgcaaatcaaaacacagttttatctatcaacacctcaacatttaattgtctggtgttagttcctgtaacaacaatcacatatccatttagctctcttaaatgaaaatcactatgagattataacaggttgagtggactgaaaatgtaatttgaaaatgagggagaaagcctggaatttatttgcatctcatttattttaattcagttcgtaaactgtttagtgaatgaaatgaaagcaacttctggaaatggcaggagagcagttggaagaaggtataagggaaatgttgggtgtgatgtggattgagggaactggggagtggccatttcgtcagatgtttcgtgagcccatggcagggagtttgcagcccctaagccgaaggtacccattggccccataaggctagcaggctgtctcaccattggcaagatgggctcttctctccctatctatctatcttagtcttgctgtgtcttttcatccctgctccactgtcacatgagggcatgaaagttcatttattcaaaagatgtttattaggtgccaacactacagtcagtaccacggaacaaggagactctagagagataaagaaaactgggtggcaccgactagctaacggtctcatggagaagacaatattagtagtgtgatgtaagctataatacaggccaaaagcacaaagaaagggatacttaactgtatctgctggaagaggataggccacggccaggtaacaaattaaccctgaaatctcatgggcgtaacacatcgcagtccaaatgcatcgggcggctcttcttaatgaggacttgctccagttgctctgtcttgcgatcctgccatcttaagcacaggctctgtgcagttgctgcagcaagggaagagagtttgggtgattcacgagagcttaataagcaggcctggatacggcaggcctcacttccacccaccctggtgagaacactatcagggaacctcaactgaaccacagggaagcctggaaaatgttgtcttttctgagtgcctaagaagaagaagatgaacaaagacttggtaagcacgtagcagagtgatcaggtctcccgtttgacaagagatcaggaagggcttcacagaggagctggaatcatttctgtagagtagtaagaatcagccaggcagagatagggaacagaggtgacaggacaaagaatgtcgccagtggaaaggccaagaggccaaaaagggaatggcatttcagaaaactaattcagtgtggcagtggatgtgttagagagtagggtagaaaaagaagatgcagccagagactgcacatggaaaagaacatggtgccaggctaacatttatcctgagggcaatggtgagccctacctggacttcattagcagagtgatgtgctgggatgtgtggcattagaaagctctctccagcctgggcacagtggctcatgcttgttttcccaacactttgggaggccaaagtgggaggatcattttcgcctaggggttcaagacaagaccagcctaggcaatatagcaaaaccgcaatatagcaaaaccctgtctctacaacaacaaacaacaacaacaaccaaaaaaaaaaaaaaagtttaaatagccgaccatggcctggcacagtagctcatgcctataatcctagcactttgggaggccaaggcaggaggatcccttgagcccaggagttggagaccagcctgggcaacatagggagaccctgtcatggtggcacatgcctgtagtcccagctattcgggaggccaaggcaggaggactgcttgagcacaggagtttgaggctgcagtgagttctgatcatgccctgtactccagcctgggcaacagagcaagaccctgtctcaagaaaaggaaagaaaagatctctctgacttcctcaggtatggaggaagacagatgagaaggggacaagatagatgataggaggagagggacagtaaggagggtgctgcattagtccaaacaagaaactaaatcactagcagcgaggaaagaaagaaggtagggggagagatttgagagatgtctagcacacgaggacgaggattgggcaactagcagggttgctgtgtcatgctcaccttttgacaggctctccccatgatcatgtaaactgggaaggctgggtggccgtccacgctttgtgggctctgtaaaagagagtggctgggagctgaaacccaagccagagatgtaagattctggtggccccagccctgcctcttggaatggagaagaaactaaatgaactttgaaatgcagccacttaaccagctccatgtaatcactgctccccatgtggagagcagggatttggagagaatgtgtgggtatcatgcatgaagcaaatagcctgaacgtccccgggactggcaagctcctgggagcctggtcagctgaggggtgtgagggcccaaggctctgaacattcctggagtttagagaagaccaacaatctcagtgaagccatcacaatagaacagtgcccagtgaaattccaacccacctaggtaccctttcttcccacaatcctccagacggaggcatctcttagtggaggaaagtatcagtggctcttccttacagcctggggaaatgtaagatgatggcggatggatagaccgggaccacatcctttcaccaaaagctttgtaatggagtgttagtcccttcattcctgcccaaactcagtgcagggaagattttcattatgcctcccaagaactcctcaaagaatctcctttgaaagagtcctccccctccttcccgcattgtcctccattcctttcttcactcactctggccttgcaaaaacatgaagcaggccgggcgtggtgtctcacgcctgtaatcccagcactttgggaggccgaggcgggtggatcacgaggtcaggagatcaagaccctcctgaacaaaatggtgaaaccccatctctactaaaaatacaaaaatcagctgggtgtggtggcgcatgcctgtaatcccagctactcaggaggctgaggcaggagaatcgcttgaaccagggagtcggaggttgcagggagccaagatcgtgccactgcactccagtctggcagcagagtgagactcccatctcaaaaaaaaaagaagcagttacatcatggcatctgtgagctccataagtgcagggaccaggtcgcccctgtatccctggtgacaagtgccatgtggtgggtactcagacaacaggtgacaaagaaagatgtaataactgtgccttctataggcgccttcttaatgtgtaaatgctcccccaccacagtgggtataaattcacaaatacattgcccctacatctgtctggaatccttccactgcaagagacaggaagtgcattcagactaacttagaagagtaggcgctgtcttacctaacagggccaccacaagggagaagctggcctcagagactctaagatgtcattaaatggtgtactagtctgttttcacgctgctgataaagacatacccaagactgggaagaaaaagaagtttaattggacttacttacagttccacatggctggggaggcctcagaatcatggcgggaggcaaaaggcacttcttacttgacggcatcaagagaaaatgaggaagaagcaaaagcggaaactcctgataaacccatcagatctcgtgatacttattcactatcactagaatagcacgggaaagatcggcccccaggattcaattacctccccctgggtccctcccaacacatgggaattctaggagatacaattcaaatcaagatttgggtggggacacagccaaaccatatcagatggacgtctctctttctgtttctcacagcccccttccatcccatggcagggtttctctctcggcagttgacctaattttctcctacagtagactaatgtcctcttcacattgcgggggtggggggtggtcaggcagacttagccaaagttgactccaggcttacatcatcacagctaagtgaacccagaggaaaaaggaaggtatctcccccagcatttctatttttcataaaatatctcatggaagaaagattgacctggcagagggagttcacattcctgggcaaatcactggtcagggagctggggatctgtgatgagtcaggcaggcacaggtcacatgaccatacctgtatcttataatagacatctcagtaaaagcacctagacagggaagccctagaaaaaagaggtgccgtacccaaaaaagaaagaaagagatacaaggttaaaatataaatatcccaaatatagtctacatcctccatccctccgaagcctaatcataaggcgaaactcctggccctgaggatctaaaactcctggccctgaggatctcttgaggctctattgcctcccaccccaacaagccttttttctaggcttttggaagagagaactgaaatcaaccccttctattaagatttaaaacttctaccctttcctaaaacggatcttgtgcaggatgattctctttctttgtaaaggaaagcatataaccacgctctaggatatttcttcctgattgtgatttacatagagattgcagaagcaagaaacagctacatgtgtaggtagcagaacaaaagaaaaattgcttccaagataatcttccatcatgatattggtattagtgttattagtattccaagaagaagtgggagttagtaattttgttttggctcccatataattaatatgacattgcaattacgtgttggcatgtgttacttttacttatgtggcaaatcacagtgacagaggagggaggtggggggatgggcgtgcctatgtgcatgtgaacacacacacatgaactcagttctgcgtggagcccactcaagccggtctgttaacacacacaagtcattatgaaagcctgaattttcacagctccttcctgccacaatgcattcattcttcacgtgactaatattttatatttcaaacacctcctgtgttcttggcactacgctaggcactgagtgtacattagtgaacaaaagatttcaccttacatggtgagcagcacttgtgcaggcagaacttgggataaatttaatattagtttaaataacacataattagaagggcaagcctctgcaaacagattaaataatgtattccccaagcaaacattacttttgggtggcttctgtttgggatgatgatgtggaaaagtggaaaaaccctaatggagcttatgcctttacctcttataccttagcaaggagataataatccaataaatgtacaaacaatatatagaaattgtgggctgggcacagcctgtaatcccagcactttgggaggcccagacgggtggatgacctgaggtcagaagttcaagactagcctagccaacatggcgaaaccccatctctactaaaaatacaaaaattagccaggtgtggtgcggcacgcctataatcccagctacttcggaggctgaggcaatagaatcacttgaacatgctagacagaggttgcagtaagccgagatggcaccactgcactccagcctgggtgacagagtgagactctgcctcaaagaaaaaaaaaagaaattgtgatgggtgctttgggaaaaatgtacggtggagctaatacggaatatatgatataggttaagccctctctgagaaaatgacatttgaactgagaactgaatgaagagtaggtaggaatttcccaggcatggagttgggggaaaagcctctatgctaaagccctagcatgtgcaaaaggccctgaggcagaagagacttctgcctgtatcctgaacagaaggagagctccagtgtggctggagtaaaccagctgagggtaaggtcaaggggtagagccttatcttgttggcccttttaaggatcttagaaatacagaagtcttctgcagattatccacccggtacatgcaaatgagccctcatcgggagcctccttcttggacactaggaaatatacaacatacctgactcctgaaagttcaggtcaaaggataacaaatatagcttattccggtcatctgggctgagcctccataccagacaccctctgccccttctcactacatccctaccaatggaccacccacctgcactagaatactcacagcatcacctgaaaacagccatgctctgcctgtgcaaggcctttgctcatcccctgtgctttcatttgctgaccctccccacctggaatattctccctgattcttctcccaccctcacctgtccaagccttactcatacccaggcccccactgagcagcgctttctctgggaaatcatcctcatcagtcccagctctggttccacatccttcctcactgccacagttccttccctgtgtctactgccattaccacactaaaaatggtttttgttgttggctcacctgtcgttatccccctctggcctgtggcctgcccctctagggcaggggtcataactgtcttgttctatcttacaacagtcccagtaacaaacacagagtaggtgcccagtaaatattgaatgaaagaatgaatgaatgaatgggattttccactgacataatgaaaatctgctccctcccacgtttgcctatgaattccaggtcccaggggccttccagaatgactctaataggtctttggaatgaagcttttcagatattttgagaccacagatgtcctaatcatatatatatatatatatatatatatatatatatatatatatatatatatatatatatatatttttttttttttttttttttttttttttttttgagacagagccttgccctgtcacccaggctggagtgcagtggcacaatctcggatcactgcaacctccacctcccgggttcaagccattctcctgcctcagcctcccaagtagctgggactacaggcatgcaccaccatgcccagctaatttttgtgttttctaagtaaagacggggtttcatcatgttgaccaggctggtcttgaactcctaacctcaagcgatccacccgcctcagcctcccaaagtgctgggattataggtgtgagccaccatgcccagcctaatcatattttctattcctgattttccacgttggaactttagatcatcagagttagcagggttcttgtacccagtctgattcagtctgcttattcactaatgttcattgagcaccaagcactttccaaaacaaaatagagacactaagaaaaataagataaagtcccgactcaccagttcccaggctattacagatgaggaaactgagacatgaatggtgaaggtatggttttggtatggcaaagctaatcagtgacactgatgagtatcaaaaccgccactcaaactcgggtctttccacctgacctccatccaaaacagcaagtcatccaaacataatgtttgcttggggaatacattatttaatgtgtttgcagaggcttacccttctaatgatgcattatttaattattatattaaatttatatttaattattaatattaaatttatagcaagttgttttgtctccacaagcactgatcccaatgtagcattgagtcttgttgtgtgggagctggggatagctactttttaaatcccaggccgggcgcggtggctcatgcctgtaatcccagcactttgagaggccaaggcgggcagatcacaaggtcaggagatcaagaccatcttggctaacacggtgaaaccccgtctctactaaaaaaatacaaaaaaattagctgggcatggtggcgggcgcctgtagtcgcagctactcaggaggctgaggcaggagaatggtgtgaacccgggaggtggagcttgcagtgagcccagattgcgccactgcactacagcctgggagatagagtgagactccatctcaagaaagaaagaaagagagagagagagagagagagagagagggagggagggagggagggagggagggagggagagagaagaaaagaaaagaaaagaaaagaaaagaaaagaaaagaaaagaaaagaaaagaaaagaaaagaaaagaaaagaaaagaaaaaatcccagaagactgacccggaaagaaaatgaagatgtcctctaggccaggctttacctctgggtaggtaaataactaaactctccaaggcaaactcttctgcttttaaacgtcgccagacagggagactctcgtgacccccctcactaatcttttttgggtttcccatactcaaagcaggatgggcaaagggttcttctatacgtctaactgaaatctctcctgctgtgttacaattccgtttcctggaggggatccagcccagtgtaatttcctccctcatgtttctcaaatcactagctcccgtcattgcgcctggagctaagttagagtcaccagttataggcccagcagggccgttttgaagacagcgtttccttttctccaggttttttatgagcttccttgtgacaggcgtatgcttggtgagatcaaaacgttctggggggatattctgcaggggaaaccacttcccaaagtctgccctctgcaaaaataaaaaagcatgctaaatagctgagttttattaactggggaagccaggctgaggaaaatgcccgataattaaaaataatggcttccttacaaacacaaaattgtattaacttaaaaattggtttctctatcactgaattcctaccaagccgactgggaagggaatcgtgttgatcccggcagtgaaaataattcaaaataacttttatgttctccaggaagcctcaaggttaatttaaatattgctagctgggtaatttaattcagaataagagaacattgcagctaaattaaagctcccacatgctctaaactgggggggcaggtatcctcaaagggccgatcgtgcctgttggaccctccagcatctcgcacccacagccggggcacccccctttataaatggcaccctcataattaaagaaatttgattagattacacaactggcctgaactccttggctcaccttccagtgaatttttcagatttaattattagaaggattgggcattttaatagaaattttcacatttcaaagttaactcaaacctgtgctatcaaaaaatcccattgtcccagggatatggtaaatttgcaagtaaaaacccaccctaagttatccatggctaatggctagcacctatcattacttctttatagttggtgcacctgggtcaatggtcagaggcctctcagctctaagtaacagcagtaaatcccagggtggcagtcagaggttagggacccctcttctttgtttacccagtatttagttcttttgtaatcccatccaagcactaaccaggcctgatcctgcttagcttatgagaccaggaatgttcagggttctttctgtaatctaagcaccctcacacactaatatcatccttattatgatagtcatgatcacatatattatttacatgttggtctttcccatgattacatattatagtatattatgcacacatatgtacatctatacacacatatgattatattatggttatatatgtgattttcccattggtctttcccaggtaactaaagataaggccttatatcacactgagtgtattttaaccaagagtacacatcagaatcacccagggaggttttaaaaatcaaaaatccacagctgggcacggtggctcatgtctgtaataccagcactttgagagactgaggtaggcagatcacttgaggtcaggagtttgagacgagcctgaccaacatggcgaaaccccgtctctactaaaaaaatgtaaaaattagccaggcatggtggtgcacctctgtagtcccagctactcgggaggcagagacatgagaatcacttgaacccagggggcagaggttgcagtgagccgagatcgtgccactgcactccagcctggatgacagagcgagactctgtctcaaacaaataaaaatcaacaagacccaaacccctattccctgaggagctgattcagcaggcgtggagccagccgagcagcagagctttaagagagtgtcccatgtggtttagaattgcatgcttgatggaaagcctgtagtccaacacccctcaatcctagaggtgtacaacctggaggttaagacagcaagctctgtatggggatcctagctctaccactgagtatttatctaaacttgagcaagtcacttaaacccatctatatcttgtgtgcaaaatggggatgataataatgcctgcctgagagtgttgttgtgtaaattagacaaaacaagggcaatgctgagaataacactcagcctgtgtaaatgctcaacatgttgctgttgctgtggtttttcttccttgtataccagagcagacaccaaagcctggcattagctgacactcaatgttcaataattaataaatgcactagggccctatgatatgagcaaaaagaaaaaaaaatataagaaaagggaaggaggaaaaactaaggatggccaaggggatggaaataagtaggcatgatggcaagtccccagcagttgcctccaaaaaccctggaaatccttcctcattgttgcatcattcattctgcctaacaaaatgttggagaggtcttgaaccaaaatctgaaacccataggtttaagaatgatggtggccttccgcagttgtcccagatgaaccaacccgatgtgaccaagcttctgttggcagaggagaagacctatctttctgaccaccactgtgtgttttgctctgaaaatgatggctccaatcccgtataattcagacggcattaacttttggacctgtttttaaaaaaataaaaaatcctactactcagcctttgccttcttgactattcccagttgctggaagttgttgataggaatcttccacttgaagttagggttccttataatcccaagaactcaccacctttatttccctccccatgctttgatgcattctcttttctttttctttttgttctttttttttttgaaacagagtctcactctgtcccccagggtggggtgcagtggcatgatcttggctcactgcaacctccacctcctgggttcaaacaattctcctgctcagccttttgggtagctgggattatagacacatgctaccatgcttggctaattttttttttttttttttttagtagacacagggtttcaccatgttggccaggctggtctcaaactcctgacctcaggtgatctgccaatctcagccccctaaaatgttgaaattacagacatgagccacacgcacctggcctatgcatcctcttttctaattgtcctataataaatattctatcctctctctgagatgaccttatagaaacagcaatggtttggagaatctgtagtcctgggttcagattccacttctgccacttgtctagttatgggactcctgtagacctcagttgctcttatgtaagatagtttctatgtcatgaaagtgaaaatgggatcaggtatgtaaagtacctagcatagcacctgccaaagtatcaggggcttgtatcaatttagatttgtttccaccgctagtaacagagattagcaatagcaagggtttaaacaggatttacgcttattattttcctatgatctgaaaggagcttagggaaagcaatccttggctgtatggatgaacactgaagacacctagatcaacagagatctagactctttttctctggataggccatcatcctggaggtctccagccccaaagtcacctcatagtcacaaggtaaatgctggagctccagccatcacatacacatttcacccaggaaaaggaggaaagggaagaattaaagattgcctagctctcagctgagtcaatttcctttaagaatatttcccagaagaccagccaacaacaaccacttacatcttgttggccacccgtatctctgaaggaagctgcgaaatgtgtttcattacctgggcacaaagctgtttcccagaatgcaagtgtctgtggtattagaattattccttgtcccaccccctcacacccccaaagctgcaatgtggagcgttcaagggctgtgaaaatgcttcacagtctgttcatcatttgacacatttcagggcactcaatggacatacaatacaggaagcagtaaagctggtgaagtgtataagaagttaactggttaaagtctgaaggcctaagttccagaccaatccaaccacttcactgctgtgtgaccttgagcaagttttgtaaccactctgtttgaagctttttttatcatttgtcaaatggtctttgtgagcaacaactcaaacaatggatgcaaaatgcctaacacaatgcctgtatatattcgtcctcagcatatattaaagtcatcattactatcagctgggcgtggtggctcacacctgtaatcctagaactttgggaggacaaggtgggtggatcacctgaggtcaggagttcgagaccagcctggccaacatggtgaaacctcgtctctactaaaaatacaaaaattagcccagtatgatggcacatgcctctaatcccaactactcaggagggaggctgaggcaggagaatcacttgaacccgggagacagaggttgcagtgagctgagattgcaccactgcactccagcctgggcaacagagtgagactctatctcaaaaaaaaaaaaaaacttattattactatcatcaccaccatcactaccatcattattaccagtaagtgctgttgaattattagggtaaagtgaggaggtaccagacatctctcgagtctcttcctttcgcctatttacatcatcccttgccttcagcagccaccccagggatgtctggatttgcagtcagtgaagttgtgagagcctgggctgagtctggttcatttcattcacttccagccacccactcagggctagctgaatctcaggagcccctctcctttgcccctcaccagagtctagtctcccagctctgccttctgggataggctttcttctctgatcagatcaacttctaaataaatattaaattatgtctgatgtgtttccctattcctttcaaatctaagtaaatcagttcatccctttgttggaaatcccctagccctgctgaggcctccccactgatgtctcacattcttgacagtgacaagatttttctctagatattagaaggaaagaagttcacataggaatgaggcttcatattcccaaatctttgtaaaatatggatttctaagccctgttctccactcttctaggtaactttacttaagatttcataagaaattatggcacctgttcttaaagatcattagcttctcagctaatgatgtgccaaaaagagttccaagtgtgcaaatatgcaaactctcttgcccccagggtggccaggcagcccaggcaaaactccagggttcaagtctgttgtatattgctgtataatttgcacactgcacaattttcaccattcacactttccacgatcctatggcaccctttgtaattgtgcagtgcacagcctacccaactgcccatcacagccatgcccaggtcaatcatctctgtccataagctgccttatttttatattctattgcatattgcaccatacaaatactaccattttcttttctttggttttttttttttttttttttaagatagagtctcactctgtcacccaggctggagtgcatggcacaatttcagctcactgccatctccacctcccaggttcaagtgattctcctgcctcagcctcccagtagctggaactacaggtgcatgccaccatgccagctaatttttatatttttagtacagacggggtttcaccatgttggccaggctggtcttgaactcccgacctcaggtgatccacccacttcagcctcccacagtgctaggattacaggcgtgagccaccacacccggccaaattttgccattttctatctgtgccatgataaggagcttagaaagcactactctaactttggggttatttcttcctccagtgaacacttaagccctggccatgccagccatgtcctccacagaagcctgagccggcatgcctgggtgatgtctttcaaacaaggcctgttgtgttttcctaggtccatggaagaaatctcttgtccattgactatgatcgaaatattcggactgaaaagatctatgatgaccaccggaagttcaccctgaggatcatttatgaccaggtgggccgccccttcctctggctgcccagcagcgggctggcagctgtcaacgtgtcatacttcttcaatgggcgcctggctgggcttcagcgtggggccatgagcgagaggacagacatcgacaagcaaggccgcatcgtgtcccgcatgttcgctgacgggaaagtgtggagctactcctaccttgacaaggtaggtgaacatgctgccctgacagcaagggctttctgttatttctgttattccggcttctttttttttttgagacagagacttgctctgttgcccaggctggagtgcagtggcatgatctcggctcactgcaacctctgcctcccaggttcaagtaattctcctgcctgtgcctcctgggtagctgtgactacaggcacatgtcaccacgcccggctaattttgtatttttagtagagatgggtttccccacattggccaggctggtctcgaattcctgacctcaggtgatcgcccacctcagcctcccaaagtgctgggattacaggtatgagtcaccgcacctgaccatttctgctgctcttgtaagctagcctgatatgttttgccatgagacatcttaacatctttacttcgactctacaaggacttccctcctgctcccaccctcacagagggaagaaaatctgaaggcaaatgttattcatagctcagcactattaccattggggtggggggcgggggtgctagacgctcagtaatggcaaaaaggacgaattgtctgattctatttcaaaaaagaaaaaagtactgttgaagcggacagaatcatcccactggcagcgtggctcatcattacttatgaattggaaatgcagtgattcatttctgtcttgccctaaattaagccgtcaggatggggaattttgcctaaaattcaagcacacagagcaaccctctcctatttgccctgttggctgaaacagcccatgaattctctctacatgattccctgtgtctgaaagtgccaaattcaggtcttcatgcttgaaaaaggtcaggttggagtggcggtaaaaaaaaaaaaaaaaaaggtccctttgggcacgtatcaagacttttgaaggctgccctggccatgtagtcattagacagggcttgctcaacccgggcctctcacctagactccccttggtgcaggtccattccttcctttctcaccaactcattacagcggtgacttgcagacaaagctgttacccctctgcaagacagaactgctgtccccttggtccttcctgaatgctgtccttgttatgcctgaaacacaggaatgattgaccaggggagcaggaacctcccaattgcctctaattgaagtcatttttttcccccaaagaatcagtgattctaggttatttcatctttgcagtagcttcaaaatgcaggatgtggctgggcgcaatggctcacacctgtaatcccagctctttgggaggccgaggcgggctgatcacttgaggtcaggagttcgacaccagcctggccaacatggtgaaaccccgtctctactaaaaatatgaaaattagccaggcgtggtggtgcatgcctgtaattccagctacttgggaggctgagacaggagaatcgcttgaacccaggaggtagagtaggttgcagtgagctgagattgcaccactgcactccagcctgggtgatggagtgagactctgtttcaaaaaaaaaaaaaaatgcaggatgtgttttctcttttttaaatttaatcagggtatgtgtttcacacagctcccctgctggacccagtggcagtcatttctaagcaatcttggggttccttgttattgagcatggaggtaaacctcatgcctcttacttcagctgtccaggccctcaattcttaaagtatcatccaagcaacattggcatttgcagggagtttgttacaaaatgcagattctcaggccccaccccagatctaccaaattagactctgcctttttacaagatcctgagtattttgcatgcacattaaatttgggaagcactggtctaggcaaccaccatgatccatcaaaattggcatgtccagtgaaataaatctgtttaatctggtctaagcttcccatctttcatgacttttgagttgacatttggggaaatggactaaattctgtctgtttgaatgcttggtcctcaaaagccaactgatatgttctgttcccctttcctttctgcagtccatggtcctcctgcttcagagccaacgtcagtatatatttgagtatgactcctctgaccgcctccttgccgtcaccatgcccagcgtggcccggcacagcatgtccacacacacctccatcggctacatccgtaatatttacaacccgcctgaaagcaatgcttcggtcatctttgactacagtgatgacggccgcatcctgaagacctcctttttgggcaccggacgccaggtgttctacaagtatgggaaactctccaagttatcagagattgtctacgacagtaccgccgtcaccttcgggtatgacgagaccactggtgtcttgaagatggtcaacctccaaagtgggggcttctcctgcaccatcaggtaccggaagattggccccctggtggacaagcagatctacaggttctccgaggaaggcatggtcaatgccaggtttgactacacctatcatgacaacagcttccgcatcgcaagcatcaagcccgtcataagtgagactcccctccccgttgacctctaccgctatgatgagatttctggcaaggtggaacactttggtaagtttggagtcatctattatgacatcaaccagatcatcaccactgccgtgatgaccctcagcaaacacttcgacacccatgggcggatcaaggaggtccagtatgagatgttccggtccctcatgtactggatgacggtgcaatatgacagcatgggcagggtgatcaagagggagctaaaactggggccctatgccaataccacgaagtacacctatgactacgatggggacgggcagctccagagcgtggccgtcaatgaccgcccgacctggcgctacagctatgaccttaatgggaatctccacttactgaacccaggcaacagtgtgcgcctcatgcccttgcgctatgacctccgggatcggataaccagactcggggatgtgcagtacaaaattgacgacgatggctatctgtgccagagagggtctgacatcttcgaatacaattccaagggcctcctaacaagagcctacaacaaggccagcgggtggagtgtccagtaccgctatgatggcgtaggacggcgggcttcctacaagaccaacctgggccaccacctgcagtacttctactctgacctccacaacccgacgcgcatcacccatgtctacaatcactccaactcggagattacctcactgtactacgacctccagggccacctctttgccatggagagcagcagtggggaggagtactatgttgcctctgataacacagggactcctctggctgtgttcagcatcaacggcctcatgatcaaacagctgcagtacacggcctatggggagatttattatgactccaaccccgacttccagatggtcattggcttccatgggggactctatgaccccctgaccaagctggtccacttcactcagcgtgattatgatgtgctggcaggacgatggacctccccagactataccatgtggaaaaacgtgggcaaggagccggccccctttaacctgtatatgttcaagagcaacaatcctctcagcagtgagctagatttgaagaactacgtgacaggtgaggattctgccaccaaaggtgggcagtggctccctccagggtacttgttgctgtggggaacttgggaggaaggtctcccatcttatggtaggagaagcccatgggccataaagcccaggcagtgcagttggcagcactacagagtctagaaaagtagagagacggcagtacagagcagtcatgaggactgtttgaagatgtcccaaccactttcatgtccagtcagttgaaataactttataagagcccttcctaccccaacagaggaaagcagtaagaagcggggagagaatagggctctggtgtcagaaatacctggttcaaattctctctcttctatttataagccaaaggaccttggactagttgttcaatctctctgaactatagtttccttccctgtgaagggcactgataaaaccatcctacagagtgatcatgacaagtaaatgaacacagctgggcatggtggctcatgccacccacgtaatcccagcactttgagaggctgaggcagatggatcccttgaggtcaggagttcaagatcagcctggccaagatggtgaaacaccatctctactaaaaatacaaaaattagccaggtgtggtggtacatgcctgtaggcccagctactcaggaggctgagccaagaaaatcacttgaactcaggaaagcagaggttgcagtgagttgagatcatgccactgcactccacctagcctaggtgacagagcaagaccctgtctcaaaaaaaaaaaaaaaaagtaaatgaacttgtgtagttatagtctagtggatgatcatgaaatggtatctgcttgtgttattaacattgtcattactagagaagcaatgagtgagcgtaagtatcgagatgactgtaacccagttcctgacctccagaggctcatctggtgagagacatattcaaataaccaacgataatgcaaagtagaattaagtctttgctaccatataggtgtctgttcagttgtttatcaaaacgcatttataaagtggcactgtgctaagttctggggattcaatggtgaataagacaaataccgttctctcaaggtgtgtgtgtgtgtgtgtgtgtgtgtgtgcagattaattcagattttcaagattggcataatacagaagggctcatgtcaaaatgggcctgaagaattcatgggaccttggccggcagaagtgagctcaaggctgaaggaaggctatgaacaaatgtcataaggacataggaagtttggagaatagcatgaaaggaggggccaagaaaggcagattatctacttctctgtgataagtgagaaatgggtgaaatgaattagctgcgtgtggtggcatatgcctgtggtccaaactacccaggggcctaagtagggagaatctcttgagctcaggagttggaggctagagtgagctatgatcatgacactgcactccagcctgcgcacagagtgagaacccatctcacaaaaagaaatgaaaggaaaagaaaagaaaaagaaattggtgaaataagagtctctctccatccatccattcacccattcaacaaatatttgtatagtatttaaattgtactaaatactagagacacaatgggaggaaagataaagtccctgtcctcagggaaatgagcaaggaaatcaggatggctggatggttgggtggatggctggatggatggctgactggatggctggctggctggatgagtggatggatggatggatggatggatggatggatggatggatggatggatggatggatggatggatgggtaaatagatggataaattgatggatgggtaggtggatgggtgggtgaatggatggatgggtgtgtggatgggaggatgaatggatagatggatggttggtaggtaggtaggtagagagaaggggagagagagagtgagatccaaagagaccagggccccaaagggctaactttcagcaagcaggctggggccatctcacctgtttatgctttgtatagagaaacaataatgaggacccaagaccagaaccccaagttccagaaaactcacagctcttggtcatgggccaaggaggcatcgacactcaggtgactgaggccacttgtccatccccaaggcaggaatggaagcagcatctacctggagcacagtgctgccatctaagccccatgctgcagaaataaacaaacatccttaaagatcaactgtggccatgcattgcttcagtgacaagccccggacctttggaagtcgaacccagaatccccaagccccagaagcatctgggacctttcggacccggaagttatggccaagcgacctaggctaacatctgtaaaccctcctgtcctcctcccccgtgcctcatcgaggccctgccagggcttccccgcttaccccatgcttagcataacttttatccccgaaatcactgcagctgcaaattaaaataagtctcaagaaaacacacatatatagtattaatattaggtaatgatacatgatataaagatgaaaaaataggaagaggacatggagagcgatgagaagtgtctcctttatggaggggatcacggacggcctttctgagcaggtagtgttgatcagacatttatgaagtgcagggagagaggaggagtgttccagagacaggaaactgtgaatggggaggttgactaggcctaccttagccataggagagaatcctgccccacacagaatgtcccttccagaagcctggttggtatcagacaccttgggaatgaatcagccagagaggcaataaagagaaacccacagtgtgggctgaacagacatgtcccgctgccaagacgcaaacaaaatcatttcacagggcacagtcagcctcactgaccccctcagctacttacctggctctccagaaaaggccaaaaaataattagcagggttttctgaatagcaatactgcttttctcattccggtgtttcatggagactcaataaatgggaatcaaatcaagttgaactaagtccaacgaaattgaatccagaaaccattagagagtctaaaataaagggtggtgtcagagaagcggcgtgcacagggtggatgtcttcagtgggagccaagggagagaaggagccggaccaggcacagcccacgctcgggcagagacctgggagtggggatccaagtggagaacaccaaatcattctctgctgttcacatttggctcatctgtaaaccccatctaaattagtcttaatttgccacttaggagactagcagagtggctgaactcactgctcacaatgtaagcagaagaggtaattaagatgtagtcgggaggaacacaaagaacagaaccttttctctccagtacccagtagcagcaaaagaatggtggctgtttggagacagaactctctgaatgcaagtggcagctcctgaagccagagaagggtctatttgttctgcccaagaatgtgaggacaaaggaaagcaacccagagtactgactgggtaggagctcagagacatctgggcaggaacacaaattagcctccaggagcaggcggagggggcaagaagtggttccttctcacttacaggctgcaaagcagcactcttttgaacagttactttttaaggtaatatatggatgattgacatacctgtgatgaaaagatatgagaagaaagagtgtaaaagaaagactgggccaggcatggtggcttaggcctgtaataccagcactttgggaggccaaggcaagagtatcacttcagtctaggagtttgagaccagcctgggcaatgtagagagatcccatctctaccaaaaatttaaaagttagccaagtgtagtggtgcacacccgtggtcccagctgcttgggaggctgaggcaaaaggattgcttgagcccaggagattgaggttgcaataagctgtgattgtgccatggcactcttttttgagaccctgtctcaaaaaaaaaaaaaaaaagactgggagactacctcccaacaacctgcaatggcctagacttttccaattttagcatcccaggaaactcttccgtcttggacacactgggatctataccctgcccccagctctgccctattctgaggccagttctctctcatattagaacctgagtccatctcaagacaccacttcttggccaggcgcggtgactcacacctgtaatcccagcactttgggaggccgaggcgggtggatcacctgaagccagtagtttgagaccagcctgagtaacatggtgaaaccccgtctctactaaaaatacaaaaaaaattagccaggcatcgtggcaggcacctgtaatcccagctacttgggaggctgaggcaagagaatcgctttaacttgggaggcagagattgcagtgagctgagatcgcaccattgcactccagtctgagaaacaagagcgaaactcagtctcaaaaaaaaaaaacaaaaaagaaaagaaaagaggcactacttctaaccttgccaatcacttgctgtgtgacttagacaaatatctcaaccctttagagccacagtattttttgtttgtttgttttgttttgtttttttgagacagagtcttgctctgtcgcccaggctggagtgcagtggcatgatcttggctcactgcaacctctgcctcccgggttcaagcgattctcctgcctcagcctcccgagtagctgggactacaggcatgtgcaaccacgcccagctaatttttttgtatttttagtagagatggggtttcactgtgttagccaggatgttctcaatctcctgatcttgtgatcggcctgcctcggcctcccaaagtgctgggattacaggcgtgagccaccgcgcctggcagagccacaatttcttcatcagcaaaatagtaatgataataatagcagtcaccttatggggtcttgaaaactaaatgcatcatgacatgtaaagtgcctagcacagagcaaaggctaataaaagcacagagcaaaaaaagctaataaatgcattcattattttattttttttttttttgagacagagtctcactctgtcgcccaggctggagtgcagtggtacgatcttggctcactgcaagctccgcctcacgggttcacaccattctcctgcctcagcccgcggagtagctggaactacaggcgcccgccaccacgcccggctaattgtttgtatttttagtagagacggggtttcaccgtgttagccaggatggtctcgatctcctgaccttgtgattcgcccgcctcggcctcccaaagtgctgggattacaggcgtgagccaccgcgcctggctacgcactcattatttataagcagctatggacttggaggtggggagttcaaagatgaagagtgaggacactgcctttgtattattttctgaggtatgtggagaacggtctcccgatccaccttgaaatagattccaaccctgctctgaatggcattgctttagcaaagccccagataaaatttgagttcagtgaccctcctagacgtggcccatgatgatgcatatatcccctatccctttctccctgttgggtctttggctacgaaccccaggcacactttagcttaaagtcagattttgtaaagtttaatttacctaagtgaggaggaagacacaacctccttctcacatcatcctcttctcatatttacacttaacacctgaaggtgctgcactgacagcgtgttcagagggagaacgcgctttggcggtggataatcacacgctgtgaagaacgtgagaagaggagagtcatgagctattaggcggtgccacagtgccagctcctgcccaagcaattccctctagacagactgtttagggaggctgttaccagataacaccaattacttctaaaggaggaggggtgttgtgttgtctcagaaatgccttccgcagcatggagcggagtcactagaataaacatttccaaagggattgaggctcagaaaccagccatgttagaaaatttaaagaagaggaaagagggaaaggggagggagaggaagaggaagaaggggaggaagaggaagaaggggaggaagaggaagaggaagaaggggaggaagaggaagaaagggaggaagaggaagaatagaaagaaaagtaagaggaaggaagaagaagagaaagaagaactacaagaactaggacataaggattgctgttcatgggaatggccattgaaattcctggtcacagaggcaggagggctcttaacatcactttcacctcctcaagggatcctgagctagggagagagagatccctggaggaaaaagatcccaatgaggagagtcttctaaagacaaggccttctcagccagttgcggtggcttacgcctgtaatcccagcactttgggaggctgaggcaggtggatcacctgaggtcaggagttcaagaccagcctggccaacatagcaaaactccttctctactaaaaatacaaaaattagcggggcatggtggtgcgtgcctgtgatcccagctactagagaagctgaggcaggagaatctcttgaacctgggaggcagaggttgcagtgagacgaggtcacaccactgcactccagcctgggtgacagagcaagacgctgtctcaaaaaaaaaaaagaaagaaagaaagaaaagaaaaaaggacaaggacttctcttgcttttcttggaattccctacataccctatccctggtgaaagatgggacgatttgatgtggtatacagatgaagtattaagtaacaaaaaaacacagatggggagagatagtcccttttcaatgctctcttaattctttcaattcagaggagaaagtctcacttgatgctggtatgtatttacacctcattaacacttctttttttttctttttttccttgagacagagtctccctctgtcacccaggctggagtgcagtggcacggtcttggctcactgcaacctccacctcctggtttcaagcaattctcctgtatcagcctcctgaggagctgggactacaggtgcccaccaccaagctgagctaatttttttgtatatctttagtagagacgggctttcaccatattgatcaagctggtctcgaactcctgacctcaggtgatccacccacctcagcctcccaagtgctgggattacaggcatgagccaccacgcctggcctcattaacagttctaatctcccttttcaacagagagagcaggtctaagtctccctcagtggcaggtaacaaaatcaagtactctaatttaattgcttgactttgttttctttgttttaattttacagttattttctgtttacgccaagtaagcctactttcccattcatggtagtgacataaaatttattttttatttatttattttattttattttttgagacgaagtctcactctgtctcccaggctggagtgcagtggcatactctcggctcactgcaacctccacctcccaggttcaagcagttttcctgcctcggcctcctgagtagctgggattacaggcaggcgccaccatgccatgctaatttttgtatttttagtacagacacggtttcaccatgttggtcaggctggtctcgaactcctgacctcgtgatctgcccgcctcggcctcccaaagtgctaggattacaggcgtgagccaccgcgcctggctagaatttatttttttaatggatttacctaaatggaaaggcaaatttattttttaatcagtaaataaataataatacaagtgatacctagatatggcaaatatatatatatgtctatatgtatatatatgtgtatatatatgtatatatatttttagcaacaggtggccatgaatattcaaagttgagaaaccagtgctctccacccaggacctacctggtacatagtagatgctctgtaaatatatggctgttgccagattaaagccaggcttctctctgcttgatattaacgtactttttaagggaatttcaaacttgtattcttttttttttttttttgagacggagtcttgctctgttgcccaagctgaagtgcaatggcacaatctcagctcactgcagcctccacctcccgggttcaagtgattctcctgccccagcctcctgagtagctgggattacagctgcgtgcaccacgcccggctattttttgtgtttttagtcgagacgaggtttcaccatattggccaggctggtcttgaactcctgaccgcaggtgatccacccgcctcggcctcccaaaatgctgggattgcaggcatgagccacctcgcccggcctcaaacctgtttcttaaatggactattgttatgtgtgtagatgccaagtctttcaatgactagtctgtgcccaaggaaggtggatagatcaaagctcccagattccttctccttagagggttcttatatatccatatttttggcagcaatgtcaacgttaaatacctcacagtagtcccagggcagaaggtagttatgcctgagccccttcagaagtgtgttcttaggcacagacagatccactgtcacactactactagtcagggtagctcttgccacatatgtcctgtgctcattcattcattcattctatagatacttacggagcacctattttgtgccaggcattgttgtagggcctagggagacatcaatgaagaaaacaggtttttaaactccccatgctggtggagcttgccttcaccaggcaagctggagtgaaagagaccataaatacaataaatgtggaaatgacacagcatgttagaagaatgtgactgttgttttggggggacatgagcaaggtaaggggactagggattgcaagaggtggggatggggggtggcagttggggttggccttaccgggcaggcagagtctgagcaagactgaaaagaggagggagagcaagagaggcagaggatacgtttagggaaaagcccgctgggcagagggcctaccaacataaaggtggtgagatgagtgcatccctggcatattcaaagaacagcacagaggcaggagcgagggagagcatgggagatgtggtcagacaggtcgtggagagggcccttccaggccattagaaggactttggctttttcaatgaaagaagtggggagaccctggggtgctctgaacttctcaggaatgtcatgggcagctcctgatttttttttttttttttttgtgacggagtctcactctgttgccaggctggagtgcagtagcacgatctctgctcactgcaacctctgcctcccgggttcaagcgattctcctgcctcagcctcccaggtagctgggattacaggcacccgccaccacgcccagctaatttttgtatttttagtagagacggagtttcaccatgttggacagtctggtctcaacctcctgacctggtgatccgcctgccttggcctcccaaagtgttggaattacaggcgtgagccaccgtgcccggccagctcctgattgaaaggctcactcaggttgctgtgctgataaggaatgtggggtgcagagcggaagcatggaggccagttagacatccctcgggaggtgctgaactgagtagaggcagtggaagtggcgagaggagacacatactcaggacctattgtgaaagtaaaagtaaaggatttagctgcatgacccggcaattccacacctacacatacacacaagaaaacggaaaacaggctttcaaacaaaactttgtgcaggaatgtttatagcagcattattcataatagtaaaaaagtggaaacaggccgggtgcagtggctcatgcctgtaatcccagcactttgggaggccgaggcgggcagatcacgaggtcaagatatggagaccatcctggctaacatggtgaaaccctgtctctactaaaaatacaaaaaattagccgggtgtggtggcatgcacctgtagtcccagctactcgggaggctgaggcaagggaatcacttgaacccaggaggcggaggttgcagtgagccgaaatcgcgccactgcactccagcctgggtgacagagcaaggctcagtctcaaaaaaaaaccaaaaagtggaaacaacccaaatatgtatcaactggtaaatggataaacaaagcacactgcatgctccacaatggatgaaacttagaaccttaaaaacatcatgctgagtgaaagaagccagacacaaaaggccatgtatcatgggattccattcatgtcaaatgtccaaaacaggtaaacccatacagacagaaagcagtttgtgggaggggtaatgcagagtgactactaatgggtatgaggggctttgggaggtgatgaaaatgttctgaaattagtaatgatggttgcataacattgtgaatgtactggaaaccactgaattgtgcactttcaaatggtgaattttatatgagttttacatttttttttttaaagggaaatgattaggccaggcacagtggctcatacctgtaatcctagcactttgggaggccaaggtggaaggatcacctgaggttaggagttggagaccagcctggctaacatggcaaagccccgcctctactaataataatacaaaaatgagccaggcgtggtggcgggcacctgtaatcccagctactcaggaggctgagtgagtgtttcaaggcacggacatccaggaatctctattgatcagtgtggaaggagtctttttctaaggacctagaccattcagcagagggcaggacacttggggcaggtggcataattcccaatgcaaggacttgatgttggcctgtgtggcaggtggtcttactctgggcagtcagtaccctttcttggtttctctttaaagagtaggaaggctgggccgggcacggtggctcatgcctgtaatcccagcactttgggaggctgaggagggcggatcacctgaggtcgggagttcgaaaccagcctgaccaacatggagaaaccctgtctctactgaaaaatacaaaattagccaggtgtggtggcgcatgcctgtaatcccagctacttgggaggctgaggcaggagaattgcttgaacctgggaggcggagtttgcagtgagctgagattgcgccaccgcactccagcctgggcaacagagcaagactccatctcaaaaaaaaagagagtaggaaggctggagaaagcctctcatggtccagaggactctgctttccatctgtgtccagctcttggaaacccctttccatagtgagccagcctcagtgcagtggccccagtccaaaaggcctgcacaacagtaagaatcatcacttatccctccagtccatcctgtatatccagcctctaaacacactgcgtggcctgtgatagatgctcccttaaacacttgctaaataaaggagttgatatttattgagcagttaatgtgccaggcactgcgaaaagccttttatgtggattttctcctttgatcctcataacaacccaatgagaccgacacaattattatcccaattcatatctgaggaacctaaggctcagagtggggctgggacttgcccaaggtcacacagccaggggattcgaagctagatctgtcttacttgagcaagggtcttcttaatcaccacatggtggttatcaactgaccaagtttgatatctgcttcctaaaacccatgtatggaagccctgggtctggactcaggagacagtcataagctcttcctccctcccctttgggccctacacccaaccacccattttattttgttctctctttaagctctgctgctgctctccatccatcatgatttcagaaacctttatttttgttttccaccatagatgtgaaaagctggcttgtgatgtttggatttcagcttagcaacatcattcctggcttcccgagagccaaaatgtatttcgtgcctcctccctatgaattgtcagagagtcaagcaagtgagaatggacaggtaagcagaggttcctgccaagaatccaaatgattgtcatcattcccttttgcaaacagaacctcatgggagccaggggcatgtcagcgcaggaaaacattggagctgggtataaaaggtgcaggacacattgagacttcccaggaaagcgaatgtcagtgctgtcgcctgtctggcacagcacatatttcttcccaacttcgattattgccttaattgtggtatcattatctgttcagtagaatacctttgagtcactccttgattaacaacagcacagagaaatctagcagcaacctaccatctgcactgcctataagatcataaccctttcagcttttatgggatgtcataaaactgtggtttgcagtttctgtcccattaaagaacatttttatgccccacataaaacctcggcgctttatggccaagcatatacagattgagttttcagaacataatttgtgcttgggtctttctgcgatgaccgaggggtggtcagtttccatctgggtgcagctgagacctctgctacaatcagatgggaggcgttcagataacccctgctacagaaccggcgctcagcactatcaaagtctgaaaggtctcagctgctctgaataattgtccagattgtgtaactatagagaggcaaggaggagctgctgggtaattgagaacagcgttcactcagtcctgccccttggggaccactcagtggatgaatagccatcatttctctcatttatctaagtgccgttacctcccaaacgcagcctctcccattatcccagcctgtcccccaaccaccaattgagacaagttgtaatttgcgagtggagaactcaaggccaaggagataatggtgatttcatcccctgcagaaccagggcgaggatccaaaacaactgcctcaaagccaggggatattccctctggccctcaaagcctgactctctcagcctggtgcttctcaaatgttcatatgcacacagatcacccaaggcatcttgttcacacgtagcctctgactcagtagttctggagtgaggcctgagattctgctttttgaacagggcaggtcccagtgattcctctgctgctggctatactttgagtggcaaggtcttaacccaaggaagttaatgaatatccaagtcattggcctccaggaaatctagcttacagtggtggggttcgaggctgttcaaatcaacatcctgcccttcgcatcaggacattcctgggtctaaagcgggcaaggcagttgccaaccatcagagtacagaacagggcacttcccgagtggtggcatgacccggtaagtgtgtaggtccaggtgcccatgccagcaaagggtgaacctcctttaccatttttttagttagtggcaattgcaagatggacagaccacaccatcagagcattagtaatcaaccagccatccatagttcagagcactggtaatcaaccagccaaccatagttccaaaaggtaggactcccaacagctcagatctggatagacccaacactagttcttgcaggagagttccaagcctttctctttgtgactctttttgagagagctgcccagctcatcttctcagctttctctgttttcttatccccacagctcattacaggtgtccaacagacaacagagagacataaccaggccttcatggctctggaaggacaggtcattactaaaaagctccacgccagcatccgagagaaagcaggtcactggtttgccaccaccacgcccatcattggcaaaggcatcatgtttgccatcaaagaagggcgggtgaccacgggcgtgtccagcatcgccagcgaagatagccgcaaggtggcatctgtgctgaacaacgcctactacctggacaagatgcactacagcatcgagggcaaggacacccactactttgtgaagattggctcagccgatggcgacctggtcacactaggcaccaccatcggccgcaaggtgctagagagcggggtgaacgtgaccgtgtcccagcccacgctgctggtcaacggcaggactcgaaggttcacgaacattgagttccagtactccacgctgctgctcagcatccgctatggcctcacccccgacaccctggacgaagagaaggcccgcgtcctggaccaggcgagacagagggccctgggcacggcctgggccaaggagcagcagaaagccagggacgggagagaggggagccgcctgtggactgagggcgagaagcagcagcttctgagcaccgggcgcgtgcaagggtacgagggatattacgtgcttcccgtggagcaatacccagagcttgcagacagtagcagcaacatccagtttttaagacagaatgagatgggaaagaggtaacaaaataatctgctgccattccttgtctgaatggctcagcaggagtaactgttatctcctctcctaaggagatgaagacctaacaggggcactgcggctgggctgctttaggagaccaagtggcaagaaagctcacattttttgagttcaaatgctactgtccaagcgagaagtccctcatcctgaagtagactaaagcccggctgaaaattccgaggaaaacaaaacaaacgaatgaatgaacagacacacacaatgttccaagttcccctaaaatatgacccacttgttctgggtctacgcagaaaagagacgcaaagtgtccaaaaggaacaaaagaacaaaaacgaataagcaaagaagaaaacaaacaaaaacaaaacaaaacaaacacacggaccaataaacaaagaagcgaagataagaaagaaggcctcatatccaattacctcactcattcacatgtgagcgacacgcagacatccgcgagggccagcgtcaccagaccagctgcgggacaaaccactcagactgcttgtaggacaaatacttctgacattttcgtttaagcaaatacaggtgcatttaaaacacgactttgggggtgatttgtgtgtagcgcctggggaggggggataaaagaggaggagtgagcactggaaatactttttaaagaaaaaaaaacatgagggaataaaagaaattcctatcaaaaatcaaagtgaaataataccatccagcacttaactctcaggtcccaactaagtctggcctgagctaatttatttgagcgcagagtgtaaaatttaattcaaaatggtggctataatcactacagataaatttcatactcttttgtctttggagattccattgtggacagtaatacgcagttacagggtgtagtctgtttagattccgtagttcgtgggtatcagtttcggtagaggtgcagcatcgtgacacttttgctaacaggtaccacttctgatcaccctgtacatacatgagccgaaaggcacaatcactgtttcagatttaaaattattagtgtgtttgtttggtccagaaactgagacaatcacatgacagtcaccacgaggagagaaaatttaaaaaataaaaataaaaacaaaaaaaattttaaaaattaaaaaaacaaaaataaagtctaataagaactttggtacaggaacttttttgtaatatacatgtatgaattgttcatcgagtttttatattaattttaatttgctgctaagcaaagactagggacaggcaaagataatttatggcaaagtgtttaaattgtttatacataaataaagtctctaaaactcctgtggacactggtcttgtgtggaaatgatttgagatgagaaaaaggcaagcgttactggagaaaaagaggagctgcccaaacgtgtggaggctgagctggtattttgaacacctgggggagcttttttcttttcttttttttttttttgtgagacagagtctcactctgttgcccaggctggagtgcaatggcatgatctcggctcactgcaacctccacctcctgggttcaagcaattctcctgcctcagcctcccgagtagctgggattacaggtgcaccaccacacctggctaatttttgtatttttagtagagccagggtttcaccatgttggccaggctggtctcgaactcccgacctcaggtgatccacctgcctcaatctcccaaagtgctgggattacaggcgtgagccacggtgccctgcctggaggagcttttgttagaggtatcttagtgctccccaattctagagctaactctgcctgcatctgcagccttttctctgcatggagcagaggtggacagtctgcatgtggtgtgggtgggcagtgaggaccctcagagcctccccaagcatggacagatccctctagccttcctgggacattcaggctcctccctgcaaccacattctagttctgagagatgctggcagaaattaaaggggagcattcactacaccgggagacgcgtgcacgcgcatgtgtgtgtgtgtgtgctttcatatttctttccagactacatcaacttaccccaaatcttgcctatttgggacaacccaataagaaaagcactgctggtttggataacttttgttttacatcactcctaaagttagaataatactatcattaattgctaacatttattggtgcttacttggtgcccagcatagtgctaagggctctgcatgcaatattttagttcgtcctcacgtttcattcattcaatgacattttcttgagagcttccctcgtgccagggggaagttctgggctaagttctgggtaagagaggtgagtagacacccatgggcccttgcctcatgaaactatgggcaggagtggacagacagtaggaaaagcatggcatcaagaagtgaaaatgggctgggggtggtggctcatgcctgtaatcccagcactttgggatgccaaggcgggcggaccacttgagttcaggagttcaagactagcctggccaacatggcaaaaccccatctctactaaaaatacaaaaattagccgggcatggtggcacatgcctataatcccagctaatcgggaggctgaggcaggagaattgcttgaacctgggaggcgaaggttgcaggtagccaagatcgtgccactgtactccagcctgggcaacaagagcaaaactccgtgtcaaaaaaaaaaaaaaagaaggacacagaaggtgggtggttaggcccgagcacaggagaggatggcagggttcacaagacacagttagaggttcgatttttttttttatgtgc

SEQ ID NO: 609 - DNA, 662037 bp, Homo sapiens
  source 1..662037: mol_type = genomic DNA
gtccttgttctcccagtgctcgatctgtttctggttctgcacggtagttaaaaatgcaagtggatttcctaacggccgagtacaggtacaggtggaggtcggcggaatcctctgctctgaagctgaaagtggagggtggcgcgaggcggctggcgcgacgaggctgagagcgcaccagtctccgccacgcttccaaggacaggttggcgacggccggggcaggcctggtcgcgggctcctagccctccacgggcagactgctggtcccaggagagggcggggagatgctcgggcgcgcaccagggagccgcactcactcggcagccccaagcacgcacgccccacctctgccgccgccccgtcccggacccgaaaggagcctgaaggatcccgccgaccacccagccagagagcggttcggctcaggtcgcccattcggagctacaaaactctggaacctccagcagtttcggaagctccgggggagggctttcctgcagacagggggcgggagctagggagccgggagccagcgctgcggtgggaacttcagtgagtagaaagtggccagtgtcttgggaggagcagcaaactttttttttccctcccacagcaaacaaaatcgaggcagggacagtgtccggccgctaatctgaggggagaatggagaggaaagaagagtagtaaaagtggggagtggagccttcggaggactcccgggtccgcccctggccaggtgatgcggggcggaggcctaggtgcttgaacctggggggcagacaattgttctgctgcagtgcccaccaggggctggtaaggaagtctgagtgtttactgcctcccttccctgtccaaaggtcatttgcgcttttcggtctcggacgaaagaacactgtggaaaggaaggcgcgggtcattttcagaggctctgcaaaggacgggccgcctaccgggggtggaaatccttaattacacccttctgcctcggaatccgtcttcccggcagtgtcttgcactgccacctcctcgggtgactcagctgacctgaaatgcccaccctacggaagatcaagaaaagtagttttctaagaaggttagaggtttgattacacagagaagtgtttccacttaagtccaaagcaattacccgccccctcccccagggccgcctccccgccacccgcagcagaaaaggacagacccccacgcacgtacccccattttgttggtgcgtgtgaatttcaaatggcgcagtaagttcattagtgttttcaatcggcggcgggcagacccctcatcagagccgaaagccggcaagagccattcatcagcgtgaagtgttattcacggatgacccctaaatcacggcgagagtagtaaaggcactgattggtcacagcatgggagcctcggtgctttcccgaacccgacgcggccgggaggagggaaggagggaggggcggcgaacgtggttcagtccggcaaatcccatttgacagaaaaaggcagtaaacggggaatctctttttttgaataaagaagaagaagaaataaagtacctgtcatcttgacaagtggcggagcggaggagtcaaggattataaatgatcacagccaggtccagctcgccccgtgattgggctctcccgcgatctgcaccgggggaagcgcatggtaggctcctctcctctcctcctctccctcgcacactcccgcacacacacacacacacacacacacggacacgtgtacgcgcccgggctcgggcacactcggcccggcgcgtcccccgccgcacaattacggtcctggatgccgctccctggccgggcgtcccgcgggcctcctcacctggcccttctcgccttcctcctccctcgcctccccggtcctcccgctcgcgggctgaaccccgaaaactccggcccggcctggtccgccgccttggaggaggctggaggggccggcgggcggggagagggggagcgcgggggagagaaagaaagtgaactcattggcgcgcgggcgccctcccctcccgcgtccccgggccgcgcggccgggggcgggcagggaaggaagttgtaacactcgcgccccctccccgcccccgccccgccggcgcccgctccccgctccctcggcggggcccccctcccccgcgcccggctcctttgaatttggcccggcgcggtgtgcgcgcggctcgggcggacgcggcggctgctgccggggagcgagccggcggcgcgggcgagccgagcgcggtaagtgcggcgccgccgccggcgcgccctccttcctttatggggtcctagtgccgggccgcggcgccgggagctggcgggcgcgagctgggacggcgcgtggccccgggaggcggcggacgcggggacatcttctcagcgcgcggattctctccacggtccggcctccccgtccccgccccgccctcgcgccagccacctccggccgccggctcaggtgggaacttcgccggcgcctctcgcccggggagccaggcgccgcgcccccgtactggggagccccggggtccctgaggaaggcagtccggaggctgggcgcccagtgggggcggggaggggagcccgccaggtcctcttcggcccccgatgtgtggcgaggccccgcgtcttctgcgggggcgtcttaacaggatcctggggggcttccagcgagcggaaagccccgggatgtcaccgctttccggggcaggcaggggacagaaggcttctgcagcgatcagggagccaagttgaaaaggagtgaaggagggagagtgcggggcgaggggtagcgtggggagtggtggatcacggctgaaacttgatcgggaaactctggatggggttggaaacacacacaaaatatcctgagctgggcgtttcaaaaattacgaatttatgagcctgcaactgagattctaagtccctctcgtgttttacaaccgattacaaagagcttcacgtattttaggttgaggcgggttgtgtctgattgatctttgctgagcatcttactatgcagcttggattccattcttactgcctcacctttaaggtagctggagtggtaacttgttaatttttattgtagagagagggtaacaagtacttgtaccgtgtaatacatcacacacgtgtgtttccccaagtcactgtaatttggaggtagagaaaagtttccaggtacgtgtgaggaggtgcaatggaaatgaaaggctgagagctgtcctagactttttacagggccccagacggctgggatgcccgagaacaggactgtctcttcatcatgctctatttcttatcttctgacaatgtattttgtcaaacattggtagactctggcagaatccactgggtggtcttttcactagaaatagacatatgttgaggcattacctttcccttctcttgtcaaaagaaaaaaggtggatatggcatctctggaaagcttggaagagtatcccaaaagatggtattgtaactgaacagaacttggtgatttgatcccttagtgaatttctttaaaataatgacgcatatccctttttccccactgcctacttggagaagtatttgtagtctttatgtattaatatattgagaacagactgactttagaattaagagcaactgtgtaataataattatctattttaatatttcaattaaaacaagattttataaattcaacaatcttgctttgtgcattccttaatacacttttaattatctaaaacttcgagcatgtatatcttaatatataaaattcttgtatgagccctgaaagtttggatttgtaattctaaatgcagagtaaatatttaattcttgatctaagagtgagaggttagttcagtaataagacttgctaatcccactttaaaatgtcatggcattcacaaattattcctaaattcttcaaagataggagtttataatgagtttagttattctattgtgtatttcaggattgtctgtatctcttcctgttgcatttcccttaacaatcttgttctttttttcttacacgaattttattattcctcttaatcaaagatttttttctaatagtaaacaaatatatcttatgttaaataacttagaaaagaatagttagaaaaagtagttcaaatcaaacacacattttacatgcactgcacagtttttataaaaaatgtagttgtactaatcaccatgctaacgtttatatatttggaaaactctgtgaaccccctgtgccaatagctttatgttagcaacctatgcaccctaatgaggattacttgattattgggaataaagcagatagatttatggaattgtgactagttattcctccaaacgggattattttgcatggctgtgtttattttctagaaagatgttttaggtaaattattgaggcttttcttactatgattctgtaggcgtgtcatcagtcttttggttagaaaagggaacctgccttattagggtgaagacaaagaaagataaggatgcttatctttgaatagaaaaaagctcctaaagagagtgaaaacttttaaacttattcagaaaggaaacctagctaaacaataatgatccagttagtaagttcaagctactctttcttagctttgcttctgggagccaagagtaattattctgtttgtaaagagtcaagcaaagaagatagcaggaagaagcgcgtggctatcgttgtgagtagagtgacctgtcagaaatactgaatcaccgttaggctcggtgtacaaaaaatgatgtctttgcaatagctgttaatgtatgtttggagatgctgaagtttatcctacctatagggatactagggaataagttcagagcatggtcattgtctgatatgaaagcccaacaaagccaagtttattagtttattaatattggttatttaaataaatgcatgtgcctcctttttattaaactttattttaccctgtaaaaatttgatttctggatggtggttgaatatcatccaagttttatatttatttgaatcagtgtgttcagcagctgtgatgaattgtctgcccttttctggaagctgtgcaacctgttaagcatgttgaattacacattgctcatctaccctgtgtttcgtttgatagtcagatatccgtttggacttcgagggcatacttttttttacttaggttgagaatatgagcaaagaatataatagtttgccaccaaacgtttaccgtggtccataaccaattacatattcctttaaatttctagttgaagttagtgttgtgttcatagttgccttgtaaagtggaatgatagcccgtaggaaaattgaacacatgcattcggagtaaagtctgttgaaaagataacacaatattacgttatttaaaagtttcgacaactaagttttaaaaattattttacgtaagcttcttttagaatacatttaaaacttatttttggaaacatcagctggtttaacagacctgatggaaattttgtgcttcaaaataaaataaaataaaataaaccttagtctgaaaactaattgttgtgtcttataaaacctgatttattttatacttttttataccaagcatgaccattatgaagctctccttctaattgagattaatgtttctgagcaaagaagtggtttggagggctgcgttcattttgagtgctgttgtaatcaattttagatacagcattccacaatggatcagtttgcatccaaacctgccttattatgtagaattaacttgttggtgattgatagtgatacttctccatcttgaaaagtcatttgtttccaaacgagtgtgatggcttgtatgagtttcaaaagattgcttctcataattaaaacatcctattggggacctaatttgaactttttctaagaattatataaaacatgaggaagcaattcattaacatatattcaactcaaatagcctattttcccaaaatgcaatatgcctcaaggcatattttcttgcccatcaaaggattttatggccttttgagtcattaatagtaactgtaatccatctaggttatttccttttttgtttgtattaacattctagttcagtttttcagagatttcttagaattttggatggacctcttgtgcatgtgttataactttatttcataagatggtgtaatcctgacaatgaaagataatgcatgtggaggtaattccttaatggaaatgtgaagagatggtgaacgttatcatccccactgtgatatttgcatttgtttcttatctgtacctggtcatctttggttttatcagcttttaagtctcttctgaaagaccactttaagattttcttgggctttggttcatattgcattgtgatacatgttgtcccaatcaaataaaagattaggagcacagaatataagattaatatagattagcattctaatatatccacagtatatccatatatatcaatatatatccatatatatcaacgtatatccgtagtatatatgatttctaaagaaagatgtaactgctttctagtgcgtgtaaacttcccacaatggcattactctttactttcaggaaggaaaaaaacttgataagaactatgtatctttattttattctctgtaatgatagattcttggcatcggattggtgtttttccagcttaagacatccatttaaaatagttttaaatgctaaaataatgcagttaaattaccattttcaaaatgttattttacacaagtgctagagtataaactatcaaaatgcagaaacatgccctgagatacacagatgtttcgtacactgaaactacaataggattcattcttttgaaggaattgcaataaaattttctgtagttttggttaaataacccaggtgattgcctagctagaacagctacatggaatttactaaaaatagtgatctactcaaacccatgtctttctattttaaattagtcactgcaaattaatgtcagtatcatagaatgaactcataagtcatatgagtggatgactgaaaccatatcatgtaataataataataataatgagattttacttccctgttgataactttcttggaatcttggaagagctaggatcgggtagcactgacttttcaaacaagtttgtgataggtggcagtcttaaccgagttccttgacttccttcagaaaataggtaattcttatatgtttaggagcatgtgtggagtgaaatgtagcataacactaaactatgcttatattcttttttgtaagtttaggagtcaatcattacttatggagatgtggcatttattactattattacttactatttgacccacattcatagttctgtagtttgtactagagcatgcaaaaacacagtgataccttctgaaaataccttggggaagacatagtgcctgtattcacacttgcatttaatgatataaaattgtatcatttatataattatataaaagtcatgggatacaaaaattgcgtttgttgatagtatattctcaaatattgtggagtagtttttacttctgttagagtagttggggagaggtggggataatgtgatttggttgccctgggatgggatcatattaataataaccagctattttataactgggtctacttggtgtctgcctcaaaaccaaaaaaagataagggaaggaggaagggaggaagaaaggaaaagaggaagggaggggagtaagagaaagagagagaaagaggagaaaataggaaattgaatatcttttataatgagcgatggccctttgagcattttctgtatgtagcagggtgtgtgacaggaaaagcagactaaagggaaaattttgtcatttattttaattgggtaagtacagaagaaaattaacttgtaaattttttcacttttaaatatatgtattttcaatccctgcaggagaaccagagtatcagtttttaaatttaatccaagacattccaaatattgtatacagttgcttatactgatggaaaaaagaaaatgtactaagagctctattttataggcatgcttgctttgtttataagactgaaaatcaagttatagttttctatgtagagacttaaaaaaacccacacgactctgattatttaaaaagaccatttaggaggtaacttataaaggccacttacctttaaagatacagctcttaatatattttagtcattctttcctttatttaattactagtaatatttgttagaattcttatgctaatacctcttcaggttgccattacttagaaaggattaacagcttggtagtgactgtcttccttcagtccgattccgtagcacctctgaatgcagtggctgtctatgaagatagcagcacactctgaataagagggtgacgtggatttgtggttctctgttccctcccccaaacagaaaagctacttttttattagaatgaattatttcctcttgagttaaattatgctcaactaatattgtgactagaattgttgacccccctctctgcataaggaggtgtcttttttgacaataggggcgtttccaaagaagaggtcctcactcaagagcgtctccagcatcctcttgtgtccagcatgtggcttctatactgggatggtatcttaggagagtttatgttcttggactacatactagaaggtacgttatgcagacagtgaaaagacaggattgaattattagaatatactttacagggagaaatgtgtgaaccatgttaaataccttgcatgaagcatgtgcaaatatatgaatatgagattatgcttattttggtaaaaagtacgctattgaaaagtaaactaattgtttattttcagtctacctaatgttctttttaaagagtaacatctattctaatactttttatcagagaatttggaatttgtcaacacgtaggtagaaaaaaattggcaagtgactggttcttttaaatagctcttaagaaaattggcacagagcttgccatttgaaataattatgaaaaccaggggaagccagctgtaacttttatttctttcagaatttataataacttccagctaaagaaagctatcactcctatagttcttgaagaataaatctatgactttttttctcttaggagcaaaaaaacaaaacaaaacaaaaaaacgaagaaacaaaagcatcttgggcagtgttattacatttttctctatttataagcaaaaatgaaatgaatatttaaaactttaaaattttttcacttaaattttgtgtaatgatgagaatagttgtgtaggttaaaatactgcaaataataaaaacgaatctagtaatctaaatacatattatagatatgtgatgaactataatattgcaaagaaatgaaaactgcagtatacacagccatattttgtctcttgattgtcacaaaaataaggcactcttaaaaggatatggctgaattttatgatggtatcagtaatagtgagaacaagttgacacaatgaaaataactgaaatgttattcctcatcttttagctaatacttccagaaaattccaaaataattagaaaagctcttgaaaataatgagacctactaggagaaagaaagtacatttgttgccttacagaactattaatgaatttaatagttcagaaagggttcagaaaggggtgaaagctgaagagaacctctgccaggatgttatccctcaaatttaaatagaacaggcattttctatctataatatgtttataagttgatatttctgctttaaatttcaacttgtttttcttctatggagctactaacatatttaacatttaaaataaattttaatttaaacaaaaattaaagttgttacttgtatgtaaggtatacctgtcaaaccagaaatgagtccttacttttagaataatttttatgcttccttatattttttctttccaaatatgagtagaataccctatcatgttttttgtgattacaaaattaagtaaagcaaattagtcctcaattgttactttgtcctagaatatacaatctctgaatgaaaagactctggcactacaattttttaataaacaatattgatatgttaagctgatttgccagtaagatttttttcttcgatttttactaatttaaaaaattacacatgtgacagggactttgagtcaacactttactaaagataaagtactttaaaaatttaaagttttttatcctgtgttttggttgtgatataattttctatattgttttaattagtatgatagtagatgctacagaatttgcttagtgtggtaacttaaaccaaagaaaaaagatgtaattttaaatattaaatttattttaaaaattcttcccgtaaaaatttgaagcgcagtaccttttagttaaaagtgcagtctcaaacagaaaagacctaattttatatattttgagattcaaatattgatttactaaagatgcatataaagaaaccttaataatttaaattatctacacttgggcttttatcttttatatgtttcaggggacttcagatctttctttatactggtaatatgatttagaacccataaataaagaattaaaaaatattagtaatcaaaacatacactaactgaagtctgtttaaaggcagcctgaaaaagaaattagatgatccgataattctggtgttctaaaaattataaaaataccttaatttaatgaatattacagtttatgtaatttagatactgggagaatatcatgaatatacaatatgtaaaatccatacagataacaaaaaagttactacaaatgtgaaagatgaatgatacatctttagtcatacagtgtgcatgaatgcatttgcaaaacaagtgtcaggttttaagatacatcaattcttggttttctggtttaaggtaatttcaataaaactaatacagtcttgcatttcattcaagtatgatgttaggaacttcggtcaaccatcagtatagccatgaccgaagtccattttctcattctgaaagttttctataaaatctgagccttcaaatctagttctagttcagctccactatgcagttgtttgatgtcttgtgacaaatgagagatctgaaggagaggactgagtgcttgttctatgagatgccatcagttaattcttctcacattatctgatgaaagtagcttttagacactgtattgtacttcagatgggaatcttaacatatcaagtttggtaaattttatattgagctatcagcaaaggacaatgtgagttactgaaacaaatcatgaatgtatcacgtatttcatgtaaatgtgatgtaagacgtgtggattggttgtgtaattaccacttcaactttaaaaagcctctataattcacttttaaaattttaaatgttgaggaaagtgaagtataaatagttcatactcttggaaaaatgttactaatgtaagcctcgtagggattattttttattatttttatcttttgaaaaacaatgataccttctaatgtaatttttatcacttaattttaagtctggaacataatcacttgatttaggagtagatataaattattaatgcacattatgctttttttctttttttttttccttaaaagaaagatctcaaaggctttcaggatgaggttctggttcttttactattaagaataattggtataaatggctaattttggtgggagagtgttacatagtctttaggccctcgttattacttttaaaagaatagcccatcggggataggaagctttgtggataagctgccactctttgatgaaggattatacattctcccctaaatctgtgatcccagaatctgttacacaatagttttatcaagtagcactagactagctggctatcatttcatttttctttaaaaagttaattggtttctttcctaaatctaatatttatatggaattttagtctaaatatatgttaggtattaatagattccgtgaaatgcagaggttactattttgatgcaagataatgaagccagattatctattgaagaatgcttttccatttatgccagatgaccagggcattgattcttgcggggtactcagtcatttaagtggggtacctcctcagtacagtctgcaaagtccatggcctgatgcaagttctctgtaagcttttcccctggttaataatattgaaagcaacttgagaagaaaatagtgacatataaaaatgaagccatcatatatatgagggttagttaattttctctgaacgtgtatgtaatacacgtgtatgtaatagtgagcatattatagcttgctttggtcatggattttaaaaaagaaaatgaaaggacattatattatgtgagtatattcccaacttgtaatgaacaattgtttgcacagcataagagtctgataaaaatgtgtcattctaaggagacctctgtttttttggtccaataaatacattgaaaattgaaaattaagtggtcagattacataattgtgtttatatcagttctcatttagtcagcgtcaatcaaatacaagacaattggttctattcaaaattggaaaataccaagtattggctaattgagtcattttacttgtaaaacacaagtaatgccacctaaaaaagcataatttattatggggaattaattttccttaataaatgggctcttatttctgaggctacaagcttctaaaagttttaaaagagtagtaaagttcactataaaaattgcaaagtgagggaatacagttaagtttttctacagtataagtaattctggtgtctgtgtacttactcattgaaacatacaatcagcttcaaaagatggctctttataattgtcacatttctgttctgcgtcatcttctcaaatattttatatctataataaagatatatgatactaaaattattttctgttcttcagtatttataataaggaaactatttaaaagattatttttgtgatcaattcactgtgccagttgattattgaaggcttcatcaaggactctagactttcataatctttcataattggtgtaaatgtaatgttaagaaataaataatactgcctagaaatgagccagatgtaaccaaatttcaattattttatgagatttttagaagaataataatttaaataagaccttcaaacattttaggtaaataatatacaaattttgaatttattgctagtaaaacacaaggtttaatacatatcttaaatcattgtctgatcgagaaacattactcatcatttattatttcagattcttggaatatatgtgtttcaatttagagtttagaagtaatacagattaaggattttgaagagcaggttttccttccatctttcatcagctctgtagctgaaccctcacaatccctttctttattattctaagccactatcagattctaatctttgctgtctccacagctgtttgaggattttttttttttttttttttgcaaatgtaattacaagtacatgtgttttgtgcaactcacttcctatgaatgttggtgatagaggaagattaaaggagagcaggactatgttgtgtatagatccatggatgaatctattagttttcgagtcattatgacagtggttatcaggaagaactgcaaatgttaaaacacaacaattttggcttaactaatatgcagaaaaaaagtcactgaaagtttaacaatttctccagaacaagtgcatttttatgaggtacgcgccactgaagcaagtgattgctacacttctgtgaatcgtttttttcttttctttttttgaataatttcgactttcattttagattcaggggtgcacaggcagattagttacatgggcatgttgcatgatgctgaggtttggggtacggatgatctcgtcacccgggcagtgagcatagtatccagcagctaattttgcaaccctccccctctccccgccctagtagtcctcagtgtctattgttatatgcatcatttttctaaagtgatgccataattgaaaatctagacaaaatatgatagttttttttactttaagaaaaccccattaaaatatatatttagagagaaacgtattaaacccttacatttaatttgatgtagcaaatttactgaatctgtaaaaattacaagtcaatataaatacaataaatctctgctctgatttgaatgtatatcttcatttatagtgtgtgctttactgacacagccattttttctccctcaattcactcaaatccagccccacctgttttgtctgtgctcttgtgtccaagtggctgtgtcctgggaaagatgagaagaaataaggcctgatctcagactcacagggagttttcgtttctagttgaggcatgatataaagaggtaactgatagtaattaaagttattaagaaagccaggagaggtaatagaaggattactactttggtcagatcgtatgtaaatagcccatgggtctttgaaatgccagagaactgaaggggggtacccaacctaatggttctagcatccacccttcctgcagcatgcagacgttagcagtgccttgaaactctgagacactgcaaaggtcttgtggccttaactgctaacaaataacaaaggggccctggggctcacaaatgtttcgaaacatagtgaactgagacagtaggaacacttggcttatcctttccccccaacccagtcgaggccggagatacccaacaaagtggggcattggaagccagtgacctgagaagaacaaaagctgaccatttgcctccttccctgtggaataacttggcaaaatgtttgttgcacgcttgcccacaaaaaccccctgtgaaggcagagacccttcttccctgttctcagtagagcctcagctgctgacacagtgcctggccctgaagagtccaacagtaaataattgatgcaggaatgaaatcttccctcactctacatcaatgtcaagtgtcctcactagagaatagctcctctccacaaaaggtttgtggcctctggacttcggtcatcacctaggactgctcaggttctaaaagtctatggttctattgtttgaagatctcctgtgattcatgttaaatagatagtaccaacacagacttgtcagcatttagatgaggacgaaagatgtggctggagactatagatctctggaaaaagacaagactttgaccaggagaggtaagggcgttccaggagagggaaacacaatggacaactgaggcatcaacggtagcaagcccaacttcacgaacaggtaacagcaacaccagcaggtagcacagatcaatgaatttggccagattatttgcatattaaattttcacatctaccaagatatgcgtcctctcatatttcttaaaatatgtagttctctttgtcctttttttccccatttttgaaagaaacattggtacagagaagtatttctttactgttagaaaaacaacagagcaagtttgatgataaacaatgttgacatagcctcagagtcagagacacatggggagtggtgaggactgtgaactaaagggcacacgctttctccaaaaggaggtgccacgtcgcgcctctagactagtcattgccatgtgagggtgaaacctagtgttgccagattgtgagatttctcaagaaatgccagaagatggattgtgtgaaatctctagattttcaaatgtgagctcattggggtaataaaaaacacacaacatacaaaactcacaaatcaaacaaaacaagtctgcagcctgggtttggcagttgggctaccagtttgcaacctgtgatgtagctgcggagatctgcatggatttgggagactgtgaatgagcagtaggtctccagcagaggctgcctcatggagaaatccaggaagggctggagagagagcttgggtccagattgtgggtaatcttgaatgccatcctcttctacccattttggaggagaaaatgttttcagtttacagtacacttcttcctgctttaaagcagaaacctaggctgccggcaggtcttctgtacagaattactcatggcagggagggaacgggttaagaggcagtagcacttaggcctatcctttgtccttgcccatccctgtctgcttatctctccatctctgcctcccagagtcaatacaaggctcttgacccccttaatacacctattgtttggagcggaactgcagtggccagctataactaaagtatattgggatgtttttgctagcatttgaatgttgcctgaataccgatactaaattctctaagaaaggagagtctaatgttaaatgtgatacattggaataagtcttaaccattatgttaaaataataaaaagatcaataaaattcccctagcacactggttttcattactttgtggtgaccaagttgggctccgaaattagagaagccctcaaatcccattctatcacttacgtgctgtgtgatctagggcaaagctgcctcgtctctgacccttatttcttcatctgaacatggggtttgtaacgatggctggtggtgttgctgttgccaggtgcctggcccggggcccccacacagcagacatggtggagatggggatggcagcagtgtcttcagttgtcggagtcattgtcatcggcaccttataatgaacgtcatgcttaccattatggttttgtggagggtgttggaattgaatttggagactgaagttgaagtccatctgtaccatgaagttgctttggaaaccatgaaattgagatgttaaacataccctcttgtggggtggctgtgaagatgaaatgagctaacacacagggaggtcctagtggagccaggtgtgcagtgagcaatggatagtgtgtatgagtgtgtgtgtgtgtgtgtgtgtgtgtgtgtgtgtgtgtatcaggatggtgccacatgctttccagccgtcagaatgctgggaacaggagctctcatttagggaagaatgaccacaacgcagtcacacagctcctgcgctgtatttggcctgtcacctagaatcttacttttaattaatgaataattcttagcagcatggatccctggcttgccaagttacccattagaagcgctcagctcaaggggaacgggagctgagaggctgttccagtccggcccgtggatggccggagaagtgacagtgtgtgatgtcttatccgggagcagcgacacgatagcattagcgtagtggacgctcatactgacggtccacagttgcttcagagggcaatgtgtgtgatgcatgttccaaaatttatatgaaaaagacggaaagatttttgacatttcgagagagagaaaatttacttagacacatctcctagtgatgccagataacagggatgctttgtgggaaaaacaaatctacctatacagggacagcattctaagtatattccggttcttttttttgagacggagtctcgctctgtcgcccaggctggagtgcagcggtgcgatctcggctcactgcaagctccgcttcccgggttcacgccattctcctgcctcagcctcccgagtagctgggactacaggcgcccgccaccacgcctggctaattttatgtatttttagtagagacggggtttcaccgtgttagccaggatggtctcgatctcctgacctcgtgatccgcccgcctcggcctcccaaagtgctgggattacaggcgtgagccaccgcgcccgcctattccggttctttttttaaaaaaatgaaaataaatggttacctttttccacattacggttagaatgacctaacgagaatattctatttaaagatttagagattccagaaaaatgtctatggaaatgttgtgcccaaattttacaatgtaaatttaccatgtattgatttattgagtagaaaaaattacaagacaaacttgaatatggtaaaattatttctgttccattcacagaattacttagcatttgaatctatcttgtttgtttcttttaaaaatgtatcatgcagagagaccaataccgtaggatctcgctcacatgtgaaatctaaaaaagtcgaaatcatggaagagtagaatggtggttaccagaggctgggatgggacatggggaaggggagacgttggtcaaagggtacagtttcatttagatgtgggaatgagctctggtgacctattgcacagcaaggtgactgtaataataagctattgtatatttcaaaagagctataagagaggagtttaaatgttctcaccacaaagaaatgataaatatttgaagtgagggaaatgctaactagcctgatacatccttccgtaatgtatacatgtggattgagaaattacattgtaccccatagatatatacacttgtcaattaaaaatataatctaaaaatattaaaaatatatgatgcaggccaggcgtggtggctcgtctgtaatcccagcattttgggaggctgaggtgggtggatcacttggggtcaggagttggagaccagcctggccaacgtggtgaaaccccgtctctagtaaaaatacaaaaattagcggccgggcgcggtggctcacgcctgtaatcccagcactttgggaggccgaggcgggcggatcacgaggtcaggagatcgagaccatcctggctaacacggtgaaaccccgtctctactaaaaatacaaaaaattagccgggcgtggtggcgggcgcctgtagtcccagctactcgggaggctgaggcaggagaatggcgtgaacccgggaggcgaagcttgcagtgagccgagatcgcgccactgcactccagcctgggcgacagagcgagactccgtctcaaaaaaaaaaaaaaaaaaaaaattagctgggcgtggtggcgcacacctgtaatcccaactactcgggatgctgaggcacaagaattgcttgaacctgggaggtggaggttgcaatgagccgagatcacgccactgcactccagcctgggcaacagagttgaggctcagtccaaatatatatatacatatatatatatgtatatatatatacaaatatatatatgtatatatatatatacacacacacaaatatatatatgtatatatatacacaaatatatatgtatatatatacatatatatgtgtatatatatatacacaaatatatgtgtatatatatacatatatatgtgtatatatatatacacaaatatatgtatatatatacacatatatatgtatatatatacacatatatatgtgtatatatacacaaatatatatgtgtatatatgtgtatatatatacacacatatatgtgtatatatacacacacatgtatgtgtatatatatacacatatatatatttgtgtgtgtgtgtgtatatatatatatatatatatatatatatatatatatgatgcaaacatacatccactaatgtattagtcggttcaatggatttctttcttttttaaaacaaacaaacaaaatcaatgtcttgctatgttgtgcaggctgtcctcaaactcatgggctcaagcagtcctcctgcctcagtctcttgagttgctgggattacaggcaagctaccacacctggcgaatttcttaatattttgctgaaagcaaattttaaacatttgtctttgaaatgttagttggctccagtgaaaataagtcctttttgtttttcagctctaatgtgttcagttatcatttattaaacacctattttgagcccaacattggcttaggctctgtgaagaaaggggtacaaaaatagaagaagacatctattttagaagctccaaagaaatgtgtaataattagacaaactaacactgtgagctaggattaagtctgaagatgtggaatacaaactgtgcactcggaactcaaggaagagagaggaatgtatagggtggggtttgttccagtgccatctcaacctcatcatttccaagttggtattctgaacactctcttagcctgttcatgctgctgtaacaagacacctgagactagacagtttatagacaatagaaatttatttttcagtttggaggctgggaagtccaagatcaaggtgctggcagactcagtgttccagcaccttgctctgcttctgagatgttgcctcaaatactgcatcctccagaggagacaagctctgtgtcctcatgttgcacaaaggatggaagtgcaaaaagggcttagctagtccctcctgctcttttatgacactaattccatccatgagagcagagccttcgcggcctaattcccgtcgaaaggcccctcttcatactgttgcactggagattaactttcaatatgaacttcggagggacacaaataatcaaagcatagcagtcactcttctctcaggcctgaggagcaaagctgccccttctcctgtatttgtacattatcccattatcctgtttgttcacacatgctggaagcttaagagccatcttcaagacggctccatccctcactacctgtactaatcagtcattacgtcctgctcattcttatttcagagtttctggtccttgcccctcctttccatcctcactggcagtttcctctctagggctctcatccctcatcttaattgcacagaatgtcttctaactgggcctcctgccacccgtctttcgtctctccaatccatttttctagattgcccctggagagtttgcctcctaaaatcctgaaccgatcttgtcacgaagaagcccaaactcagcatggaagccgagatccatacctcctgatctggccaggccccttccagccccgcctcccatctcttaggtacagtgtgcctcacacaaggggatttagttagcatttccaagcacgaggcgagtcttcccactttctgtgtcaggttaaacattctctgtgaaattgtccttgatttgctcagtagaattaggtactcatctccctctctctttctgcccccatgctgctatagtgtttctacatctatttagcatttacctcatgctgcacttttagtttattagaattcaagggttctaggagtaggaaggaatttagagatcatacaggcagagcctcttattgtaaatgtggcacaactgaggataaacgtgtagccctcccagagtctacttttcagttgtccttgagtttgatctcagcatcattgcccaagaagagcttgatttcctttgctctgtgacatctcagcaactgcctctctactttcttggtatctgtcctcttctagttggtctgcaaatactagggttcctcagaaacaagcccttagaccctctgccttcacactgtatccactgtcccagctcttgcaatgtcatagattcccatggcttcagtgttcactcataaacaggcagttcacaaatattccactcaaaacttctagctccagatatgagtatccagggggaccttctaacctatcatccaaacagggaccctgtgagagtgacagtgagcaccaaatcaccaaatgacaggatgccaggacaactagcattaactggagcatccagagccagcaggcaccttcggtcatcctggtatactgaaccatttcacgtatgctcttgcatgtctcaggctcccaaaactaacatggatctgaatccataatcttttcctgcaaacctcatctttcctgggtggcccacattcagtacaggaaaggaactgtccatcaagttaccaagccagcaaccttgaactggtccttggtcctttcttcacctcaatcccactcatcacattgtctagttaatattgctttctaagtatctcaaaatcatcatgcttccatttgtcttccacccctgccattctagtccaagctcccttggcatctggactggatttgcacggtgacttccatgttgacttaattgacattctgtggagctcctcctccaactcattctccacacctcaaattgatcttttaagaacgcaaagaggatcctgtcatcccttgcttaaaacagtgcataaaacataatacataatggaagacatgatatgtgtctttcttttccacttgattgtcatgcccctaaaaccagggaccttgtttgttttgctcccttttgtttaactggttgcgtgacatagcacctcatacatagtcctggatgaatatttattggttgaatgagcaaatgaaaaaaagtcccagggttctaaaaacctacttcagaccgctagttccagagtctctgggttcttttttccctcaaggattttaacctccttgaaggtagaagttctgctgttctatcattgaatatttcattctttcccattttggaaatgagatactcctctctactctttgtgtcttcagtacttttaaccatagctacatcttagaatcaccagggagcttgcagagaacactaatgccaggattttgccccaaactaattaattcagaatctctagacataggaaataagttttaaaagcctccctagtgtttgtaaggcacagtcagggttgagaagccactggtttaaatctggtcatccttcaagtcccttctcaggcatcatctactccagggaaactcagatccctcatttctcctcaggacttactagtaggtagtgaagtgattctatgatcaatacttatttcattattttcggagttccattccagctatgttgtaaggatgcattagggctgagattatgcattatatttaggaatttgctgaggaccaaaaagttactttataatttccttttatttgacccatgttcacttctcactttggaaagacttcaggttgataagcaagctgacttctgatttgtggctgcctctatggtttaacatcctagcaaatttttcttacacgttccgtcgtgttcctgagctgctagagagctatctgagtcagcggttaactgaggcttaggcacacatagtcatcagctgggaggaacaggctaaacagatatctccttgcactacttagaaaaccaactttccatcaggaactctgggacttttagaaaatatgtatacagcttccatgggtcccttaagttattctgttattgcagcatgcagcacattgggtggaaacctaaaatgcacactgagtgactcccctttcactcttttttggggggtgaagcagggcaggtgtaaaagcagttttttgtttttttgagagagtctcgctctgtcatccaggctggagtgcagtggcgtgctctcggctcactacaacctccatctcccaggttcaagcgattctcctgcctcagcttctcgacgagtagctgggattacaggcgtgtgccaccacgccagtctaattttttgtctttttagtagagacggggtttcaccgcattagccaggatggtctcgatctcctgacctcatgatctgcccgcctcggcctcccaaagtgctgggattacaggcgtgagccaccgcacccggcctgtaaaagcagttttttaaaatgtgcgtttatgtatgttgacccaggttactccgttgtcccgttggtaaagactaccaaatttaatgtggctgtttcgtaaagataccttctcagagacatcgtcaaagagcatgctttaaaactctgttcaggcacatttgcagctttccataggaaactataaaggcagataatgtcatagcacctttttctaaagccattcttagggacttcagcattgacgatatgattgagggaagagcagggaggaaaacagtgtgtctggagggccccctgggcttctgccatgagattgaagcttggcacctcagtcatggccattctgcacaggtaaatcttaaaatttcatcttgaatttttcatggcatcatcaactggtgtagatttgggtatcattttgcagctgccaagcggatctttgtgtcagttcaccccaaactacatcacatttagcaaaattgcccatagtatgcaggtaatattttgagtagttttatgatagattttgacatttatttcttttcttctcttttcttttctttttcttttgtgacagagtcttgctctgttgcccaggctagagtgcagtggtgcgatctgagctcactgcaacctctgcctcccaggttaaagcgatgctcctgcctcagcctcccgagtagctggaattacaagcaagattttgacagtatttctaatcaaattcctgctgcctttataaaaaatccacatgtttactcttgtgaaattatttgttataattgttaaactcttgggttttttttttaaagacttagaatatcataaaggtataaagagaagaagcaagttatgtttagaattttagctaagttgttttgtggatgacattctgtgttgggtttaaaatgagattattgaagtgggctacctataagatagagttaatctaatgtgggttttggtgtgctctatggttaactgtgggtctcaaaaagttaagtgtacttcaagtgcagtatttatgtaaaaccactaagataagatcttgctgtgtaatctttgctggtgctcaagctaactgattacaatggctggcattttcactgttctcacacttacaaaaataaaatcagaaagcttgagaggatagggaaagacatctggtgtacaaaatgaagacatttatcaaaagggatgccttttttccttttaaaaactgcaaaaggtttgtttcatctcattaggcttagaagtataaattttacataattagtagaaagttgaatgaataacagaaagttggaataaatatttgctcttgtattaaatacatatgaaatgccttgctttagtatattgattatgctaatttatagtctaaatgtacaattagattcaggaggcataacaggatgtagaatttgataaagaatacattaaagaaaaagaattcttgtgtagacctgagtcttaaaaaaattaaaaaataacatttaaattttcttgtaggcctggtgtggtggctcacacctataatctcagcactttgggaggcctaggctggtggattgctagagcccagaaatttgagaccagcctgggcaacatggtgaaaccccgtctctacaaaatacaaaaaaaacattagccgggtgcaggggtgcatgcctgtagtcccagctacttgggaggctgaggagtctgaggtgggagaatcacttgagcccaggaggtggaggtgcagtgagctgagatcatgccactgtgctccagcctgggtgacggagtcagaccttgtcttaaataaataaataaataagtaaattcccttgtagaactataattgttttatgatacagaatattaatcactgcattaaatttggatattattataacgatatttagtaaaaaggacaaacttgaatttctgttcatcccgtcacacctctcgattagagctaggtgagttacatgtagttataaactaaagggactagaccccaaagctatgttcactctactcttcacttttaatcacatatatattttcttttcttttttttttttcgagacagggtctcactgcaacacccaggccggagtgcagtggtgcaatcacgggtcacagcagcttccatctctggggctcaaacaattctcccacctcagcctcccgagtagctgggactacaggcatgtgctaccacgcctggataatttttctattttttatagggactgggtctcactatgttgcccaggctgatctcaaacacctgggctcaagcaatcctcttgccttggcctccaaaagtgttgggattacaggcatgagccaccgtgcccagcccacatatgtattttcttctctctgggaaactagccttcgttttctccaattattgacttatttctttttcacccaggctttgtgttaagctcctggatctctatgaaaccgctgctgatacttctattagcttctgttaaaagaaatgaaaaacttcaccttacaggtttctttcagcatctctaaaagtctctgttgttaatatagtattgagacttatccccaccatagtcatttgcataaaattattatactgtatataaaagtttaagatgtaactttaaatgaacatgaattataggtatggataattgcattaattttggaaatttgtgttgaattttcttctctaagtggatatctcttagtgctgctcaacagttagcccattttatctcttcatttatgttggccatttttcatttatatcttctgaaaaaaattcatgtatatgttctgaaaaaataacacactgtatacaattaattgtatttgcccaattttttagaatatttgtttatatgtatacttacaggcttaaaaaaatcattcacatggtccaaagtgactgatgtttaaaagtgacagctatatgagggaaaacgtatatggacagatatatgtcatataatcatgccatacacacacacacacacacacacacacacacgtgggtgtgaatgaatgccatcttctaagatctgtacatttgaccactattaatctgtggttcttgaaaattaatgagattaattcataaaccaagtgatttttgaagcctgcagtctggcgagtcaggttggttctgttcctttagatagcttaactgagtacaaaatttggggtatagcatttcagaagatcctgctgtttctaccattagttttgaatgtttattgtaaagatacttttcaactctaatgggagagacagcaggattctcccaaaaattcaagtaaaaatctgcacgaggaaaagaagtctcctgagatggattgaattcttctgaagagaaaaatatataatttactaccacctaaaatatgaatgaagatatatgtgaggagctttttagaggagaatttatcttatatttattatcagaaagtgctgtgaatttaaaatctttcttttgcccaagtcaaacagaatttccagtaataatgagaaacgtgtgactcttgaccattttgtttaccaaataatgtagtgtgagatatctctactacagtaataacttccggtgtaatttacattggcgtttgttaacagcaaaagacctctcctgtgggggttaagaatatttaatcctttaaagctgacatatataacatgtagctatgtcagctacagctgtttctaaacatcagtaacaaaattatagacaggttttgaagcttctgtggtgggaatgaatacatctgaggattcaacttgctgacagtgtttttgtaatttaatcttaccatctggtagaaagtaaacattttttataaaattaaagtttataaagtgaatcgcttatagtttccgattgttgtgaatgacaaatttaagtgtactttcattgaagaatgaatggagattctgccactgttttgagatgcatactagatcgcaactgattttgccatttgatcttcattggttccttgaacagtaaacaaattggcactttcatgtcagctaaggattctgtgtttcatatgtctttcattcctttaagatagcatacatgttgttacttgttttgcacagaagaaactagggcttggcaatttgtatgtcggtaatgtcagataagtgatgtcacaaatagaatgtacctctgaactgaaaataaatgattttttcattgcatttcatactttcttctataacgtagttatatttgtataatatgcatttagctattgtctaaactattatggtgtaatccagtgtatttgctttgcaagtagcacctttctttctccttagaagttggcaaattagcagatttgtgaaattgacaaattggtttacaaaccctgccaaattcaaactttataaatctgatctacgccttttacttgaaataaatatacacgctgatagactcttgtgtttatagttgtgccctgtgttaaattgaaagcctacactctatgatgatgtaataaaatttaattagttgtaagtcaggttttggttaatggtaattagtttagtgtataattattacatctaatagcaatctgaagtctgcaagcattttgatctttttccaagtaaaaagaaaaaaaaccacaaagctcctgtaagatttatagcagaaattgcaataataaaatcacattagctaatttcattagataaatcacagaaaatgttaagtggcaaagtaaaatttcagtgatgatgtacatgtgttatgttgagctggtacataaaatatttttaagtgagttttttttcttttcaattaaaactatctaatgcgacttttgatgcttcttactatttaaaatacatcatcggtagttttgcatggcaaaattaaatgttattcccataacagctattgtagagtgatcatcagggtcaatacatgctttaaaaatcaaagaaattttattaataaatttgaaaaatacctttaattcactgagttctgacccataaaatttttacaggaagtattgcctgcttccaacagaataaaaagtagctttcagctaacaaggcagtaacacaaaaatatattaataccacgtaagtaaatgtacatgagcttttaaattagtatgtttaataaattaaaaagcataatgtctccctgagttactagatactgttatatttaattagtctatgagcccaagattaaatcagggagctagtcatattatacttttggcattttcctacttctcctttcaatccctttccctaatagaaacctctttctgtttttttcttgtatgagccgagtgttgtctcatttctgtttttaaaaatgtgtttagcagcctttctattttccacaaatttattgttttggtttttagacagggtctcactctgttgcccaggctggaatgcagtggcacaatcatagctctctgtaacctggaactcctgggctcaagcaatcctcctaccgcagtctctcagtctcttgggtagttatttttaacttaaaatttataacccagatagattggttgtaatgcacaacatagttcagtgccaagtatgttttccacaccaaagactatggttctcatcattcgagtgcttgattttagaacattcagataaaaaacaaaagtttaataaatagtgtgttgtaaaagtcttactaaaagtggctaagttgatatcacaagactattaaatagtttaaaatgaattttcatggcttaataactgatttttataaaccgtgcttaggtttactacgaatatatagaaaatatttaaattttctgtatctttgattttttttttcttctttattgtaccttattaggaaagggtctgttttgacttcaaaagaggtcttatgttatgatcattttcatttggcaaggagaaagaagtgatttgatataaaatattcatgagctgacataattaaaaatattaaccgagacatctaaattggcttttgtagtacaccattataaatatttagctctctgtgaaatgtctgtcgtgttgtacatgggttttccataggatatcatttcagtttttataaatttgaatttgtatttactaacacatgttaatctggcattaacactggatgtgtatttaagaagggtatactgcagacctagtaagtgcacagtcaggactgtgtggggagggaaagactgcaaacagttgtcagtcttcaaagtgagataagacacgtccattaaagtttgcaatacaaaacagtatctaattcggtaccaaaggagatatttcatgaaagatgaagttggtttgctgctttaggctctttctgagtagctaccatgtatcctttgtttagtactcaaccttagaaatttgacttcattcgttccctggctgtgataagattttgtgaaccaaatgcacaagatactatttaagaaatcagtcttctaaattgtgttggagaataaccctatactcaaaatgtttttattgattattttggccactggcaatcaaggcatctgaaaaaccgagaaactataatcataaagttactggctgaatttaaaattatttattcatactttcagaaagttaccaatcgagtcctactatatgcaaagaccatgttaaaaataatgagaaacagaatatcttggtggatatgtttctgccacccagaaacatttaccagggtggtaaagatcttgtattaaaatatacagagtttagtttcaaagtaatagtagtgaatatcttggtgaatccttactgcaatattaggaaatggatatgcccaatgcagagtaaatttaacagttctttcttacataccaacatgaataaacatgagcagttgacttgactttgtgaccacatgaatatggctacgtgaatggacaggaagaatcccatgaagattactagattttatcctggattctgagaataaatgttaaaaacaaaaagctatttattcccaatctcactgtcttaatgaacttttatgtttctgtcaaatgggagtggagaatgacaagtaatcttaaaatatttatggagtcaacaaatgtttatgatgtgccacacacataagggttcagcacctaagaggcagcacttggacacctacagctcggaagtgatcaagacagaccttggctcccaccttcatgcatctaagatgacaatgcaatgtcagagtgaacattcagtaggacttgaagatttgtgacaagagttcagggaaaacacatcagaatttttggtgatgtgcatttagtaggaagttgtggttaaaccttgagaataaatttgtccctggaaagagataaaagaacaaggacttaaggactaaaatttgagtaaagctttcaattaggaaccaataaaaagatgaggaatgggagtggaagccatggttatggagtttggaaaagtatcaaggtcaggtgcacggatataatcctatgtggccaggaagtttcaaaataggaagaccgacagcctataccgaaggctgtgaagaatgaagtttggaggagagcctttatacttgattaggaggaaatgggtatcatctgcccgtgaacttgacactggggttggaaatgagtcctgagatatgggaaatagagaaaaatcacatatacagcttgttacgtaaatccagcagcgaaaggaaggtgacaacttcacacatggagtatctccaggaggtttaaagataatgtggataaatgttgagaccaatttttcttgtatgtaagttctctatagctatgtctggagtatggatgatttttatgtaatatattataaatcttgacttttggattgcttctttggtggtacaaaatagaaaaaaatgctattttgtattaatatgctttagtcactttcttgtaagccataaaacatttaaaaagcagactttatgcaaattgataactaaaaaattgttttacacagaaattaagattaatttacttaaacactgtgctctacatttatctttatcttgatgtttatcttgatgaccaaattatgtcatcgcgggaaatttctctttatccattaactaaatacatttggatactaagggtagtgtctctaagagtaagaattatttcttaaattaatatattcatgaaaattcaaacaaacatagatcatctattagaaatgtaatttatatacagcattaactcggaactgattctttgtttttcctcattcttctgggattcttgaaacacaaatctaaatgtatgtggctgcaaaaaaaaaaaaaaagctctggatagctgcctacttttgtaggcactctttttgtgtttttttttttctcttcttctgatttcatctaaggaaagcttccttagctactaattcacacacacacacacacacacacacacacaaacacacactttaacagggaggttatgccccttaagctcacctgaatgacccacaatattggaaacagttaaatacttggggtcagatagagccccaccagggaggtggaggcagttgaatgcgtattagaaaatcaagaaaataattgaaactggagaactctagtccattaatctggagattccttgtataaccaatgagctttaatatccaatttaatgaaagatgcttatttcactttccagagcagaaaaattaattggtagctataatttaagtttggtctcctttctaattgaaagaatgtctaaagggaagggaaaaacatttttatttcactcattttcattttttaattccttttttaaagaaaagttttattacaagtattgatattttcattatttcaactgaaatatttgttacatattatctctaggaaaaaaaatcctttaaaggctgcaaacagtgtaatgaacttgcaatctgttctctgggtttgcaggtgtgaggattaaatacgtccaggcacataacaacatttcagaaaatgcattttgaggctgataacatgatcataatatattttgtcttttcactgtgtcagaaattaattttcttagtggctccttgcaacctatgatttttttaaagagatttttattggcagctggccaagccttgatgttctgttgaatgagtgatactgaacacttgagatgagtctcctttttacctttgttacctcaggcctctgctctgcttcattaaaaaaaaaaaaatatatatatatatatatatacacacaagtatttgcaaaccataaaaagtctatatgctagtgaatgcacagagatgttttgcaagctgttttttcagtggtattcttttcatttatccactgcgtaattctaaaggtaagattcctcagggtgcttgtacagaagtgctaccagaatgaaggggcagacccataggagcgtggcctacttaaaacatctgaaaataactaagaggcgaccctcctgctttttcccctgccaaggagataccgacagcacaggacaggttttgactgtcttattgtcagtttcttcccctggtataaggccagatgatgctggaatgatgtgtctattgaagttgattgccactgtaaggcttagccaagtttgtcttcatgagggcagtgtaggaagaaccagtgtaattggtttgctgaacccctaaatttgaaaagtagcttggttaaccatctccatagaaagccaacacgcttttgcatgtcgtgtgcacgtgggtgcatgcggaacactgggatgatggctcagtggctctgagagtagaggcttttcgatacaattggaatgacacccccgccccccaccctgccgccgctgcacattgcagtacggtagctccggccatttagtgttgcaggtggatgactcatttgatcaacattaactatgccttgaacaatattttcgttagtaatgtttttagttatcgtttatagtttagttaatgatttcgttagtgagttaggtcttgtggacaggataaataccattctttaaggtcacatactgttagacttgtatcacacagaaaagacacaatgagtgtagggcctcgtctatagaaggcgtgtaataaatgatgttcagagaatgaatgaatatataaatggcacatttgaggggcggagtagcatactggttaagagcgtgggcttcaaaatgaactagcagtgtttgaattacagcttcaccaccgtgtgtcttttggcagattacctcctctgtgtgattcagtgtcactgtgtttaaaaaggagatgataatgttgcttacctcatagatttgtaatgaggcttacagagtttacatatgtaaacatgttgaaatcgtacctggtacataacactcaagatgtgttcattattattactgttattatagaaattgaaacatagaatattttttggtttgaaaatgaatattctttcagaatgacaaattttaaaataaactcgtaattatttgttaaaacagtcaccaacatttacataatgttttagttagcagaactctttttacatataaatttttaaaatttggtatacttttttttctttttttgtttttttgagacggagtctcactctgtcacccaggctagagtgcagtggcgtgatctcggctcactgcaacctcctaggttcaagcgattctccagccttagcctcctgagtagctgggactactaaattagcatccggctaattttttttttttttttttttttttttgatttttagtagagatgaggtttcaccatgttggccaggctggtctcgaattcctgacctcaggtgatctgcctgccttggcctcccaaaatgctggaattacaggcatgagccacctgtacccagtcagtgtactgttttattcatgacctaggagatggacaggacagacattcaaattttagagatgatagtggaagctactttgaggaaaaggtgacccatgaaaatcaattatgaatgagatgagcctgtaagcacccacatggggacccgcacggagcagaagccgctgtgctctggtgctcaggtggtgcttaataacggcttcttgttcccctttgtcttgcacgaggtgttaccatctgcattgccagattcagacaccaagacccaatgatacatttcattatttttaatgtgtgatcaccccacaattgcgccagatgaagtagccccaaacactttcactttctcaatctaaaaaatatcttacacattcttctgcccggctgcattggagttcctgcttagcatcagtacacagagccactcagaggagcatgtccccgggccctggctctacccgctgcccttggtcttcagccagcctgatgctcctgattcactgttttggggcatttctgctatggaaccaccctgaaaattatcaaattaggcaattacaaatgatctttgattcattattgaaatgaaaaaaaatttatttaaaatggggacatatttggcatacatatatatatatattttttttttttttgctctaccctcaaaactacttaagtgatgttgcttgttgaaaggtttttttgttttacttatttaaattgtttatttttcatagagacagggtttcaccatgttgtccaggctggtcttgaactcctgggctcaagtgatctgcctaccttatcctcccaaagtactgggattacaaccatgagccactgtgtcctgctcttattgaaagttttgaaattcagatgagacaacatttaaatgattcctgagaagtcaagggatttaatctatgggcaaaagacgaaaagtcataaacttttgtccaatattttatatgttttggtttttgtttttttttttttttttgctttaagagttagctcctgttaaagcactcttccaaagtgttgtatgtatgcaggatgtatgcatcttcctaatagattatcagcaaccccctagcccctgcaggattggtattttgtaattatgtttcatcctacaaaatagagcaccctatttaatacatatcagctattaaatacgtgatcgaattgcccatctataactcaaacttctatgcctttaataacaccaaatgtcttcaggatttgtggtggctgagaacattcagataactaaatggcccactttattcttttagatagatggcgtcaatttctactgcctcaccaaaaaattatgtagcccagggatagaactttcctaataaattttacaaccagttcctgagaggccagtgaaagatcattaccttcacaacactgttgctcttctctgtggcttttgtagtgattcaaacaatgtgacagtagctaacccccatggacaagtttaatagaattaaagaaatatgaacctacaaacacacgtactaacactgcgtagaatctgtgtcttgcatgttcagggattctcttgttttaggtcgtgtaatttctcataatatgtgtattgtttcccttctaaatttaataacagtaattttgttagctgtggaatatttaagctaaatggtttgaaaaaattaagtcaaactccttacataattgtttcttaaaaaaataaaacaactccatcatcattttcctacagtgtgtttgaagcttctaactttctccagacatttaaaatgactctgtattttaccctgggacaatgtaagcattctaaagtgttttctagttaatgtttgtatatcagcttcttaaacaggtgatgcagttatgaaacttcacctgtatacatctgtaaattttctgttccagatatttaaaagcagaagtcaatattggaatgaaggaaatgtaccagagtgtatattttagagtaataagtgaaatctgctgttttcaacgaattccttttttaaattttaattcctaagtatttgctgactgaagaacagtatagtgcctttaaggtgagaatttttgtattaaataactaaaataaaccgtaaaaattgctgagcaaaacatatctaaatcttgtatttaaattagatttcatttcaaaatgcttttaaggaccccttttatttattcccctggtggtctttcaaaagccaggtgtctgggattgtctccagcctgctctaaaagcaccccaggctttggattagtacaagagagcagctgccttttattcagcagtgcccatttacataatgcctgttcatttaaactcacttggaacctatggccaggatgaacccacaccagagtgagtcagcagtgcatggtcttgtttttgcattgaattaattttaaaacatccctctcttccacagctggaatgaaagacagtactgtagaggcatttctcgattcaactgctatatccttaaaggcaatttaagaatcactgttgcatactttatcacaatatataatagaactaaaatttttaaaaagcagtgtatctattattaaacatttcattcttacaaaatagactatggtagtttatagaagagaacaacaaaatgtactgaaaacctcaaagtaatctctgctctgaaactgtcatttccctctcacggaacacatttacttaatcctttgattcaactttcaagttcaaaaagcatttttgtgtgtgtatttgtgaaacaggaagtttttcagtgttgtttttgtcttctaaatattgtttatgtttgaaatataagtcaaatttaatattatggtataagatgcttctttaattttaaacttttatattagtttagaatatgtatgtggcttagtcagaaaaccctcacctttgtcattttttcagacctcatattcagatccatttttgtgttcttctcccaggagattaggtagtctctatgggctttgtactaagggcaggaatccacttccctaagttacagcctgctttatgtacttacttaagtatttgtggggcagaagtctttaatagttggaattgcacatgcactagaaatttaaataaaacctactttcagggtaaaaaaaaaatcgaagagttttttttttttaaatctgaattttgaattagttttcttaacgtgaactttccaaaatgctgctttacaaagtttattttcattcataacattttaatgcttgtttttccttgcttttcaccaaatgacttgaactggaaaatgttgatgtttagttacatatttatggaggacgataatctcacccatgtgtctgcattacttgcctctgtgtttttcccctagttaatatgatgtttatctgctgttacactttagttatctttttgaaatcctgctttgacatctttctttagcataaatttatgcagtgattaaatcttcccatctaccttcatagcatctggtgatgttatatagtaaagagagtagtatttttttaatacttctttaatttagatgagtttcataaagtcattctatatgagtaaatggccaggcttttttaactttaatatattcagttcactatgcatgtagaaatataaattaattttattgtttctctttttttttttttctttttgtagagacagggtctcactatgttgcccaggctggtcttgaactcctgggctcaagtgatcctgccacctgggcctcccaaagtactgggattacaggcataagctatggctcctggcctattgtccttcttgatagtagtcattttttttcagaagtacctgtagtagaaactacattaactttaatttctttcattaaaacaatttcattgctcttcctcttcacaaatcacatcaatttattaatttttattttgttttattttattacataaatatatatacatatttctggctgtcacctgactgaagaagaattcttcacttgatcacagccaaaaggctgagaaatgataagaattcttggtgattttttttttaatttactagagataacctagtttttcttatctacatggacatatgagcctgctttgtggtgttaaaacaaatcaaaacgcagcaaccaactaataaaacagtaagaatgaaacacctttcttaggagtgaccatcaggcattccgtatacataactaatcaggactgtttcatttctccctttgctgttccccctgaaccttgaacctaacaataagaaataatagaaaaccaaagctctgttatggcttactaaactaacacccttaaaaggcatttgactgtgactgagtatgaatgagaacggtccccaaatcttctgctgaaagagggggccctcccgtgggaggctttagttgttttcctctttttaatctgcgggagccgcggagctcagcttcttaacaaaaccagtattagtgaggagatcaaaaccaaacacctaatatgctcagtatttgaccacctttttataaagttaatcaaacctgttaagaaaaatgtaaagtagcagaatgtaatattctggaaggaaattacatcatataatataaaatcctagcagtttgaccctgtggtagatgtttactttaaaatagttaactgattttcagcagagccgagtggtcattctcattgacttacccataatgtgcagaacacctttgcaaattcaagatgactgtttacaatataggtattatatgttgttagattatttatcttcagcattgctttactttcatagtgcatttggtaagtgtcaaattatagtatactgcataatcaatcactgatatttcataaaaaataaatcagttgtaaatgttccactgtttctggctaatgtcctgttttttttttttaatttttgtttttagttttgtttttgaaaaaattcgataggtagtatgtcctttgactttaaaacaggaatgagtgagcacatgcccatatgttcaggatagaaacagttttctgactgatataaggaaattctagcatgcatttttaaaattatctttcttctattggggaattgttgctgatggaaaacactgcagtgtccaactggatggttgtatccacctagatcagcaatgagaaaggataagaaaatttcagacgtgattttaacaaagggcggggtgttttctgggatatatcatttcaagggcagcccgttttttcaagaatctcttctattattctatgatgccaatagaatttcattctgattttgggtgaatgaactaccgcctattaaaatgttaatatctactggtcagttatttctaagcttgaacttaatgttaaataccaaattttgtcatgtatgaagggaagaatggattcagggtgatgaggcacagaaaatatgaaggcaaggatttcttggtatcagcagagggtccaggaggtaagataagggcactaaatggaaaaatggagggtcaccttggaatggttctgatacaggcatagcgtatttctgcaccaggagaatgacttatcaggttatatgcatctcttgatgatctaattattctaaatgacagaagtatgagcctgcctgctaaagcagtgatgtctaaggccatgactttgaacctagacgccctgagttatcagcttagttccactgtttaactgttgtgtgttcttaagcaggtaacttctatgaacctctatctttacccctctaaaatgcctgccttatcaggttgttggaaggatgaagttagagtacacgtgtaaaaagtacctacaaggcacattgttagttattttaaatatcactgatttttataattatccaaatgttgcaaacaaacaagtaatacaatttaaactcagtgtaccaacagtctattatgattagctaaggaagaccctggacaaaccctttttggaacatggaatttgaattaaatacttggttaacttttatggtatacaaaaaataagacaacatgggtaagaagtatatgtttacaggacaaactctttgttctggttaggagaaatatacatcaatttgatgagaatattagatgaaattggaggaacagttaatttatattagcaactgaaaaaatagggagttgcagaaaattaagggtgaaatttggttttcaaagattagaacagcattttattttattttgtttcttcttattattattatttatactcttcccatagctcagggaaagcaatagaactgcatttgagaagaaaccagaattttttgagaaacactgaaggctactttaatcaagccagaacccacctagaagatgttccactgtttaaccagttatttaaaggagtgcttgctttcatgctcaaaggagctggagctgagggcctagttcatttttcttgcttgaggaagggaccttgattatgattcattcgtatgcagttgcggaaccaaggactactttgggagaaataatttctactcccgtgaactcaagggaagtctccaggaatgataaggaatgaattggggaaggataatttcctttccttcttttctagttattccagctgaagtttaacatactgagagaccagataacatatgtccattttttatcagcattttcgtttttactgcgtcctcaaccatgtgcacatttacagaactgtcccaagtagaagcatactaagattgtggaagttatttctgaaaaagcagctaaccttatctagatcatattatattaataccacacgtacttattttacatatttgttttttattcaagtgttctagtttacttggtcttttacattctagtcttcagtggggaataaatagcaaacatatgagtattctcaaatgtctgagtttagtaaagttaaaaatatattctatattaaaactacaagtggccttttctacatttatataaaaaaaccaatagttatatgttttcatcttgatatagaaagtggtaggtctgttttattattccaaaagaagcatttggtaagttttgtaaaaagctgaccagcagtttgattcctcaacttcaaaaagtttaataatattatagcagctggttagaaattacagcaagagtactataggttagacaagcagagatttttgtacaacaaagatttttaagcaggctgtactagaagattattacaaattcattcccagtagatctctaggtttctaagactgaaatttctggaatagaagttaatcaaatccttttattgagtacgcaaataattccactgggcctctggggagttacataggatgtttctttctttaaagagttttcagtttgatatagaagcaagataaaatcttatgaaagcaccaaaaatttccaaaaattgccctttcatcacagatgtaagcacttaataaaacgcatttgatgatgccaaaaataaattacaactatgaagagatgcatggttgagttttttttttttttttttttgagaaaaggagtggatttcttattgctttaatgtgaatttttagtgtctgaaaaaattaaaatgttttaaaatttagccaaaccttttcaagataaacatagccagcctactgctatgatttgtcatataggacccagtattttctgtcttgtgaaggagatacagatggaactacctagctaatcctcacagagaagaaatgagatagtcttgatgagtagaaagattagtcttttttctttcttgagctaaaattattttgttataatcatgtgaaaaacctctattttggccgggcgtggtggctcacacctgtgatccctacactttgggaggccgaggtgtatcacctgaggtcaggagttcaagatcagcttggccaacatgatgacactgcgtctctactagaaatacaaaaaatagctgggcatggtggtgggcgcctgtgatcctagtaactcaggaggctgaggcaggagaattgcttgaacccgggaggtggaggttgcagtgagccgagactgcgctactgcactccagcctggacaacaagagcaaaactctgtcaaaaaaaaaaatctattttattcagacttttggaaggaggacagaagctgtcaaaaaacggattgcaaatgtggcttggggtgtcttccatcagtcttaaaatcatctcatttactttcttttatcgacatagtcatccaagcaatgtaacctattttctcagttctattaactttagtgccatcttcggcttctgatcagcaactgaacaaagttttaagttgaaggcaccatagcataaatagagcgttcttttcaagcacttatcactgtttgaacagaaactgttttacatattctttacaatgatctgttatttagactatattgggaatctgatcaaaggcagtaagtcactctgaatctttggcttttatgaatttaagctcagcatttgagcaaagaactaaaaaagaaaaaaaactttcattcttacctagacaacaaaggccttttagtcattgcaatcttgttagtcttttctgagtagtctcaccagacagagagtgcgtcagttacaattccatcattactctttctaacagcccttcaagcctcctgctcttcaaagtagcacagagcactgtatgtacttggtcccaccattcagagccagaagctgaaacaaaacgatgccagctgactttaaggcaatttccttccctctgtggaaatttctgcttcttctgttgaatcgattcactgagtaaaacttgacctcttgtaatagtgcatacgcttcgcagtgtgccaaagtgattcaaaatgaaacagcggttgtacatagaaaacatggaatgtccagcttagtttgaaaatgaaaatgcctttaaaatctgcttttctgttaagagaactacatttaccaatacattagatttttctgctcattctaagataattaaagtaatggattctagcctgaacgataagtataagcacatagttaggcttcctttatatatatatggaaactgaaatgggaaaattacacaattaattaaaagaaaagaaaaactgtctttgttaaatggtgtttttgacctcaagtattacaatgattgtttcatgtgttcaggttcctatgtgtgtgcacactcatgcaagtgtgtgtgcatgtgtgtgtgtacacaagtccacaggagatgaaacatactcatattaatcttttgtcaataattgttaaaatgtagagaaagtaggttagtaggttgatggggccaagagatgaaaatacttggatgaaactgatatatgatcatgtttaaaatatataaaatatatacatagttttaattattccttttacaaaattcacctgtttcaaccataacttctaatatgtatatatcgatgtctttgaattcagagagaaggaaaatgtgtttatatttttaataatagaagataatttgcttgtttttaataggagaagatcacttactttgctggaacttcttacatttattacatgttatttaccggaaagtaatgttaaaccatgtctatatgcacagaaggagtagatttcacacagccaatgtattgacttctggatcagtactgatcactgcatttgtcttaattaagtgctaattcatgtcagtgagatagatggatttttaaaaacttctgtttatctgagcttagatactttgggtaagaaatatactaatgcatcatatatatatatatatatatatatatatatatatatatatatatatatatatggtcctaccctgttgaataatttgtgttagacacctcatttctccagattttctaaaattcaggcagttggtgtgagggtggaggtaggaggtattggcagagatagcaccgcttcttcagatctctaataaatgtaattagttcagttttatgctttgcctttttttaatagtgaagtgattgtagtgtaaaaagagcagttgtttgactatattatttaattcaacagacttttcttccctattctttaaaaagaaaagcagttattcaaagcataaaaagaaaaaagagattaaaaataatggtctgtaaactttgcaaagtacataagaaaacctcattaattctgggtatttaaagtataaacaaaatctaaaataaatatgagaaaatacaagaacagaaatcttttgaagaaaaacaacattctaaattcattctagttcttttcttaaatgtatttggcaaataattataaacaaaagcaagactattatcagaactcatgtagtaaatttattaagaccagatgctttcctatatgaccatgttggtggagctgttagtagctttaaaagattatgttcctctgggtaccagcactgtccttctttgagtcaaaggaggttaaaatttttgaaggggatagtaaattcgccaactctccccaaatgaggacagacatccaaatgggaaagcctccttcttagaaacctttgtgcccccctcccacccgctttttttaaagggcagagctcagaaatgggcatgctcatttgatgaaggcagtgccatgataccagaagccataaaaggaaagaattctttggttgaacagaaattaattaggaaaaaatgaggaagaaaagaaaagctcttaagtcagtggcttaaaaaaacgttctaacagctgtaatatgagagaacatactaacacattttttaatataattatatgaaaaagacatttttatatttccctcttctagaataaaaagagttttttgtcaagcagtaacaatttattccttatggaaactgctttattattgtctgatggccactttagatccataaaacgaaatggattaaagaaaattaaacagtatttttaagtgtctacagcttgtggcatgttaacagcaatctgtgtgaaacagtgccaaaaattaagcttaggtttccaagacctttctgtactgtgatacagtgtttaaatactaaacagaaagtttgttttgaaatacaattttgaaggtctcaataatttggaggaggtaagataagatacaaccaaatgcaaatatatatatgttatatattagcattatatatatttcattccgcctcactttgttatagtatttgaaaactttggtaaataaaatgagtgcttttgagagtcagaaaaattacattctaacccagaatttatcactaattgtgaccttagtaagtcacttaaactcaatagacctcagtttccatatctgtagatgagaggatttggatgcctcttctcaaatctcaaggtttctcaagaaaccttgagcatccaagtcatcttctgacattaaattaaacacctagattcggctccatatgtctcaggacagttgatcccctaatctcgtgcatgtctgtcacaggtgtctaacctaccgtagatgaatctcacacattgcaaagactaggttgaagttgatattttttggttttgttttcattttaaaattccagctcctgcaggattgaagttggtcttttgaagtgggtccagtatgactttgtgagctattctgttcttttgtatattattaaatgagtgagtaaaagtggcaaaaagtgaaagatcatgatttgacagtatcacatggtccgggtatcaaaatgctaattgcagaagggaagcatgatatggtgcaatttgagtcctctactcactagagctccttggggcaaggccagtaatagtcttctccaaagcatctggccctgcccagtcctagagatgtgcagtgaacatgtactgactgactcatgtccactttgcttgtcacgtgcctctctgtgccatgttaattttaacctagttgctgataattcagtaatattttaaaagctgtatagtataattgagaggattatgttaaatattttaatattttgattttaatcaaaatattgcggcctttaaaagctgtaagactttgggtgaatgaaagtaaataagtaaatggaaatttttgtaatattaaataatcaaaatataaaaattaatacaatttttaaatgtattttttgtattcactgaaatttattgtgagttatcagtgctattcatctattttttcacttgataaagtgtaacaggtgactttgatgtgtgattcttggtggcctttcttctcccggtgctggaagactatgtaactctagctcagtgagatttttctggattaagtgggtatgattgctcaaatgtcaccagtacatcaatcctttactcttccgtgtcatacaaaaaatattctgtgaagcacagactccataatgagtggacgattttcactctacatactacatccgtaatattgcagccaaccagaaacaccaaagcttatacttatttagatgtatgcacataagaaagtcaaaagttagggggaaagatccactgggaaactagatatggagactgtgtagcatctgaccttgagacaagaagactgatgtggggcgcggcacaaactcctgggctcatttctgaggcttttccaggcatatgtctgggtgagcatggtctcagttcgcccccacacatctcagaagttggtggtctggaaaacttccaaaagggtgtggactgcagtttttgaagaagcataattagtcatgcccataaatcagtaggcgtgtgggtgtgtgtgttgggggtggtgggggccaggctgcatgagtgtgctcagatagccctggctggcccacagtggtggccttcctgagaactgagtagtgccaaagtcctttctatccagaattatctcacctatttagagccaaatttatgcgtaaggcagacatctgcatctttgaaaatacaattttgtggattttgcctttagggtggtttttgtttgcttgttttgttttgggaattctaattttcttacgaactgttttctcgtttcctttagaaaatcactgaaatgactaatgagatgggaagatgaacaagtattatattttgagttctttcctacactgtctcattttctataaacatactaatgcatgcttttaaattgttaataaattggagttttgctgcaaatttaaagaaaaagaaacatttcctcattttggtctttctttttttgcccttacacatgaaattctagatctctggaagggactcaacaaagctttcctaaattaattggctctgacggtaccttcttaaggatttctggtgtggctctgacatataagcaactcagataactacagaaaactgtgtgtaaaaatcagcccaccagtatttgaaacaagtatgcactgttctttctgcgtacctcccgtctgaaaccttgcgctaacagccggatacaagtacaatttctggctcctcattcagtgaggttagaattggacgtcctctaagtacctcatttcatgtggttcatgatagcagagtgctgcaacaaggtttacaggacgacggaagccagtaatccgtttataactgtactcccatgacaattaacagaccagtggaaatttgagaaccacatttacctggaggggtcaaatgtaaatgtccagattgtttccaagctctgacttttcttttttttctcccattatactatgtcttactaaataacattttttattgaaaacaattaagggcaatttatgatcagtgaaataaccctggcataattcacgttttgcccacacaaagaaacacattgaaaatgggggcaaggggcatttgaggatcctgaaagttcatgttatattgaagaaaaaaattattttcatgtctcttacgctttgaaattatactctgcttcatatccctgatattggtataggtccaaaaggaaatataaaattacttgtctatttattgagtacctactgtgtgctaggccctatcctaaaatccagatatcctggttaaccattttagccctgtgttacaaaattccagttgatttctgttcagagcagtgacaggattttaaaaatgtatgctttgaaattattttataaaaattttcattttgtgattagagtattattaaacttgggtgataaagatttcagctttactgaaatgtcatttgtataagaagagcttgcattttggggcattcatttacgtaaagattgagtccaaatttttcagggtagcattcaaagctctctttaatatgaatccatctttatttcttgtctactgccaactcatcctttgagctattcagaggttctccttgacccctggaatctgtgtgcctcccactctttgccttttctccggctctctcctctgcttagaatgtccttttttgccatttccagtcaatcacacacccatgattaccagacagtctcagatgccgcctcccttagagtgtcaggcagatcatccgtcccattgctaattcttctcccttctccttacgtacatgttacatctcccttgctaaacttagtgcggttagttttatctagaatttttttttgattcttttaggatggttagagcctaggtattaggagcactgcctactggtttaccattacatcatatgtactaataaatacttaacaatttttgttgaaatcaccatggactcccagccttccatgctcaatttcaccctgaatactcttagcatgtatcagggactctgctatcagccagagatctaaagccctttttactgggatttcctttcagtgttgtacgtgaaataactgtgttgtcttcaactaaatcgtaactgcattttagatcacagattatcgctgatctacttttgcatccccagttggttactgttttaattttataattgtatgagccaatacatcattctgttatttattacataattaccgttttagagcaagatgcagcaaagtatggtccccaggtcaaatcagccctgccacctattttttttgtatggcctgcatgctaagaatgatttttacacttttaaatagaggggaagaagctccgagaataatatttcatgatacgggaaaattatatgaaattcaaattggcatccacaaagagtctgattggaacaccgttgcacccattttttttacatcttgtctgtggctgctttcatgccagagacacgacaacatacatacgtagcagagtttaatagtttctaccgagggtccacaaagcgtagttactatctggctctttacataaagtctttcaaccatgttgtagagtacttaaaacttattttcttagattgtaaactctttgaagacaaggaaggactatctttgtatctcccattgccctttcaaatttatggctctctggcacttttcagtatttgtttattgactggtttttgatgtattcgctggaagtcaggtttgaccactgtggaagatcaggcaggactactgaaatttgtgcctttcattaactggcatacagtgaacgtcaacagagaatcaaatactttttggcttacaacatgttgattattcttgggatagtttggctagctttctggtatgtcattctttcatgttttacagaaaatactaattctcactttgcagtgtggtttccatttattccctagggtgtttatgcattagttttgattaatggaatgttttctcctttcccaagataagtgtgggggatgcaaccaatctaaattgcatctggtgtgtatgtaggggttgaacaactgctttgtgagttaagcacagttaagtccatggatttggtaaaaaataagtaaataaataaaaaggcactggatctttcttctgcatgccagccacaaagctttcctaaacttctgtctgtggctagaaaaataaagactggatgagaattcctgtgaaatcttgttctgtgtaggcatatgtgctgaaccagcaattactcacctaatcttcctatcatgatggtgttttgtgtgcctgctgaacctagcaataagctttccagtatttctttcatcatgaagttaaggtaagcattgtgtattcccatgagtgtattatttggcatgaagtatacaccatcacaggtttggaatttgaggaacctaggaggatgctgttgtagaaaagtatgtttcattgataaacaaggttctgaaaaatgaatggggagaatatgtcacgagtataaaaatgtgtgtaacattcattaaattgtttgttaaataatgtattcagactgactgtgtttcccagcctctcctttgcccgttatatgttctagtaaattaaagctcggaaacctttgtcagagttataatactcaaactgacatctaattcccccggacaataggtacaagactgcgagcctctctaattctttccagtctttacatttattggttcttttgtagacctgtttcattcaatctattacaaacagcactggttaaaagtgtgaagtttaccacatttgaccggaggcacattaaaaaacaatagcgtcctggcgtacattccatgcgtcccaggggtatagctcttcatctgagcagcattttcatctataattactacattagatttgaagtgctggcttgattaaaaagattgacatgtttattttttggctgacctatttgggtagatgtggatttgattcatctgttttgtgtgaccctgtgttacaaagatgttattagttgagcaagaatcatgttttattttggagtcaccattttagcatagatttgaaatgcttttattatagttacataagaaatggtaaaagttgaaattttttaaaaaagaaattatgtgtgcactcacccaggtatcataaatagaaatgtatttcagaatggttttcagagttcagtattattgagattgttattgaaacgtttataaatactgcatcaaatggcgtccacaacttcatggcctacgttaaaaagctttcaccagaattaacataatctattttttattgtgcaccattgctcaggattatgccttttctacacatctgatgttgtaaaacatattgtgtaaataattgataataaacaaacaaattctacttttgccctggtgtacttcaccagtttcaagactttgaagttccttaaataatttatggcacttattagtgcaggcaaatcaaatggtatccttgatccgagctgctttttgtcctcgttgtttctgagcagaattgttaagtgagccttctgattgggacgaagctgagtaccgctgaaaatcactgtggcattcatgctgatgtgtactgatgcacgcgtgttgccaaaccttcggtatttacactaatggaattcgcagggttaccggaatatattctgaaactaggaattgatgtatcttttgagaaagagaaaaacatcttttcaccagcacgcttttagtttacctatagcttcttccacgacgcttcttaagatgaggatttcgcctcaatatgcactccttggctaagatacaagcctgctgaaaaacatgaaccaaaatatcaaaagacagattatgtgatctttttttaactcataaaagcttaggcagcatgccagccagccagactaaatactctgcaatggtacaatagtcttccttgggtgtggaaaatgtaaccctgtgatgggagacaagtgaagtttgagaagttatgaaagatttatgacaaacatttttttctcctcacggtcttccgtgttatttataattacatgaatcttaaccagaggttttattgatttcataatgaattcaaataaagattgcagctcctcagcgacctttaaaggttagactggctatgcatgtttttttccaaaagtttttgtcgtgatagaatttattttttaccatggaagtattcagacatagtagggtcacttcagactgtaattatcactgcaaggcttatgaaataagtgaccaacacagtctctatcacacacacacacacacacacacacacacacacacacacacacacttatatattcagaggacttctttataatagttctattcaagcaagccatgtaggagaaatgttgtcacttttgtgagggcatataacatgagcaacctataatggatccctttttttggtgtttgccatctcttagagagatttgatttgcaaaggaagcccccaaaacgtgcctgttatccacacgaccctgtatgtctagggcaggccttgatggctgatcaacctgtcttgaagtgaatgagggagaatattttaacgtggaatgccaccttaaagcatgactttaaaaaatatcttgaggctgggcctgtaatccgagcactttgggaggccaaagtgggaggatctcttgagctcaggagttcaagcccagcctaggcaacatagcaagagctcgcctctacaaaaaatagaaaaaattagctgagcatggtggtgcacgcctgtggtcccagctgctctggagcctgaggtgggacgatcctttgagctggggaggtcaaggctgcagtgggctgtggtcacaccactgcactccagtgtgggtgacagagcaagactctgtctcttaaaaaatataaaaaaaccttgaaataatagtataaatacaacttcgctacactcagtattaattactagtcataaccctaaattaatttgtcaatatgccatgtaaagacatttaaaaagaaattcaaatgccaaaaaataaaagatttgtactcgttataaacattaactcacttaacttcaaacactaattattactatttatgaaggaaatcatggcctccattatattctcagaaaaaaaaattctctaaccttgaaaatctatccgaggctctggctagacctcaactcctgcaagcagcttgtaggtttgaaatcaataacccttctggcaacttcttttcagggccaagattaactgccctagaaagagaacttatcttggattgagcttcagaaaggagctaacagtcctctttgggctgtttttccctagtgtctcactgcttggagtctcctaagcattctccctgcaggacaccaggagaaaagagtgttttcatccccacgccatcccccgtgcggagtgaatgtacctgggctgtggtagacagcacacctgcctaccatttccccggagtctcttccgcttgaagatccaaaccagtggacatgctttttggaccgagttgctaaggatcatctgtttcctagatgtaacattcagatggttcaggaagatgtgtagcgtgtctagattccggacagattggaagtgtagcatccagaaagtcagtgtgggattaccaattcagaaggttggtaattcaccatagccacgcctcatctgagaggcaggaagtgagccaagtaggaagggtaagcctcttctcaagggtcaaggcaagcaagttctgggtggcaggaggtaagcctggccctggacaccaggcgcctcaccttccccatcttgttttcaccgtcattgccctctctggctggaaagtctcatttgagcttaagccctcgggtgtagtaatgtaactagggctgattgtggagaggacctgtgccctggttctgctgaagattctagaagctcctttaaccttatactgtgactttaagaaaagttgtgatcattaaagtttttctttttcttctttgtaacattttctacacatttgaaaggaacataccctgatgtttttaaaacagtcataccttgtcagtttcacatctccgtaccaaaacccaaaacctaaagagcatggcttcttttgactagaattcctgcactggtccttcttgtttcctttctctcgtcctcaaatgtgatgcatcatttccggtcatcttctcggatgccaaggagctcaggacctgactccttgaagttgtctttctccttctctgccattgttcacgtttcccatcctcggagttgctgttgcatttcatgtcagcatgttacagtttcacaatttaaactccttctaaaagttctctggttctactgatgacattatttgttaatctatttcctatacaaataataagctgtgtttctattatttttgttgtctacaagctttttaaccagttacactgcagcgggcgttcagtgtttaacattggttagcctgattttcctaagtgaattgtttgcatctacactcaaagcttggggttaatacccttgctatttagtatcttctatagcagtaggttgaaaactatgccacgataaccctgcctagccatggagggatgtgagatagggaatagccagttgtgtttgggggctccactcccaatttaacaaaagaagttcaggggttttttttcctctctaggagttcatttcaccatcagaggatattattcagaggataaaaaaagtttccaaaccactgctttaattacttaataaatactcaaaaaataattatcccaccgtggtattgcatagggaaataataagttgcagctcaacaatacaaaaagaaaaaaaatgtgtaaagggccctaaataggtactgtggtaagagcaaagtgtcttttgcatataaatggtttaaatagtgacaataactttagttttgtcagatttagagcagctacctagttgcatataatctggagtgccctttcagtaaagtttcacagcttctcagaaatgcggtgctggtttgtcaaccctgttctcccactcagcaaagagataaagatctggtgggaagggctcagtggctcacgcctgtaatcccagcacttcgggaggccgaggcggtcggatcacctgaggtcaggagtttgagaccaggctcgccaacatggtgaacctgcgtctctactaaaaatacataacttagctggatgtggtggcacgtgcttgtaatcccagctactcaggaggctgacacaggagaatcgcttgaacctgggaggcggagcttgcagtgagccaagatcacaccactgtactccagcctgggcgacagagtgagactccatctcaaaaaaaataaataaaaaataaataaaatttaaaaaaataaaagaattggtgggaaggcctagaataggcttctgaccctgggccgtttactctgggcaacaatatcttccctacacattctgcagattagaggttcatttgcacgaataaactctccttccaaagggaattcctgtagagatggcttcgtttatcagccatttacaccttaggttgtattactttaatcaagtaatcagattacttttactgagggcagggaccttttgattgattgggaataaggtgcagcactttgtgaactcaaggcggtgagaaagaggtgtgcctcagtcggttgtcagagcgacactcacatcaggattggctttgggattcagccaacccttccaggtattggggtgaactgtgcagcttgctgcggatagcccgctactttggtgagaagaggaaggacaaatatcataacacctaaattacaaatggccctgggatgtggagcagttggaatgaagctgacaggaaaagtcagcggcaatggaaataggtgcaggcgaccatttcctgacgagcaggtgtcaggtagtgcggagtggatgcggactgttttcagctcctggctcaggcctgggctgcagagagactgaagacccgatgatgaaggacagagcagagggaagcaaaggaatgacaaatatcatttgagacaggtgtaaaaccatggtctgagacattttgtaaagacacaagtggaaatgaggaaggagctagatggaaaagaggattgggaggccttcccatagaagaagacaaagtcaaattataactgaaaaaagttcttaacacatgaaagaagaagtaggcccttgcctacttctgcctcattttgcaaaccagatgaaagtgtatgttagtaaactttgaacaacaaatttcagtatagtttagatagtgttgggacacagttgagaaagctagctggtagaaatgctgccataagcctaggaagtaccggtgtggggactgaatggtgttgactgatcagtactatacctgaagaatcattgcacatttcaggccgggcacggtggctcactcctataaccccagaactttgggaggccaagacaggcagatcacttgaggtcaggagctcaagaccagcctggccaacatggtgaaaccccgtctctactatcccagctactcaggaggctgaggcaggagaatggcctgaacccaggatgcggaggttgcagtgagccaagatcgcaccactgcactccagcctgggcaacagggccagactccatctcaaaaaacaaaaaaaagaagaaacattgcctattgcccatttcattattcagtatcttaggagcaaaaatcattggtggttagcgaggaagattaaactcgcccagatacaattttaaagagttgaaaatcgacccatgaaaaagtgtgtttttgtatctctgcttgtgttgttagaaaaaaataatagctcagcattcaggttttctacaggtgtgaaaatccaggtgcaagttttaaatcacttgacgtggtactatagatacatgtaaccatagatggctttgtggaacatcattgctttttttttttttttttttttttgagacaggatcttgctctgtcgcctaggctggagtgcagtggcgcaatcacagctcactgcagccttgacctccctggactcatatgatttctcccacctcagcctcccgagtagtggaactttaggctcaggccaccacacctggctagtatttgtactttttgtagagacagggtttcgccatgttgcccaggctggactctaactcctaggttcaagtgatctgcctgcctgggtctcccaaagtgctgggattaggcatgagccactgtgcccagccgcatattttaaggtatacattgcttgggttttatcaggatataattagtcattcagtttatggaaaaatttatattaaacagacagtggtctcaaaggaaggctctaaaaggtctagaaatgatacatagggggcggaacaacatgggaaaatatccgtgtttcttgcataatcatagaaaaagaatcagtctaaatgggccagttctcttttactagaaataatggtgccaaaataaaaacttaggtgttagaaatagtattattgaacccaaatcatctttaaaacttattccactgactcagaatcaaacactgagaataaagggtttaaggtaaaagaaaatatatccaattcacacttcaggaaaatgaaaataccacagaccaagagaacattcttattgagctttttttcagtgctctcaatttaaccagctggaattatttttaaagtacatccaattcaaccttttaaaatgacagatttgccttttaatgggaaatatgtatttcatcataaagacggagcacagtgtccttggctaagttattctctacagaaggatgctctttttttgtactctgtgcttagcctataagaaagaacacagattatagaaaattagctcctggcatggaagattagaagcatatagacagactgatagagaacaattaaaaatgcaaactgttcctttcagtatcctgaattcatagggtgatgtcaattgctatgaaatgagccgttcatacaaacagaaccagccaaggggaagaataactttagaaactagagtgccttttttttttttttttgagatggagtctcactctgtcacccaggcttgagtgcaatggcgcgatctcggctcactgcaacctccacctcccgggttccagtgattctcctgtctcagcctcccgaatagctgggataacaggcatacaccaccacgcccagctaatttttgtatttttagtcgagatggggtttcaccatgttggtcaggctggtctcgaactcctgacctcaggtgatccacctgccttggcctcccaaagttctaggattataggtgtgagccaccacgcccagcctagagttccttttttaattaaagaagagacaaccactactttaaataaccagatagtacgttagaaaaagtcaatcacaagctctgttatttggggactttttggtgtctcactcaaggaacctcttaaatctgtattcattttaatgtttttttctttttttgtcggggacagtcaaaatcatctccaatttctaaggagaaacaaacaattcactgataacagtggagctgaattaagcaatctcagtgtttaagttagtaaaacagacacattttcgattaagatgaacagtttcgagacataggcctgactgatgctgtgtgacaggacaggatctgtgagctgtgagtggagggtaaacattccaggactgtgcaggtgggagagggtgaggtcaaccagagatgctcattcaaaatcagaccttggggcaggagttgcgagcagatgctaagggaaggatccaagaagatccaggggtgggggcagcggctggccagcaggagcagcggaagggggtctgaagttattcccatggcagggtggggggtctggaaaggcaagcagagctactggaagccccccttaggttagaaacaaaatacacatagcattcgtctcatcatggggctcttgaagtcagatatacttcagaacccactgcctctgaagaacaaaacaaggattttggtttgtcaatggtaggcatacttgtcttattaattctagtactgaaatttctggaaaatgttaaagagtcttttaggaaatagaaaaataactatgcattttcaggtattttggtagaaacaccaccccagcatgctttatctacacagtctccaaagttctttatgtaatcatagtaacaaattggacaaccacttccaatatgtaaacaaaaacccttggtatgtgtgaagcacattcattcattcaacaaaggaaacaagcgtctgggcctgtccctgtgccaatgggattggttaaaagcaaaatcagaccaggagcctgttccagttgactggaaagcctgagagttttatagctctgtttaactggaacgtgggcttgtgagtggggaaagagagaactaaaattctaaaacggattggaagttcctgaagttcctggtgaactttgaatgcacaactaagatgtgtgcactgcactttttttttttttttttttttttgagatggagtttcactgttgttgcccaggctggagtgcagtggtgcaatctcggctcaccacaacctctgcctcccgggttcaagtgattcttctgcctcagcctcccaagcagctgggattgcaggcatgcaccaccacacccagctacttttatatttttaatagagacggggtttctccatgttggtcaggctggtctcgaactcctgacctcaggtcatccacctgcctcggcctcccaaagtgctgggattacagttgtgagccaccacgcctggcctgaactgcactttttaatcccaggtccaattccactgcttcgcttacaatctgggactctgcctcggagtgaggcacaggggatcttgctgctgggtttgcagggccagacacagaatgtggcagagagagagagagtgcccatgactaaacctaatccacagctgggcaggcagaggggaagtgcaggcggctcatccagagaacctgtgcctgtaagggcagggcaacattgtgaaagatcaagagggcttgaggaagagggtggatggaaagcctacacgatccccaagccctgggagacaatgtgtcattatgaaaatgggctcaggccgggtgcggtggctcaagcctgtaatcccagcactttgggaggccggggcgggtgggtcacctgaggtcaggagttcgagaccagcctgaccaacatggtgaaaccctgtctctacaaaaaaatccaaaaattagccaggcgtagtggtgggtgcctgtaatcccagctattcgggaggctgaggcaggagaatcacttgaaccagggaggtggaggttgcagtgagccgagatcgtgccattgcactccagcctgggcaacaagggtgaaactccatctcaaaaaaaaaaaagaaaaagaaaagaaaatgggctcaaatagaatcttttggttccttctcctccacccagctatcacataaaataaactcacacccccaacttcagggccacaggtaggtagcgtggtaaaagtttagggcattggagagaaagattaagtgttagcttccttcaccatcccctggccagttcccagtccccaaagtggtagaagttgatttctcaaagaacagagggcaaagaatgcctcatgatttttggagcgctgagagctgtcttaaggtcttcaataaatgacaaaggcagttgggagacttgagttcctgtttctggggccaagagtttaagccaacagacttgagttggagcagcggttgctcttcctaactccctttcccccgctttgctgggcctgtatcctccctctttcccaacgcctctcccgctaacctgagagggagagtagggagagttttggtggctgcactggagggatttgctacagttcttgctccattggagtgtctttggcaggtggcccctcatcgtgggcacagcctcacaacccttctggaaggacatctgctgctgaatatcaccattgcctgggcatatggcctcaggcctccctcctaaacatggtggaagcatacaagacctcgtggaatcattaaaacttttagagcaggggaatgacagaaagaaggagaaatgtttcaaggaagttaatttcatccaagatataacatggattcgagaagggaggtgtttcagaagctgtcaccatcaagggtagacactaatgaagcatcagagcgccgacagtaatggatagagggctggataatgaagggggaaatcaacagggctcagtaatgagttggctgcgggggacaaaagaaagaaaagagtcagagattctgatgaggttttgaggctcattatgattacgaaatgtaaggaatccagattttgctggatgtagtgtgtggtgataatgggctctgatacagatttcaaatggtggtgttgcttataatgctgactgaagcggtgttatctttaggctcatgtaagagttgaaatgtttttggaatgtgtaatacctttattttaagagtgtgtggtacaaccagttgaaaacctgtgaaaacgtttactccaaactaattcataataggttgtttttttggtggggagaggggaagagtgaataattcaaaatgagtttattttgaaaatacccttgcaataaatacgtgatcacttttgagcttctttgcagaattttattagacactgtatacacccctgcgtcttccagacactatttttcaactcaggttgtctcagtcgttgcctcccactgtctgttctgctcagtgcctcaacgtagtcagcacatcgtggtcttttcattcacacatttcctttcctgaccattatttatctaagggacaccttgtatggctcttgcagattcctgatagccttttcctgtgatgcttgtacagaattcaagcattaaattcattttcatgaaaaacaatgaaatgcaaatttaaaaaaacccaaaagaaacaaatctctgtgttcaatgaagattacagctttactctttctatatacaaatgtatatgtttgcctatagagattgcatttggagatttctctaaaaagtaacttcacataagatattcatgacaactgagtctgcattgttctccatttcccagcaagctttgtgacttttcggttgcagcagctgtggatcagctgacacatggtcccagaagatttgcagtcttctttatgctcattagcttttctgaatttaaaataaccccatcttacagtaaaatacggtttgagaataactctctaatactcactggataatttaattcctccttcggcatctgactttgaaagcccacattgaccgtggcttaaaacaaaacaaatggaaactcttccaccccgtgtctatcacacccttttccaatccatataaatttcacaactgctgctttgtgactattgctctcctaactaaaatagttgacgtaagctaaatgcttctttacatttaattattaaataatagaatctgcgaacctcagctatttgcatgaccacttctagaaacctgggtctttgcttgacttagagcttctctctgtcttcaggcccacctctcccatgtgcctctgacacgcccctctcccagcacactggcctcagggccttggagcctggctcttgattcaccactaacgtatttcctcagggccccccaggtgcagtggagcgttgctatgactgatttacacccagcctttctcctcatgggtgctcccctgggcccccccaaatcaccgcgccacatctggcgacctaactcattgtcaagcttcactttcgctcattgtgcccttggcacatcgttttccagtagacaactccatgaacagttttatttatttgcgtatttatctatttgcaaattattcttctcacatttgactgctatcttccccttgtggaaatttttatcttggaagtttggggagcatcagtggagtacatgtggatgctcccaactcacatctgatgaggaagctgccttcgtacacgcaggcaaagtgcattcgacagaatatgaaaaaattaagccagcggacaattaatatagtgagaagtgctttacatccggaacatggactgcctctcaccaagcattgggtacttcattcttctctgaagctggccaaaagacgtgaaagcaactcactaatttacacgatccaccgaaagaagaaatctgtaaaattaaaaaaaaaaaagaaagaaatcagctaaactaacagatataataggatgattgcttgagttgttcacatttaaaatgtctgtgtaagtgttaaaaatgttgcctcggaaaacagaatagaatttccctgtgacctgaagtgatgggataattacctccctcctcagagcaggtttcctggctcctcatgcccaggctattgaggaccagccctgctctattgtcagatttgttttcctgttttggggatgattgctttccccacagagcctcaggattgctccagctcttaaaatggtaagtgccattgccacctggattccctctcacttagaagcatctcaaggagtctgttatgggccagggggctgctgatggattcacgagaatgtctccctctctgagccttggattcctgacactggagagggattccttgatgaatgccttcgccctacccgcttacctaacccctatgatttgttgagaatctgctagctttctttatggagatgtcaattcctcatgcgtgtcatagacatggagtcattcattcaataaatatttactgagaacctttcgtgttttgtgcttgcttcatgtcagttacttgtgctaaaaaataaggtggtttctattcttttcttcctcccctggaagtcattccagagtttttgtcccttcccaataactcaatttcagattatttgctcaaggagtaaaaaattagcagaagttactgagtattcatctgggggacttcattctagccagagaatttggcatatcagcctaaattctctagacttcaaaattcccgttctttctttctctctctttttaatttgtaaaattcctatctactattattatctctaagtccctgcatgtttgctaatgtcacgcactcaacataagcatgagatgctcggaaatttgtttgctaaatcatctggcaaatggtcttgttgatgtctgctgagctgctcagagcctacagttgttaagtacttattacaggaacccagcagggcaaattaagaaagctacatgtatgcttgttattttaggactattatgctatgcttctgagggggctgcatattggactttctgacctgaaaggacttgctgttctttagtcagaggttgctgcgtggaatctgaatctttgacccggcaacaataaaagtgattatcttcaagggggagaatgtcctctagttgcttttcatagttcagcctgctggaaaatgtaaaacacttatttaggcagctctaggttcacttggtatgtcatattttataactaagctgggagctttttctacttacacattaagttatttacttcatttttaaatgtaagtgctttatctaaacaggactccaaagcttaagctcttagcacagggtgagcatgcttcccagcccatgcaaaaagatatgtggcggggcagagctgttattaaaattatagctgatgctccccctgcttttttggggagtgcatattacaaattgaagctgccagctaagtaacttacacatcacttagggtggattttaaaataactatacagctcctttagtctttctaagaactacttataaagcaaattttgggtgtctgaaaatttcttaatatgtaaaagcttgggaaaaatatgatcaaaagtattttaagtgcattaactttagaactcctaaaaatgccgattttctggaaaacaggaatttattattgtcatcactttagactttcatcttttgtaatgtattgtgttctaccaaagctctgcctttggtaccttcttttggcatcacagctgtgcttaaaatacctttccagcagtttaagttatctcaaatggtcatctggttaaaaatgctgctgctgctgttgctgtaatttacaagagaatgtccttgaagtcgtgtgtttcctcagaagttttgtcagtttcataagccttaaaaatgtaagtgttgcaaaagagagttggcctttccctttctgttgtagatattttttaataatgcaagctgcttaagcacagagttaatgtccaacatgcctttttctagcaggagactttgtactttataaatgctttatgatgttaagtatttgtgagaagtaaaagaacttgacttttcaaaataataaaaagcactgggtaatcaccccattaagaagtcagatgccagatctgaatgtaccttaacacgtcagtttctatgaatatgctcatgattcactttctgggaatctgcctgtgtttctctcatctcaagagcaacaattacttctcatgaagactctagggcaggagtcagcaaacaatttccgtaaagggacagatagtattttaggctttgcaggccaggagtacaaattaagaatagtgtgaaagtattccacacatttccacacattttactgacaaaattttaatatagtagtaatgaaagggtatactttttaaatgtaatacaggtctactaatgagaagaatggattgttgtgggggagagttgacattttgcctaattagagttcaaaggtagcatttcttatcaaaaaccattctgagctcaagggccatataaaagtaggcagcaggctggatttggcccacaggaccatagtatgtcctagaagggggctttgctcaaagtgtgttcttgggagcagctgatttcatgtcactgcggtggcctcttagacctgcagagcccagactccaccagaggttctcaggctcatctgatcaaacctgtgcttgcctctgttgcaacgttggtttagtggtcaaagtatatttcctatcttttggaaatccagctgtcactttccatgacgtccttcaattcagccttcacattcacatgggctcagctgtccctctttttttttgtttttttttttttgagatggagtttcgcccttgtcgcccaggctggagtgcggtggcacagtctcagctcactgcaacctccgcctctgcgttcaagccattctcctgcctcagcctcccaggtagctgggattacaggtgcgcggcaccatgcccggccaatttttgtatttttagtagcaacggggtttcaccacgttggtcaggctggtctcgaactcctgacctcaagtgatctaccctccttggcctcccaaagtgctgggattacaggcgtgagccaccgcatccagcccagctgtccctctttaaaaaaaaaaaaaaaatcgttgttttgacactgccatgctctacctcccatcccatcccccacactcaaggcaggtgcttcccaggcaccttgtgtgcgtgtggccccactgtgcatgctcatgcagtagagctcccgtccccaccactagatcaaagctacactcaaaggctgccaagactcctgctggcagacccagtctttgctgtcctaaacctctgcttgtcctttgacactgctaggagcccccttcgcaccagaatagctcctctttgccgatatatcttaaggtcttaaggtatagccgagtaaagttcttgaagaaacattacctggtggcctgggagaattcttcaggcacagttagtaattgtgtaaatgcgtctgttaccatttgatgggggtattaactgggcttgggagtacagtagctgaataggaccttgcctggggtaggagtctggggctttgagaggtagatggaatctgaaggtgcacgaacatagcagcccgtgggggtactgatgggtattcaattctcaagagaatgagatccaagactggctctctctctcagttgatgagacctaggtgagtgaagtcatctgcagggggaggtggggtagaattaactcattcatgtctcagtccactcctctacacccaggctgtgtcatagagtgtgaggtgtctccgcagctgtggtccccacagcatccacaacctccagccctccccagcctccctgtgccgcatcctccgccatgaatcctgtttcatctaggtttctctttccctctccctcctgccaaatgatgagtgctggcaacactacatgccacaccctgcttttctctctagatcccctgctctcacaccctcgggcggatggacggtcacaccgacaccatcagctctgacctctccccttcagagaggtctcctttacactggtctcacatgctacagatttcacttcacttggattgcaagcattttccttgaattcagcacctcaacattgaaaaccaaagtttgttcaaaataggcttcttttccccccaacccattttactcagtggccttcctgttactctctcctctcaaagcctggaagcctttacttattatgcttctctcactttctgtccagtatctcagtccttcaaatattttgtttgattattttaatcaaattatttttattattttgtatttattatattttgtattattataatcatgtctcttggggttcatctgatttctaagacgtcaggaatttgggcctgattttttagaactgtctcgctgcctccattttccccctctctagtttttttttttttttttgtatcattgtcatattaatcttctcaaaactccatgttcatcaagctgcagcacctactgaggcttccgatgccctgactggcagtagggcctaaatcacttcttttctgctgatctccaaactgcactctattttgccaagcaggtcttccccactcttcctgctcccaactccgcacctaagccccaggctcttctctcagtctaggtaccctctctccgtagaccggtgtgtatcacagaagatgaccctacaaggaaggtcacttgtttagctctgcatgaccataggagcaccatcacctgctgtgtgtccttccagccccttcctataggtggtcttccctcctaagggagtgatgtgtggactggacaaaccgaggccaacaggggccctacccttgtcgctgtccctcatcatctctcctgaattttaagcccgtccccagaggagatgtcaccaaaacgggggacaaggcacagcagcattactccccttaaggttagcttctctccctggaaagaggaaagaaccaggattgtttttaagagtaaaggtagtattcataaagctcattcaacccacgagagacgtggctctttcttgttcacgagaaggataaatgcattacacgcattgttttttatacttttgtcttttctttttctagtagaaatcaaagatggtgttttttggggaacactaataaattagattcagatgagtttctatgattaattatgccataattcaatattaaccactatagtatgtcttctatttatgcggtggctcgcttttctatttgaaaattgcttaattatgtacagaaatgtgtctaaaacataggctatagtctgagactgaatttgaaaagaaatttgatgtgtatgtgaaaatacactcccaatgttaaccacgtaagacttcgtaggctgttcagaaatcaaatctatcaccacctataaaaaatcattatcaattcagcttatttttcaaaagcgctggaatccttacatcaagaaagcagactaaaactgatcgttatgctgaaaacatggaactttatcatgatgaggcagaagcaatatatactatggaactgctttctgatttaccaaatatttattttatattaaatacatttgattgtttttgtctttaattatttgaaaattgatcttttacttaccgtgtgactttgtacagattccttaatccttgcagggcctcaatttattcttctgtaaataggaggtagaacacttaaccgaaaggtttttcactaggaatagtgagtttttacatggaaagtacgtagcccagagcctggcacgtgtgacatacagcaaatggtagctctactctaatatatatatctattaaaccaagtaaaatgtacaattagcaaaagcctatccatattttttaactagtctgaatacatggaattttaaaaaaattctcgccatggtttatgaagagaagagtaaatgcatagggattccattatctctttcctataatttataaaaggtctgtacatttttcaagtgaaaccaagactgatactgagctgtgcccggctccctgggagcttgctgtgatgtgctcctttgcagttaaagtccagccttgaccgccacatggctcccacgctgtttccagagatagaaatcagatacccatagcatcaggcagagagtggaacaaacaacttgaaggagagtgccgcagctgcaaatattgcaccaacaggcaagaacgcgcctggagtctctgcaggcgcccgttggccacctctgctgaagtctctcttgtactcagggctctgactaataataaaaggtcagtgattggaggctgtctttatctcagctacttaaaaaaaaaaaaatttatgtcaagtgagcactttacatgttgttcacccacttagccagtgcttcctttgaagctgaaatagattgcttacataaaatgctcagagctgcctccacaaagtcttctcatgctgcttgcctcccttaaagctgcggcttcctaatcctttgatcccgataccgctgaactctttgagagtgaaacagaaaggacagagttgagattttagtgtgacaagtggaagaaaatcaattttgacttcccaaagatagaacgagtggtgcaaaagatcactggtcccaaatggatgttctctgtcattgtcttgggtgactaaaaatgcccaagaggtacaacgcaaggcagacaataggaggcaatttcttttttctttactcagaaaataaactaagtctgatgttgggaccacattatgaacatctatgccctgaccattccaccgtcccttgtatttttgcttgatgttccagattttaagcactctagcattccactggaggatttacacattgattagcagttaaaagcatttgtctgtaagtttagttggatgactgtttcttacttcaggaaaaccagatcttcccagtaactggcagtcctattataagtggatattctgttaagcttctaaagaacttcttgtaacttatcaagtaatgaataaggcagaatgcatttagtcttgtagttgcaccatatttcaaatatcatgtaacctatgagtcagttcaaatgttatatgtaagtgaaaaaacaggggataaaaagcaacattgaaaagaaattatgtgaattaccatgccacccactaatacgttgcatagtgatttagccatcctttttcataattacactgttcaagatttggttacaagtatttttagcctcagaataaaaccatcataccccaaaaggtgtaaagaaattaagatagcctttccataattcataacaaatgtggttgtttcaaatgtgcttaattattatctcgattcaattcaatgcaatggtgattcattgccttttgagagctgcttgtgaatgtctcattaggaagagctactaaatgatacagtacgatccatatgaagacatatttaatgtcatctcagtcatggaaacactgcttcttagctctatttgcatgccagaaattctgagcgacaaacaaaccccactacgataatagaatttaaaaattagcctatatattttcgctattgtctagagataagagatgcagcttttatttatttttcatgtttttatttttttgagacagagtctccctctgtcgcccaggctggagtgcagtggcgcgatctcggctcactgcaagctctgcctcctgggttcacgccattctcctgcctcagcctcccgagtagctgggactacaggcgcccgccaccacgcctggctaatttttttgtgttttagtagagacggggtttcacttgtgttagccaggatggtctcgatctcttgaccttgtgatccccccgctgcggcctccccaagtgctgggattacaggtgtgaaccaccgcgcctagccagaaatgcagcttttcttaaatgagagaaagaagtatgtgcagtttaggtaagtagggtttaaatctacatgaaaatttggatgtatcaaggaagcataatacatcacttgttagaaaaagcatcatcctagttttcactaccccttatgtttcttaaatatgtagcttaccttgtgatcttcaagaaagcgaaataaatttaactgtaacataactgactgattttgttggacctgacttctgatctatagttcagtgatatccttggaaatcttgaaaagttgaatggacatcagagcttaagacataaagacttattattttccattcttgatcagaaatatttactactatgtttgtggattttcataattaatctttacctttaggagcttacattctatttattgtatttatttatttatttatttatttatttatttttagggacgggggtcttgctgtgttgcccagactggtcttcacctcctgggctcaagtgatcctcctccctcagcctccccaagtgctgggattatagatgtgagcccctgcaccagacaattatatttatttttaaaaacgcccctcatgaagtctgggtaattctctccagatttctccttatcaacaaatttataagagttaggaaaaaaatgatgtaaataaagcacttaaattgcgacagtggttctattcttaacatcataatgcttatgactaaggagcattcttttttttataaattaaatgtattctgtagtgttagagtagatgagggtcagagacattatcagtatgtaagaatgcattgtggattttcctaatttatcacctacagtaattttctattctaacaccctttaacaaaatcgtggcacacaaatgaaattccagttagagataagaaaggtgtctgcaagaccctagtcatttctcgtgattacaggcgtgaaactcaacagtaaaagaacacatcagaaacttttgaagaaatggttctgagctagagtgcaaatgaagtgctgagaagccagcactgtcactggggcagcagggttgtaaatggtattttcaagagctttaatagtgggcaaggacaagcagttagtctggttgactccttagaacaaatgtcattaaaggaaaagtgttgtgcaagtgactgattcaatctttattaatgaaaaaaagaaaagatgacgcctccagaatgaggcagttagagctgaattgtggcgagctctatcttcactgactaaattaccacttcactcgatgagttttttaaaaaacatgcagtagaggtcagatggaggtgttttgttgagctcatcatgtggtggtgttttgctttaaaaagggtactgttttcaactacataattaaaaaaacaaatctgcccagcttcccacagccaatcaaaatgtactgaaaaaatcctcttacgttcatttcattacggaaacagttatggagtggcaaattggaatcaattatctgtagacggtgggatagcagttggggtcacagaaatctatggattctataaggcctaaggtacaaatgtggcaacaggcttttccttaaattcctggggatattgttgttcacacacgggtctttttactcacacctggcacatgtcaacagaataacctttgactgcacaggacattatttcatttcttttctcttctaacttgcaatcaggtttcaagttccactgatgtctcgatacctttctagggttagggctgaactgttttcaggactcccctatgaaaactcgcctttggaagtgataaaacattacaacatgaaaacctaattttgaatgaagggagaagagccagagctggagaaaacgacactaccccctctcccagcaagtggtctcaaagtttatggagaatttcttattctctgctgaaaatcctgtctttaaaatatttgtttcgtggttgatttctccaaaggccagtgaataatccacacgtaatcattagacaccagtggcactccaactgtctgtctttgtatttaccagccagaaatgattgccagcacacaggcctcagaatgtgtggtttccagctaggtcaaactatatccacaaaagagatggaaatattcctgacgtcacatctcctggtggttttcttatggattcaaattactgcacatgtgtgaaagatacctaggtgtgaccagatgaatgcacagttggcttcaaggtaatgtagcctaatttcggctcgttcagtttccacatggtcttgcctacctgccttgcagttccactgcactagatcaacaaattcctggtatgatgtgccatcctttggtacctgtggccactcctgaaaagcagaaatcatcctgatatcagttataatctggtgcaatatcatttacctgtcagtttcgttactccatcttcatcaccaagcctacctgaataggaaaaataaaggtgatgtacgtgtgaggatacaggcgtcatagtctttggaagcaagcaatatacatcaataggaatgttgttgtattttagacattatttatgagaagtttacagagagtacaccataacttccttattcacagttgaattcctagattctagcattgtggtgttcaataaatgttgaactgagtgatgatttctcattcacttgatagcatttgaccactgtgttcagacaatgctgacatacttcaaatcctgaaaacgattcaggtgttttctaaacaatggcagacttgcattctattaaagaactccattgatcatttttgtaaccaaggtgtttacagaatgcaactggctatgattcacaccacttctggtgtaaatatcataatgtataagtatttttctaaatttcaccatcattttctttctttttttttttttttttttttttttttttttgagacagagtctcactctgtcccaggctagagtgcagtggtgtgatctcggctcactgcaacctctgcctcccaggttgaagccattctcctgcctcagcctcccgagcagctgggattacaggtgcccaccaccatgtccagctaatttttgtatttttagtagagacagggtttcgtcctgttggccaggctggtctcaaaatcctgaactcaggtgatccacccacctcggcttcccaaagtactgggattacagacgtgagccaccgcacctggcctaaatttcaccatcgtttctattcataacttacctgcaaagtgattatctgactagtactactgcaacaaagataataaagtgcctgatgtttatatcaaataggatatggcatgtttctgagtgtttctaaagaaaaatactgaatgaacccctcgcctaacctagtgcctgtggtaacaataactgacatgcattgagcgcttactgtgtgccaggtgcttgttcgaggtactttaccggtattaactctttaattcgcataacccttctgtgagatgggtaacattatacccattttacagatgaggaatctgaggcctggagatatcaaatcatgtgcccaaggccacaaagccaacatgtggtagaactgagactcgaatctaggcagtttgttccaatttttgtgctttgaacctgtgcacaatatgactattgctattttgtgatattatttgagatttctcttttaattattcttgatatctttggggcagaaaaacaatgaataataatgttatgaatattaaagccccataaaaagaaaggtattctgcctaacagaaggaaagatttcaattaaatgtggaaagcctatcaatggtgataaatagtttccttggactgcagccacaattaaaggacttgggtgagacagtcatcggagtaacagtaatgaaaaaccgagtaacagttaacatttaacactttctatatgttaggcaacgttctaaggaccttaattacattttcttatgtttaataggtcctcttttatggatgaccaagttccttgcccaaaatcacataggttatgggcagcagagttgagtcctcagtcaaaatatacctgaccccggagtccatgttttgaatcactagtctgtcctgcctccatgcagcagtgtagaaagaccatcttgagagcctcacatcatggtggccttaatctggggcatgtggaagaaaggatgtccttggtctctggtgaatcccgtaatcttctagagatattttaacaggaattataattgaatatattatataggcctctgttactcttccagtttttacgataatttcatgataacttcctgggtgttagtaattgtgcaaattcatatattattgcatttaagctgcctgatgaccctggtgagtagggtcatcttagccccattttataaatgagaaaattgaaaccagagaggataaatcatgtgcttaaaattatgcagtaagtgacttcaaatcttgtgatctttactgttctataaataacatcctaccaaattaggttaaactgtatgggattgcaattttggtgggtcaaaatgatccattattggcaatttcatattatacaacctcattgatgaatgaaagtgaatttaatcatttcttattttcaattttcaaatatattgaaagtgcacacctaatatattcgcaaacataatgtataagaagaaaaagaatcatgaaaatttgatagacccagtgcattgatttgtgtgacagtatactgatattagtaagaaagtggccacaaattatgttgtaattctttatgtccatacatattaaatccctggagtttcttttttaaaaaccataataggccgggtgcagaggttcacgcctgtaatcccagcactgggaggccgaggcaggcggatcacctgaggtcaggagctggagaccagcctggccaactggcgaaaccctgtctctactaaaaatacaaaaattaactgggcgtggtggcgggcacctgtagtctcagctactcgggaggctgaggcaggtgaatcgcttgaacctgggaggcggagcttgcagtgagtcgaaatcacgccactgccctccagcctgggtgacagagcaagactctgtctccaaaaacaaaaacaagaacaaaaacaataaaaaccataatatattttgaagagagcgaagtaattgaagatgaagaaaaaaattcatttctcctagtttgaaggttgtcatcaaatacatttgctcaaaaccacgtaagaattaaaacatgaaagcttccattctaatgatggcagttaaaatccaacccatcaccgtaagaggctgaagcagagaggattgcctgagcccaagagttccagaccagcctgggcaatatagtgagacccctacctgtagaaaaaatttaaaaaattagccaggcgtagtgttgcatgcctttaatcccagctactcaggaagctgaggccggaggattgcttgagctcaggaggctgaggctgcagtgagtcatcatcgcgccactgcactccagcctgggctacagtgagacccaatctccaaaaacaaaaaaaagaaaagaaaggaaaagaaaacacataccatcaggcttctttaaaatccaattttaaaatatccaactgatggtttaaaataattgtttcagtttacattgcaaactcatgcaaatggacacttatcaagtttgactgtcatacagtcaaatgatgaagtctgcttactctcctaaggggaaggcaaatcacctctgttttgggaaattcttttgcatattgtttggcaagattgtacttaaagctgaatatttaatatgcctctgtatgtatttggtttttcagtttcctggaaaacattttacacaggtcaaccgtaagtctggccatattaaatgaaaagaagaactcaaaatgcatgtggtttggccctgaggagcatcttctgatctggtggcttgtgaaaagtcagctttatggccaggcacgttggctgatgcccgaaatcccagcactttgggaggccaaggtgggcggatcacctgaggtcaggagttcaagactagcctggccaacatggtgaaactctgtctctactaaaaatacaaaaattagtcgggcatggtggcgggagcctgtaatcccagctcctcaggaggctgaggcaggagaatcgcttgaacccgggaggcggaggttgcagtgagcagagatcacaccactgcactccagcctgggcgacagagtgagactctgtctcacaaaaaaaaaaaaaaaaaaaaaaaagtcggcttgataaagaagagcagggcctcatctcagctctcctgccttacactgttcagggctctgacggccgatctcttcctcacccttcacttcgtcctacagtctcttctggcatcacgcagcatgctgcgattccaggtccaaatgtggggggcactgctgtgagtccgtggccctgtagattgataggaaactgcgcagagaaggttcatgcttcttgctagccacaaagcaatgaacaggtagtagtattttcttatggatggaaagtttaggtaaaaattgtagtcttatgattacattacatggtattgtataattacctaagaactagcccatgtacagtgtacatttatgtgtttactaagaccatagtttttcccttttttagttcccctttaataactggtaattaatcctgtgtaatattaaataataatcaacagctctgtgaaggccatcatagaaagaatatttttcttctggagagattattgtaagtgttatttagaagaagtcttaagccccagcatacgaaactaagatatctacatatcttttagcagagttttgttttaccccttcgcttaatcagaaataatgaagatttatgtatgtcaagttatttaaaattctcgatgaaaagcatggttgttctgtgtgtgtgcttaagtaccttagctcaaatgcagttacactgctgcagaaaaatgttaacattttgaaacagttcttgatttcacttgtgctgattttatcaaaataaggaggaaaaagacaccgtgcctttgttacatgtgataaacaagcgatttgctctttagaggccccctgctataaaagttagccgtttttaagcctagagaatcaggtgagtaatattagaatatttgatctttttaaggatttgccttgacatttattttgtaaagaccagaaactttattgaaactgagccttagaagagtggctttagcactgtgttgctgtcccaaaatgaagagataatctaggaattggtataaagtggccactacccaaaatctcgtggtgggccacatgggagaacattctagaataaaaataccagagctgaaatcatgatgatgctggcagcctaacacttgaaactatattagtttccatcctttaaatgtagtcttgtataattaactaatacatgttcagctgcctttcaatatatataccatccattttcagaaatcacgatcctttatgtaagttctaaattcagacatttgctaatattcagatgtttaaattaatcagaggaagacatcaataaatatttttcaatctgaaattttaaatccttttaaaaaatcctggcatttgatgtcatatagacccaatctacaaataagacattttcagcgtatcatcagtcttcggcacatattgtatgcaaatgtcatcctctctttgaaaataccttttgcattttaagcaagatcctattttgacagttctttatgctttttggggagagttcttgtggagagtttaaaaaaaagcatcttgagtttttgccttgacatattcatcttaatttgatcatttctcttctgtcacagttaacccctcaatcaaaacacctggaagtccttgttaaagttcaaggcttccatcaacctccatcagcgattccaggcaggaggtttacacatgttaaaccactagaatgtaagttgttcttcaggattgccccggggagttttctactgcatttttgccaattgaattatgatgtgagatggtatgaatattgatcaaatttctaaactgaatttcccaatttttagactgtggtgtaaaccaacccgcaggttgtcataaccaattcagtatgtttttaacaatagtcagtgaagcgtggaggtcttcaaaactcattgaaatgtagaaaattatctgcacatatgctatcaacaaatctcgcttaactccttcctgctcacattccaaaccaacagcaaaattcagatccaagcaaactggtcagtgattctgtgtgtgcttgcatgtggccatgtgcctttagcttcttggtttgttcttcctttttccaggcttatctgtttgaaaatataggaggaaatgtgttaatacacatcgtgaacacagagtacaggagatgggattgtaccttggttagtagtttatcgttgcaaagtggttttctttcctctgaagagaaaacaagaaatcgtgcatcatcataagctggctttccatttcagggccatattttacatttattcagaacctctcttctttctgctttttccatttttctgtctaacttttagtgatttattcttttttattagtacattttaatttacagtgggatgggaggagggccttctgcagttctttgtctgctctggagaaagttcctgaaatgaaacatgaatttgagtttgctgccagtcacagttaaggggccttctcttgtcctatcccgttgtaagacaagctcgtccctaagagagcctctgaatccagccatcctttggagagagtcaagcatggtttatcttctggacctcacctgactggttttacaagaacagtttggtcttggtctgcacaaataggaagcaggttttgacattctgagcactctctccatgcattcagcagcttgtcaataagaatgagagaaagagaagaaagaaaaagagagaagaaactatggtaggggaaaatgaggtggaaagaatataataccttccttactttccttgttttggtaaaaacaagttaatcatcattcatatcccttctcttgcataaatatgtatctgtctactcctacctcatctgctgcagtgaatcacatattttctcctcagaattgatttgggcaagaaagacaatgtatacataaaatcagtactggatttcatatacaacaaaaatgttagagatttcaaaattatataccacttttaataacattttttttttatgagggggtttctaccatttgctaaaagtgacaagaaccattcggcctatgctggcatagaaagcagcagggaaatcagttgataataatatgaataaatgtatttggttgattacatgcttacaccttacagtttataacatgttttaacacacctaatgtgacctcatttgctcctaaaaatgaaaagccctttgaagaaaacagtgttatctcctttatataaatgagaaaactgaggctcagagacattaagtgccatgattaaatcttcatagttgatctttgcactagatgtttctgtaatattgagtgtgtgtgtttgggcatttgcgtgtatgaatataatcatagaacactgctgcaaatggagatagattggcaaaaaaaaaaaaaaaaaaggaatggaattgactggtaaattattagtacttctatctaccacttggcagctaaaggattgccctccgtgtgtgactaaaagcagtggcctgtccagcagatagtttcagtccaattaaagtgatctgttgtgactgtatttgaccagaggcaatggaagaaagatggtgaaaacgtccttccaagattatcctctttcagaatccaaaacttgaatttctgaaaaatgattatggtgtggcttattttatgtaccccacaatatatattatcgaatcataaatcaaactgctttctaaaagattttaagtatcttcggataaatttccttaatattttaattgaaaaatgaggcaatcatttctcaagatttttatttctgatgggcacatgaggtcctttaattagtgtatccgttcttattcttgctgaacagtctcctgaataagaataaaagtgacaaaattagacaacgtatggaaaaggaaatcctggctttgctaattttaccagggagagtagctaggccctatatttctggctggaattctcaaatgggagaaaattcttttcctggcatgtattgggtaacagttgtttgtgtaccttgtagcctagccgactctgtcaaaggtaatcctcccagtgcaataatcctctgctttcaaaggcgaaaactgtgtaaattgaattttacagaaatctttcttaaatttcaaaattattgttatttaaaacgtatatttaacttatttttgcattgcaaaattggacataaaaacaaaccacagtctggccccaggtgaggtagggagaggattgttaggggaagtgtgcacagcccataataggccctgtcatgccaagcttagttatttctgcagtaaggcaatggagtatgcaggttgaaaacatgaacttttcagtcagatatctttttttttttttttttgaagtggagtctcgctctatcaccctggctggagtgcagtggcacgatttcggctcactgtaaactccgcctcccaggttcaagcaattctcctgcctcagcctcctgagtggctgggattacagtcacgcgccgccacacctggctaatttttgtatttttagtgacggggtttcaccatgttggtcaggctggtctcgaactcctgatctcgtgatctgcccaccttggcctcccaaagtgctgggactacaggcaggagccaccgctccctggctcagtcagacatctttaccagttttgagaccatggcaagttatttcaccccctatcctggctttttttcatcagaaggtggtgttgaaaatactcgtctgataggtttcttttgtggattaaatgaaacaaactctgaaaagcctgtagcccaatgcctgttgtaacatgtttgagtactcaatatacggcagcaattattgttgttttgggtctcaggatatatctagcagttaagtttcacagtcatccctgagaagagatcttatcaggattcatctaaacatggaaaatatcagtgacctagagagatgagttggagcctggtctctggatgctgggatgttagctggaggcctggggcccttggggattttgctttcaaactgaagtggccccgatgtttgcacagtccgatgggcaaaacagagcctattacctggcacctgatcttttcagtggtgaattctgtggtacataggaaactggggttgtggcatgtggaatggttaggacctctcagagctggaaccatggggaagtgactgacgacagcgggagatgaacacaaaatgatctgaggcccacgggaggagccttgaggttcgttgagggaaagaggaactgcagataatggtgagatttcaaagggccaaccagggacacgggagatgtctccaaaatcaaggaagagttgcttggagcccaaaggaaaaagcttcaagagtcagggaagaaagtggctttcttatctaagatagcctggagtctgacaaagcagtgggccatgcctggagtgaaggttagaccggggtctcacggggctcagaatttgatccaatctagcagcagtggcagctttttaatccaacatcatacccttaagcagctcagctcagcaacaggcaccttttaatggagaccttgaaatatcatccaagtaaggaaccatcgggaaatacagaccaagggcaattaccctgagtattttataatatagctagaacgttgatcactgttccttgtttgtgagttttcttattccatccatttccttgttggagattttaatctgtaaatgaaaaaggcctgcgtgcctattttcaggcacagcaaagaccgaaaagctgggtggggtgtcctactccttagccaggctgagagaaaggaaattggagaagtagagaaagtggcagcccattaaaggaaagagaaaaaaagaagaggctggattcctaggagactgtgctaagagtgaatgaatgcacgcagagctagcccttgaagcagacaggagtccaagggcaagtgatctatttattcttgattgcctcaatctaggcaccaaaattggacaagaaagatgactaatggaatgtaatgagtttctatttcaacaatgcccaaataggcttctttaacttggttcatcacgaataaagatattaattgagaaaaactaaaataacactaaaataaactagaatcaagctgatgatgagcatatatatatgtaagtaactgcgttacataaaatgcagctgtggattatgaaaatcatcaagctcctcttggtgtctacaggatggagtggctgagtctccagccttttctatggagcagagcctccctccaccttggacccatgctgctttgctctatctatagcaaagaccatacccagtcattactccaaatgttagggaggtcatgcaatagcataagttcactttcattttattgataagacatgtaaatgcagtgctgaaacataaagtgacttgctccaagtcagtgggtccctctctgccactccacctattctcatgaaatactgagatattcacctgacccatacatatagtatgactgggtatggtctttggtcatcatgcatctctcaaaaatggtagagctgcaacagtgcctaggatcttcctgcagttacttaatggcagtttaaagctgtctgtcttaactcatcctttctgccgtaactcctgctgctgctctccttttatcatccagcaacctctatctctttgaatttgtaaattcagttactatataagacagctcaagcagtagacactcctttccatggaatcaaggcacaatggctttttctttcaagtttcacactctgtatttgataagcttcatttctgtccagtgacctcagagagtggacagtgcagtactgcttgcctggcttccccattaatttctcagagctgttcctccccagtgcttaagtggaggtccacattgtcctggaccctggagcttcacccacagtcatgtagccatagggtccctgtgacttcctgggtcccatgccggggtattcaaggcctcaagcctgtccctgattccacgattacctcttattggccagtgtccactgtcggtggaatggctgcatggccatcattattagccacatactgagagttccgtgatctttcccaaaccgtaggcgtcagtggtctctccagtttttactctcagcacatggtttacagtgtatgagtgagaaacaatgaaactagctactaagaagcctcgctttagtctaatttttttcttcgtgtagatgtgcagggctttttttttttttttttccttttcaaccttgttgtcatttcaaaatattccttttttcagtggcttccgggcaaagaagattctagtcatgcatccaaaccactcctgtcccagcagaaaattccttttcaacactttagaatctactttttctggttatattagccctgaggttcagggcttttgaaatttcctttaaaggaacgcatactaagggtaaggtgaatatctcagtatttcatgagaatgggtggagcggcagagagggacccgctgacttggagcaagtcactttacgtttcagcactccatttacatttcttagcaataaaatgtaagtgaacttatgctattgcatgacctccctcatatttggagtgtttttaagtcaaatatacagagattgagaataaaatagtggtaaccaggagcgggttggggcaggaggaggaaatggagagatgtgggtctaaggatacaaagtagcacatatataggatgaacactcttgagatctaatgtgcaatccgaggaccacagttaataatgttgtattgtggtggggatttttgctaagtgagtagattttagctgttcttgccacaaaataaaagactgtgagatgatggatactttagcttctctatagtaaccattttactatctatatgtgtctcataacatcatgttatataccttaaatatatataatgtaatgtaatgtgtgtgtgtgtgtgtgtgtgtgtgtgtgtgtgtatatgtaatccctcccagctctaaaatttgcaactccaaggttgcatgttggaaattggacaactgagtcattaaaaataggtattttcccttcacatcccaccctattgatttctctcctggtgcctgttcaagcttcatgctagggtctaccggttcaaagaggagcatgacacatgaagtcagtcttgtcactgctaattggtgtcttacatagataaattatctagttatcaggtgtctcttcatttcgtgacaacatagcatcaagaaagttcgttaagaatgcggagaaaatgtatttttatattcacagttatttttttaggatgaaccatcaagcttttgagggacaggagctgatttcagaaattcatccttcactcctagcattatggtaggatttctatctttgttttattctgtcaaatgatggatttttgtataatgactaaaaggactgtgtaaaatgccattgtagacttcagcacaaaggtactgacatcttttcctttgtggtttagaagcctgaagttttgtgcagtcctactgtcatggggcatgtctcagaagtcactgccaagctacacccaggttgggctggtggatgacactgacagccccgtgtaaataagtttctaatattgttaatgatgacttaaacacccaaatatatttgctttgtattttgtttccttgcacttcagaaaatatgccgttgagaacagctcgatggaatttcattcaaactttcttgactttacaccagcagcattttcatttcagctttaacctacttactattttttttcttttcagtaaacaaatatactgccttatgttgaggcgaggacttgggaggagtttcaggaaaatcattcttcacattttagaggttgtttgtaataactttgcttatgctataaaaatgttaatagcttttgaagaataaaaaccccgtaataattgctcatctataagcagagtcttacggttttagctgcaatctgtggtcccgagtggggaaagagtaacataataccttctatttatgcatggtttatgaactgatttgcacaagggactttgtatttgtaaaaatgcatctcacttgctatgcattttaaccatttaatatttgatttaccaagagagcaaaattttgttttcaaaatgcagcaatatgaccttagactgtgtgtgcgtgtgtatgtgtgtatatatatgtgtatatatatatatacacacacacacacatatatgtatatataattaagcctgtcttaaaagagtttcaaaagatgactttgtaagaagatcaaaccccaactacaggtcctcaggcattttagtaactcatagagcttaatttccatttctcttgtgataacataaatcataataagagtaacaaagaatttccttaatgaattggttgaatacagtgtacataacattgaagaatgtttccaattctaaaatttggaaggatggtgtttaaaggcactgtcgttagttatctcaacaggtggtagctggtaattgataattatatttaaagtatgtgtattcattgtggttggtagtaatacagcatttttatctgcagatctcaaagcatgtgtgaataaatatgcattatttccctattttaagtagccagagactcactgaacgttaattagatataagcagacagagaaatttcatgtccgctgcttgcttgatgctactaaaaaaaaaaaaaaaaaaaaatcttcccagagactgaggtgaagaacacagtgtacctgatctctaaataactactgttcaggggcatggctccagccccaagcgaagccccatgaagcgcaaaatgtccctgcacacgtcttccaccaggctcctcacacctaggctcgcagagcattctagcaagtcttaggtcagaagagacctcagggaccatgcttctgagtcctttcctattacctctagctactcagcacgtgcactaggatggggacgtgacgtttcctccatcctccacagcacttccttctgaaccctggcgaacctcttgattaggagaatatttgttggaatacgtactgtgttgtaaactcttttctaggtgcttgcaatagagcagtgaccaaaacagacagtcactgctgtcacagcgctggcgttccaggaaggaaagatggtctgtgccgagcatccctctatttattcacagctttaacctccccatctgcacccttcctacgcaaagcagggtgtcctaccttcttcagcaaaggctttcccatcccacctatccccatcagatggggaaatatttctgagctttattttctggagtttgtattcttttaatttttaaattttgtgttatgaaaacaatagctatattaaatacagtttctcaaactatatatatatatatatatatatatatatatatatatatatatatcccccttctacctcctgttctccgataattacagcacacgaagaggcaggtttccccagcaacggagtgggtgcagccctgcctcataattctcctgaccaacaagtgtctctcctgggccagacctgagggtctctaacactcagtggctcccagctcccaggcccaagcttgttgtatgctggaaggaggggaaggttgactaccggggcctccttgtgttccagggtcagaagaacctctgaagagcttcctattttttcttgttctacatctttgttcccagaaaattccagaaatgtttttctgattctagttccccaacctccatcctctttctttgttttccttggtatctctgaatgttcgagggggtctaagctattcccgaggagggtgcctgactcattctgaccaagtcctaccagaccaaaaagtactggtcttgggagctgcagttgagtcagattagctttgattgtcaacttagataaccccaggagaacaaaaaaaaggaacgcgtagaggtatttatctttggcccacagcctcttctagcatgcataattatgtctgttattataaatatgggccagccagctttgtgataagtcttgcttgagtacactaaactctctgcctccgtgcccatttgctcagctttatatttcacgggcagctgcttatgaccttaaaaagtgcagagaaccctggccagcagtagaaggttctggccaaagggtgatgcccagggcaggaatgttcctgcctctcgccccatgaggtcctctcagctgtttcaggagtgcctcctctcctagaatagcagtaacatgcagctgatgactgccaacaacatcatgctcttggtaccaggctggactctggaacagctggcatgcttgtacatccctgacattccgagcctgggatgcacccgaggttaaggaaccagcagactcccaaagaattatagagtggcatgcagtctctgccagccatttctaaagatctgggtgtgagatgaatctgcagaagggaaaataatggctggaaagcacctgaaattaagttggctggagtcctgcctggtttgcatattttttgtatgtgcctgtgatatgcattgaaaatcatttgcctaaacttcctgctaactagaggtacaattaaacacttccaattcaggagtcccgttccccatactacaggcatctctagctgttttgttttatcttgttttgaggtctttggaaaaattaattgttggtagcgtatatacaaatgtctattccgggaactggcgtcttcactcctctgtccttctggctgaaagggctcggatttcacttttattcagggccgtaactctcacttctcacttggccaccgtgttggtcctggaaagaatcctctccttcatttcagccgaggaaagattaaggaggaaagggaagaggtactggagcacttgctacccctattatcagatcagatatatgggaactttagcaaaatgtctgttgtatacctattatgtacacctaacaaactggtgattgtccagacattaaagacatatatacggacaaacgcgttggctcacacctgtaatcccagcacttggggaggccaaggtgggcggattacaaggtcaagagatggagaccatcctggccaacatggcgaaaccccatgtctactaaaaatacgaaaattagctgggtgtggtgggaggctgaggcaggagaatcacttgaactcggagaccaaggttgcagtgagcggagatcgcgccactgcactccagcctggcaacagagtgagagtccatccaaaaaaaaaagacatatatacatgaattccccccttctctgggggtatgtgttccaggacttccagcagatgcctgaagccctggatagtaccaaaccccatacacaccatgtgttttcctatactgtaatgggtgggtagcttatatggcatggatatgctggacaaaaggaggattcacattcctggcccgatggagcaggatagcatgagatttcatcacaccactcagagcagcacgcaactttaaacttacagattttttatttctggaattttccatttaacgtctttggaccatggttgaccttgggtaattgaaaccacaaaaagtgaaactgaggataaggggagactcttgtagacatgacagcctcagaagtgcacaggagaggggtctccaggcttccagatcacccagaagccgctccagggacctgaagccagagatgttcccaccttccgtgctcagccaaacaggagccggagagccccaaacagcggtgagggaatgacagaaattcccggatgcctcccactaatttctcacaggagaaagtaagacttccaggcatctatcctggatagacgtccacacatgatcccacactggcactgttctgcatggtggcggctcctggcctgccaggcaaaccaccctgtgtgcattaggggttaatttgacttgggaacctgaccgacgtatgctacaatttcagtgggaaatgtgcattccaaattcctacaagactgcctcaaaacaaatttctgaaatgcaacctgttcgtaagttgtggcttgcctgcatttaatacttttttggcagcaccatacacttacaaaactgtatgctgcttatggaagaggacattctggaaaccacttaaaattcacagaagtttggattctttctctagcatatatttcatttattttcttgctgtatatttgacacgtggtcactgttacagcttatcgtcaagcagatatgccagcactatcttcccaactttgggtaaattcttttaccaaaggacaatgtcctaggtgacaagatatttccagttttttcccattgaacaaaaaaaggaatcactttagaagggactgttctctttcacttcagaggaaactgcagatatgcaacatctggtagaaatccctcggattctcttggatgtaggcataggcttttgctccaactatctgggatggttttctcttggttaagtcactctttacgcctttcggcttttccagctttccaggcgtctgatttttgttattactgtgtttcaacttggggagttgtgacacgagtggttgattcctttatcggccttagtagccataggagcagagctggtttaggggtttagggtgtctgacaaatgcagaaacctccaagttcaccgtgaaagcctggctccctcatggcacctgtcagttctttccacgttaacaacccttggattgtcagtctctctctctctctaacctctgtcttagaggtgagaatacaggcttactatccacaaaagttcgttcatccacagagcgagtggcccctgtgttctgagggaatagtcgtacagagcacggttctctccttaatcacggtgctacctcctgccccacacctactgctagtaattatttgcatgggagctaaattcagcaagaatattcacctcaacaaacctactatgtgtgaaatactgtgttaaatgctacagttagaaatagaaataaaacacagccctgtgcagtggctcacgcctgtaatcccagcactttgaggggccaaggtgggtggatcatttgaggtcaggagttcaagaccagcttgacctacatagtgaaacaacatctctactaaaatacaaaaattagccgggcgtggtggcaggcccctgtaatcccagctactcgggaggctgaggcaggagaatcacttgaacctaggaggcggaggttgcagtgagccgagattgcaccactgcactccagcctgggtgacagagcaagattccctttcaaaagaaaagaaagaagaaaaaaaaatgaaagaaaacacagtcgttattctcaagaatgtgagtgagacaggcgcaggtagactttaatacagtctagtaagtgtactgatagagatataccgaatgttatggaaaccacaggagaagctaacttgcgggaagatgggataggggagactccctggaggaggtgaaatgagcctgggctgcattttaaagggtgcatggaaaacaggcctgggaaggacattttagaccaagaggtcactgtcatcaaagctgagtcagtcagggcacacacatagaggcagtgaggtgcttcactggccaatacaaaaaaaccactcctcagtattcccccactctgccccgccatctttggacctcactggaagccagtggccctcatattctgagtattcctgtgggcaggaaacatagttgttgggatgccaaacacttgtgcttcttatagctctgaaatgccttgggggcacagtagtgattctggattgaaagcatgtgggcatcataggaaaaaaatattaataggttaaaaatgttctccaagtctgtgatctcagatatctcaaaatatatgtggttaggcgtggtctttctgtggaacttgcagcaaaaatctaccttcccaggcggtggttcttcaggaagactgtagcgtgcaatctccagtgttagtaaagacagatgttgtcttgtgattcttccatgcaccaattctgcagtttctaaagagtagcagaactggcctcggtgtgctccaagatttagagtaagaatagcagagagcaaacagcaagctggaactactacacatgtacacacgggagccatctctcacaagctggaactactacacacatacacacgggagccatctctcacaagctggaactactacacacgaccacacgggagccatctctcacaagctggaactactgcacacacacacgagccatctctcacaagcaaacatgctgagcacttgacccaatgagatacaaaaaccctggcgttaggaaggaggtaggagctttatctgtgcttgtgttcattcaggcagtgaaccatttaggaaagaattgttgagcacctaccatgtgtaagcactgctgtagtcactgaggctagagcagtgaacaaagcagtctaaaaaatcccctgtcctcttggagcttactgtttaggggaactttatcccaagggcaaagagaagcattgaaaggtttgatacaggcaagtgacatgaccagattcacatttgccttggctcactgtattgagaaatctgaaggaaggattgtttgggaggatagtgaaggaagaaacgggagcagagtccctttaaatgcaggtctaaccaaccaaaagcttcaacatgttacacactgtttcccccaagagcaaaaatttcctgagatttttagctgttgtttaaagataactaaacaagtaatatataattatcctgagctttgtgctttacactgaataagacatcatatttctgcagttaatacttctgaaataacaagtttaaagaatgcctcctgatagacagctttctgcaaatacgcctgcagttactctcatcactcctgcatcagtgtggttgataagaaatgacaaactagaacatgtttggttaaatagaccatctgcctattcataatatggacattaattcttataaacagttacttcagctgtgtgaaatgcctgatttcctttcatgatatgctcatccctgggcaattacttctatttcacatgattttgtagtggaccatacaaacttgtttttcccagtgtagacgttaaataatttaatgggaaatgtatacggaaaatgtatgttaaataatatgtatgtgaaaatatttcaacaaggttactctggtatgtgaattaagaaacttttcttgatgaagtaaaacataaggttcagaagagtgtgaatctgtgaacaagcctaaacctcaaaacatgaagcagtataattttaatagttgtaaatacagtggtagcagaccccactgagatttgctgtgtattctgtatgcaatattaaacccagagatgctttttattttactttaagttctgggatacacatgcaggacatgcagttttggtacatagataaatgtgtgccctggtggtttgctgcacctatcaagccatcacctaggtattaagcctggcatacattagctatttttcctgatgctctcctccttgtcctcctgcaacaagtccccatgtgtgttgttcctgacctgaaaatccttgtgtccatgtgttctcattgttcagctcccccttataagtgagaacaggcagtgtttggttttttgttcctgtgttagtttgctgaggatagtggcgtccagctccatccatgttcctgcaaaggacatgatctcgttcctttttatgggtgcgtagtattccatggtgtatacgtaccacattttctttatccagtctgtcattgatgggcatttaggttgattccatgtctttgctattgtgaatagtgctgcagtaaacatacatatgcatgtatctttataacagaatgatttatattcctttaaacccagacattctgttttcttttttttgaaacggagtctcactctgtcgcctaggctggggtgcaatggtgctatctcggctcactgtaacttctgcctcctgggttcaagcagttctcccgcttcagcctcccatgtagctgagactacaggcacccatcatgcctggctacgtctgtaatcccagcactttgagaggccgaggcgggcagatcacctgaggtcaggagttcaagtctagagattcttatagcatcctttagccaaaattcattcggaattctggatcttttggggtcttagaaaagtaatgtcgtggccgtattgtctgttacacagcaaagttaagtctgaggccatacctggcaattaaacatgttaacatttcttccataaaactcatgaatattcaaacttatggagataaagaggataagtcagtacaggttaagttttgtcaccaaatatattttcttcattctgtttttattgctttctgctttctgggttttaggatacatataagagattgtggacctgtaaaagaatcccaaaggaattttggaaaattttcaagtccagcctatgatatttaggccaagaaatggcaaatatgtctagaaataatagctaccacaaccaaaatatataggtttcttttttgttttccatacactaagactacaggtggcttggttgacagtgttacttttaaataagatgagacaatgaataaatgaaggagtgaatgaatgtcagggtgaagaaacagtctcagggtctcataaataatgcccttcccttcctcgtgtcttggctgctttagcctcaggatatgtgagtctggggtcgtcggaagcctggatcctcctccagccatactgcaactgtctatcaaaatgacttcccaaaagttttccaacaactgagtcatggaggaagagctttaagaactaaaacaaataaagctcattccttccccaaggcctttgtaattattcttctctctgaccagaacgttttcccccatggctgattccttatcatcttttggatctcaggccaaatgcaacgcccaggggaacctgccctatccacccagcctctatgcccttactctgctgtgtgtcctcatcaccctctgaaattcttgtgttcactcccttttgatcggaatccttcactagcaggggtgctctattagggcagagcctttttgttccgagatgagtctcttaggacctggggcagtgacgggcagacagcactcagtaagtatgtattgggtgaataaataagtgaaggaatgtttccctgactgtcggtgctcagtgaagagctgacctgtgcctacggactgaatcatcttttcatttgtaacttttaactattgtaattctagataatggtgatgactgtattgtgaaaattattaaaagttttataaaaatacaaacacaagtaccttttctccctctcttttttaattcagttacctaccgcggtgactcattcatactaacatctgagtctgtgtcagaaacaagcaagagaaaacagaggcagagataaaggactgatattataatttttgaacagctctttcttctagataaatgttctttatataaaaaataaaatctccccaagaatattcttagactttaaaaatctttatgtgtgtgtgtgtgtgtgtgtgtgtgtgtgtgtgtgtgtgtatttttttttttctttttttgagacggcgtctcgctgtgtctcccaggctggagtgcaatggcacgatctcgactcactgtaacctccgcctcctgagttcaagtgattctcctgtcttagcctcccgagtagctgggattacaggcgcctgccaccatatctgcctaattttttgtatttttagtaaagatgaggtttcaccatgttggccaggctggtcttgaattattgacctcaaatgatctgcctgcctcaccctcccaaaagtactgggattacaggcatgagccaccgcgcccggccaaaaatcttgcttatagtcccttacaatattgaaactattgcttctgctcctttcattgcttaatttattgaattctttccattattagtaaaatatattttgtttctaaaagctggcaagaaacttactaaaatactacagtctaacatttagcatgctgcaaaaactttgacattgtcatacaaataagtggattcttcaagagttcaggttatcttgcaggaaaaagatgatttagttttatagagtttccttcttgaaagaggtctagttagaaaagatttcaaaccaaataggggcggagacagggtagggagaaaataccactatggatacttcaaatgaaataagaaggaaggacaataatatctaatatttgttgcttatagtaatactgtatcccaaataatcgcaaaaaaagctttactggaaaaaaatcattacacctatctgattataaagaagaaacaaaaattgattagtagtttgctattttcaaagtgtaaaaatagggtaattaatgctagatcatttgacactttggttttctaaaattaaacttctcagagaaatagattcaggaagaaatttcacaaaacaacattaattaaaatggctgggaaaaaaacaatactgtaataacagttgtagagtagtgaaactgggggaaagttaagcagcattttttgctttgctgatgactgcagtgggggaacttctatggggagaaaaagtggatattggctgttgccttaattaaactcatgatttatgaagaccctggttagccacagccacccggatatttcagagcgagagtcagagcctatttagtctgtcactgactctgagtttgggaaccataaataggcctgcttgtgttgggcttgtcttgtcatggacgtccactgagatcaacggaatgccagaagtgacccagcaagtaggagagagacacgttcctacgagagacacagaagagcgctccccacattctttaaatattttctcccggctatcatcataacctctgtcttatcgggattaatctttttctggctcactttgatcccagtcccctgttaggctcctcagatgctgaatacgttgtgaaactgtggtgtcaggattagagataaaaggggagatgtagaccatgtgtcatcagcatgctgatctcagagtgaaaatgcctgacttttcttcaagttatcttgcgtgcactttgagcatgtgggtgattaccatcagagcctggcaattctccctgcgagtcccggccctgcagcccacgagagcagggaaaggcaggatctagcagggtgttcctcatggtgccattccccatggacacagcctgggaggtcttctgtccacccagagagcctggagcagggagacagtaagggcctgggatggaatgcagctccagaggctgctgttttgcctgtttgtcataggattactgtattacagggctttgagaccagcctgctatgtcccctcagatctggcctctgaggcccctgggcaggatggcattttcactgcctctctttcccgctccactgaccttcactcagtatttcctccttctctgaagcccgcttctcatcaccacctacagcctcaaggatgcctgcttgcatctttgaggcttttgtcatcgggcttgaagatttttttccacatggtccccttaatctgctcccattcttgacagtttaacactcgtgctgaaatttcattccttgcagagttgggattttcatgtgaatcgttatagcttctctctggtttaccattggcttcccagagctcagcttctgggcacttaataaatgttcatttaatcaattactatcccaatactttgttctcttgtaacaacagttttcacctccatttctgacaatgctttcttctgattcattcaataatgagaggtcaacacacatgttctctgtttttctctaacaaaaaagacatgccttcatcccttcttctgttcagtggtgccccctctacctgggccctgtgtggcattcccctctgcttcctctggatccttggctccattaatttttttccacattctcctatcttcagtcgcttccttttccctttcttttttctttctttttttttttttttttgtgaggcggagtcttactctgttgctctgttgctatgctgcgatcttggctcactgcaacctccgcctctcaggttcaggcctcctgcctcagcctcctgagtagctgggactacaggcatgtgccaccatgcccagctaatttttgtatttttagtagagacgggttttcccatgttggtcaggctggtcttgaactcctgacctcgtgatccacctgcctcggcctcccaaagtgctgggattacaggcatgagccactgggcccggctttccttttccctttctttttccagacaggtaaaatgcacaaggcttgaccgttcttttaaaaacgcttctccactgaaatgactctccgtggtcacaaataacctctttattcctgaagccagtggacccttttcagttttgctctcatctgttttctccactgtcagccacatgccttttccaccaatttgccttctttttttttttcctctctctttttttttttttattttactttaagttctagggtacatgtgcacaaggtgcaggtttgttacatatatatacatgtgcacaaggtgcaggtttgttacatatatatacatgtgccatgttggtgtgctgcacccaataactcgtcatttacattaggtatatctcctaatgctatccctccccacttcccccaccccatgacaggccccggtgtgtaatgttccccttcctgtgtccaagtgttctcattgttcagttcccacctatgagtgagaacatgcggtgtttgtttttttttccttgcaatagtttgctgagaatgatggtttccagcttcatccacatccctacaaaggacatgaactcatccttttttatgactgcatagtattccatggtgtatatgtgccacattttcttaatccagtcaatttgccttcttaaaacttcttggtggcccagcacggtggctcatgcttataaccccagccctttgggaggctgaggtgggtgaattgcttgagcccaggagtttgagaccagcctgggcaacatggtgaaaacccgtctctacaaaaaatacaaaaattaacccgatgtggtggcacttgcctgtggttccagctacctgggagactgaggtgggagaatcacctgagcctgggaagtcgaggttgcattgagctgagattgcgccagtgcactccagcctgggtgacagactgaggccctgtctcaaacaataaaacttactggttttcctgcctgattgctttctctgaactgtaccctagatcttcctaccgtggtggttcagatgagagatgatggtagcctgtatgtgggtagtgcttatcagagatggaaataaaattgacaagagttgataatgtattagaagcggaggctaagagagaggtaagcaagataatcactaggtttctgacttgcataattgggcggtgatgtcattcactgagattagaagcattccagggcgactatgtggtagagaggctacaatgaattcaactttagatgtattggagatgtgtttagaatgtcttaagggtaaatgtcacataggcttttatttatttatttatttgagacagagtttcgctcttgtcgctcaggctggagtgcagttgggtgatcttggcgcattgagacttccacctcccgggttcaagcaattcccctgcctcagcctcctgagtagctgggattacaggcatgcaccaccacgcccagataatttttgtatttttagtagaggcggggtttcaccatgttggccaggctggtcatgatttcctgacctcaagtgatccgcccacctcggcctctcaaagtgctgtgattacaggcatgagccatcgcacctggccatgaaggcttttagatgggtctggagcttggaggagaagtctgaactaaggataaactaaaggtaagttgctgagtcatctgtagagaggtgggaattgagggcacggatgagacagcctagaagaaaaggaggagaagatgagaagagagtatcgaggtattggaaactggggagggcagacaagtctaaaaaggagactggaaaaaagtagttgaagatggagagggcaaatctgggcagtgttgggacacggaagctgaggaaaagagcagttcaagatgcttgaaatgaacacaccaaaaatactgtgaactattcagcacgtccttgttttataagtaaaattcatagtcacatcagcgaaataattttaaatgtatgtctgttgacttaaatattggttttcttttgtgactgaggttccagtacttaggaaaggaaatgaaagagaggcagggcactcagggctgactgtcttctcaaagtgctaactgatagactcttccaagaatggaatcatttgtgttttctttttttttttttttttttttttttgagacggaatctcgctctgtcgcccaggctggagtgcagtggcgtgacctcggctcactgcaagctccgcctcccgggttcacgccattctcctgcctcagcctcccgagtagctgggactacaggcgcccgccaccacgcccggctaattttttgtatttttagtagagacggggtttcaccattttagccgggatggtctcgatctcctgacctcgtgatccgcccgcctcggcctcccaaagtgctgggattacaggcgtgagccaccgcgcccggcctcatttgtgttttctattaaaacatataacccagggtattagaccaccatggtggtcacggcgatcacaaaatatttttaactggtttgctgtgagctgatttagtgttctgaaattttattatcttgactggtagaattattggaaccagccatacatgttagagtgattgacagctacttctgatgaggcttttattggatctcaggcagcctgcaagtcactgtcctttgcattcagatgcatttatttccacagcctccagggtagctaatgttatttttccttcccattccgaaattttaagatgcctcagctttagcctggctcctaaactgatggacaagaggagaatatgaagaggaagacgggtctcctggaatcctcagttcccaggctcttccctccagtggtccaggaacacttttgtccctgtcatagatttgtgtaattctcatgatgtgtaacatatggaaagaaaaaccaagttttgtgtagcctaatagatagctgtttaggaaaccattccaactgtccagctttctgagagtttgcaaatatcactttacttcttacattaatagagcctcatgcaaatcaaatcatgttgaactttattagctatgcttgatgttatttatgttctaattaaattaatgagaatcttgcatttcttcacaaaattaaatttctagagtctctttttattgtaatgtctacattccataatcaatgaatgcttttaatcctctgcagtgatactttctagtgttttgggaatgaagcaaaggcttcagaaacattcaaaacaatcgagtgttaggctgtgctattgtttgtttaatgggcagaggtcacttgctatgggaatactgagggtctgcatgctggaatcattctctttttgcccaggatgggatcattgggtgagtttacttaatccatgggctttgtttcccaagactgtgtcagggaacaagacacaattgtttccagccccagagtcctcttgagagagtggctccagcaactttgctctgtctcatgtgatgtagcatcctccggcatcatttagaaaagtgaaagagcaagtagaaaggaatctatctgatcttcatttctttgctgttgttgttgatttgtgtcacacattgcttctcaggtggccccaagagtaaatcagaaattccaattgagattgcaaattttgttttaattctctgttgcttttccagcaatcagtgctttcctttaaattctgtctcgtctcctaaatgaaggcagcgtcgtggcccagtttgggtctctgtttagcaactgtggtctgtttgaactgaggcagtccacatgttacttccattctttagattaatgtgatgaccgtagtccctgccagaatcttttggaaccagttatcccaggatattgacatgtgacacggccataggactgaaaacttcctctcttccagggccagccacaggagagagaaagggattaagaggctactgttgtgtcaatgctgcaacttgctttaggactctgagctggtttcttaacttttccgttgatgagcaataaaaccagtagaacaataactgccttcagtgattttacagatttgtgttagttaataaatataggaatttagggaaagctgtttctgatttatatttgataccgatgtaacattttattggcgggcgctcctgctggatcctcactctgtggttaacagtgactccttttctggtagcactccctggctctgcaagtcacgggaaatagcgtaagagctcacttgtctcttatgttgaacaaacagaggcagcaaccgctatggcagagggtggcaccttctggctatgtgttttcctaagtggcctgaaatgaaactcctagaagttgtctcattgataaaatgaatgcaatctaggtaccactaattatctaaccccgggtcatcagcaggatttaccaccactgccagcagccccaaggcataggggaagaaagaattttttaaaaagaagtcatggaagcaacacagagagaaaaacaaagcagcgcttatgaatgagattcgctatgagcccccacccccgcccctcaggaataacattttagataagcagtggacacgaagcaggccccgctctgaaagagcacaggaggtagaaatgtcttccttttctaggatatagatggtgtgggtatcaaagccattgttgacaggaaggaggtggtgttggataagagactaaaaatagagccggagtagtagtttgaatccagcaaaccagccctccttctaaaattctgcagcacgatcccatcacgtaagaatgtgtctcgtccgtatgtgacaaagacacggttttattgaccttaaacaaatgggctatgtctgccagaaaagcttgtgccgtcttgactgtattcataagaaatagagagatatgaatcatgccatgtaggttccagggcgggggcgttccctccctctcgtccttcgctttgccttgcattattgcagacgacagcagtgcagggatgaactcactttctagggaggaagccgccagtaaataactaaacaaagaagataagttccgataatcatcgctgttaaactgagactaaaacgagagatgaggtagtgactgggagtggaggggaagttgattgaggtggatcacgagggatgcctctctgcggaggcgatgcccacatcgaagctctcaggatgagacggaaccagccgtgtgggcagctgtgggaggacgcagagatgggcaaatgtaaagatgcgaagaacaccagaaatggtgtttttgaaggacagaaaaatatgagtcgagctagaatctaatgagcaaagagaaacgagttagatgtgattttggaaagggaaggcaatgtgtttctctgtgtgctgatcagtcctgaggtgctgcagcaagaaattgacatatagaggtggataccagaatggtgaggagtttggaagaaaaaccctatgaagagcgcagtcggaactgggggttggttgtcttacgaagagaagactggagagagagccatgataaatgtctgattatttgagatgtgatctactggaagcattacacagatgatggttccatagagtggccctcagaccattgaaaggggccatggctaaggcagaactcacccgccttagaaggaagcactttaacccttgacctcatccatccaaaaatggaacgagcagcttcacaaagctgcgctgttagtttctagtcacaaagtgttgttaggcaaggacagctttaatttactagattttaagatttttcaggccagtgactttgttttctgtccatgttatatctctggcaagtacctgcgggtggatgctcagtcagtgtttactgaaatgacaaataagtaaatcgcagtagcaactggaccaaggatggctcaggcaacctctcagattatacctaattctaggattttataattctgtgatatgagtaaaagcagaattattttcaatacttaacaaaattttattgggaaaaataaagaactgtgaacattggtgagaagtcttaaaaataacttcccaaactctagcaaatgcaccctcaccctttccctgcaaagctccccacgcaaactcttctgtgtttcctaagccatgaagtacaatagtgccattgctgtttgtcagtgacatagaaaatattatttaactttatttaatgggggattttcagataatttggacttcaaatatgcagttttgaaagttgatctgaaatacatcacttataattgcctttaggcttttaagcaagcatatatgaaatacatttcattattttattcactatatttcagttaaaatttgcttttaaaatataaagtgcctgggtgcagcaaaccaccacggcacacgcatacctgtgtaacaaacctgcacgttctgcacatacatcccagaacttacagtataataaaaaaaattttaaataaaaataaagtgtcactaaaaaagtatatcaatagtcttagccttattgtcaaagaaaaaaaatggaaattcttagaccattttcatcattcagagtataaaaaatgttgacatgtactctattgtacagtgatcaaaggcattattgtacattctttaatttgaggtgattcttctaatgtgtagtaccaattattctgatctctgctgaaaagtgatgacatgtggtatttttgtttaacatagatctagtaagttgggtaatttaagtagatggttaaatatactcagtacctgaaataagcttgcgtatatgaagctttgatttatggaactggcggagattcagtcagtaacaatgtaattttaaaatagcatctgcattgagtggattacaaaggagaccacgattttccttcattcattcaacaaataattacatgcctactacgtgccagctcatatttgaaggcctgggataccacagtaaacctgacaaaaaccctgctgttaccgagttcctcataactaccaaagggttgcaaatgagatgtggaaagttctttataaccatatatatctacagagcactttatagtttacagagcacttccccaaacacctttaggcctctaaaacctatgaaaaaggtgcaatagtaatagcaataggacaataacataataaacatgtattgagtgtttactatgtgccagaccctcctctacaaactttatatgttttaacttgtgaattttcagaacaaccctgtgaggtgtatagttttattccgattttgcagatgaagaaattaagacacagacagattaaattccttggccagagctgcatagctaataagtggtagaggacatgctatcacccacaccaccagctgtggaaatgggagtcatgtggtcatgagttacctgggtcgcgcagccagatggaagtggaatttaggttttccgatttcagggccagtgcttttctgaatgcactgcagctgcctacctccaagcaatgacattgttaaaatgattagtaagcttttgctgagttaagctgtgataacaaataatccccaaatctatgacttacaacaaaggtctatttttttacatattttgtgagttatatgagttgatagtggctgtactccatgctgttttcgtactagaaggagaaactattatctcacatattctgctctcacagcaggaaaacacaatggtggaccatgcactggctcttaaaatcttctgctccatcgtagactgaaccgcttcctctcacatcttcttggccaaagcaaatcatacaacgaatggggtgggaaatgtacgtccccccacagtgagggcactaagtggtggtggtgggggttggggacctctgaggatgggtctgatagagaggggttgcaaatattttgagcaattgtgatgtttttatataaatattcttagttagtggtttttattttttatttatttagtttttttagagactaggttttgctgtgtcacccaggctggagtgcagtggttcagtcatagctgattgtagcctcacacgcctgagctcaagggatcctccacccagcctcccgagtagctgagactacaagtatgcaccactatgcctggctacttttttttaagagatggagtctcgctatgttgtctaggcttagtcagctgttaaaaatgatttgattgcaaacaactatgtggtctgcactgttctggtcatttttctttttcttttcttttttcttttttttttttttttgagacggagtcttgctctgtcgcccagactggagtgcagtggtgcgatctgggctcactgcaagctctgcctcctgggttcacgccattctcctgcctcagcctcccgagtagctgggaccacaggcgcccgccaccacgcccggctacttttttgtatttttagtagagacggggtttcactgtgttagccaggatggtctcgatctcctgacctcatgatccacccgccttagcctcccaaagtgctgggattacaggtgtgagccactgcgcctggcctgttctagttatttttcaactgttacatcttttgttttaatgcaccacttggccttattatccttatttggcagatgaggaaatggaatagaaagagaaacagaaaagttaagtaacttacctaaggtaacacaactcgtaaaggatagagtgagattttgaatgtaggttttcctttgccaaaccccagatttcccacttcagtgtactacatgttggagggaaatcgctaacgaatttggttcatgtttggacagatcagtgacttttttgtaaagccaaagaattcttacgtgtgaatgatttccagctagtagagaaaaacctaaactatctataacctccaggaaattagtcattctggctaaccgcatttttccaggttaatgaagatttaatattttaaaaataagcatttttatatttctgttgactaaaaacattcacactgtagaaattctcacgtagtgcatagaatattaaacatgcaatggtgaattgataaggtctcccgcaccaactgtcacctgattccagctggaagcttatttaatggtgcggcatttcagatggataagaatttgttatgcaaacaagggtttgttcacatttgattttcttaactatctaaaggctctaaacagtgagagatttgcccagagacaagagcctttcccaccaatcagcagagcctctcagtgttccagagtcccaaagacatcttcatttgaagggttcggggccttaattaaaggactgcattttgaggtctggatttccaggttatcaattttgggaactgaaaaaaacctttccacttagaaagtcatcatgggggctgggcacagtggctcatgcctgtaattccagcactttgggaggcagaagcaggaggattgggtgaggccacgagttccagaccagcctgggcaacatagcgagaccctgtctctacaaaaataaaaaattatccaggcattgtggcatgtgcccgtagtcctggctacgtgggggactgaagtgggaggatcactcgagcccaggtggtccaggttgcggtgagccatgatcacaccactgaactccagcctgggtgacacagcgagaccctgtctcaaaacaaaacaaaagcgatgatgggaagttgtcttttactgttaaaatggaaaagtgtgggagaaaattaaattacggctatgctttttcatactaggtgggccttctttcccagtatagagtcacccttttacaactctgaacttaagatataaaatgagatggtcgattgtttagtaatcactagaattctattccctcctcgaggtgtaagtgctgtcttcttaaatgggagaaatctgtttaagtttcatgatacatgctgacactgtgtatcttacaagtaaagatgctctctccaactttgggttaaaacatgcacagaacataaaattcttggtgactgtaaatgagatctatccattacagtgggttactttattcatttcaatatgttactttgaatacctgcatttgaattaaatgagattgctggcaggtgctgtggctcatgcccgttaccccagcactttgggaggctgaggtgggcagatcacctgaggtcaggagttggagaccagcctggccaacatggtgaaaccccatctctacgaaaaatacaaaaacttgctgggtgtggtggtacatgcctgtagtcccagctactcgggaggctgagccaggagaattgcttgaacccaagaggtggaggttgcagtgagtcaagattacgccactgcactccagcctcggcaacagagtgagactccatctcaaaaaaaaaaaacaacaaaaaaatgtggttgctgagaatgtcacacgtccagaccagtcaattgctcttaattatttaagtatacacacgactttctttcattatgctccttatgagtcaaacaaatatggagtgcaaagcttttaagacctctaaaatctctccatcagttgtatgctgctgtgagagtagaaattgctttcatggagatttgaaagggaaaaaaatttaaataacgatgtgatttagtgtgcagttggcaaatcagcatacttaaaatacatgaatattaaaataaagaatgcaataaacataactactgacttacaatttattgagcaactgacttttaaataagattttttccactcagactttcttcatagaccttcagagtccctcctattgttatttttttccagatcactgttacgtagaggcttatcctactcacagaatttacctgcatatttaaatggcataattattataaaaaggctctgggatacctttgggctcagtactttagctgagaaattttatacataaaatgacacctggctaataaaaggaagcaaatcggcatttattcagtgtccgttaagtgccaggagcttcaccgtgtgtctcatttaatcacattgcaacagtcacaacagtcctttcaatttggagcagtagttgctcttagttcggcagacaaagaaacccagcttcatgtaggtgaagaatcggcccaaagtcacagaatttgtagagcaaggatctggacccaggcctctctgtatcaaaggccttggctatattttcccatgaactctgccggcagacacgaaactacctctgaaaggagaaagaaaatgatttttttatttgtttgttttaaacaatagaggctttatctctcttgtgtcacattttactttagggtttaacacaagtctgtgaacatccagaaacactggcttcatgttgctccatcatccccagtaagaattataccaagaggccgggtgtggtggctcacacctgtaattctagcactttgggaggccgaggtgggtgggtcacctgaggtcaggagtttgagaccagcctggccaacatggtgaaaccatatctctactaaaaatacaaagagttatccgggtgtagtggcacgtgcctgtaatcccagctacttgggaggctgaagcaggagaatcacttgcacccaggaggcaaaggttgtagtgagctgagatcgcaccactgcactccagcctgggcgacaagagcaaaactctgtccccccagaaaaataacagaagatttatacaaagaaatttatgggattatatgaaattttccaggcttcaggctgaatagaccacttttatatggaaggcatacttcagatatcttagataaatgttttctttgataaaaaaaattttgagcttctccttgtaatatttgtttttcttaaattgcctctccttcctccacacaatcattagcctctgaaaaataaagatatattatctttttaaattgaagcaaacttttatcttttaagattaattgacattatctaatctattttgtttaaacgaagttcatacttacaagagggattgaaagtgaagtgacatttgcctctaaatcgagatagcagatgttgcaaacccagtaaatgccttaaaaaaaatacagtttacagcaaaaagtaaactctgaaagaaaacactgcaatcaaaataacgatacacttgatcagctttaaaactgatgtatacattttgtatattttatgtttgcctttagtcagtctacatttccttgtatctttcacccattctttttaattctaatctttttcctacagaaaaggatgttttaattattatattgaagtggacattagtttcttgatgccaaatcgtgttctgtctggtggagcgtattttctcaagggagaaaaattcaaaacctaatgcccctatgtgaaatctacatgtgcagtgtaaaacaaaggatcacgcaggctggataaagacaatggaagactttgggtggcttcttacagttctctaaggacccatgagccgttccatcttcagccgttccacccacattctctcccttttttgaggactttttctctctctctttttttttttgtagttattgaagctttaaaacatgatagaaaagaaattctcatttaaaacattttaaaagagaataagataaaaatatttcacaaaaatatcagtcgactcatgaaaatgaattgggaagtcattcttccggtatttagcattgttcaagtatggcttcctcgaaaaagactggagtattttatattctttcaggtctttaaaagcagcagaaggctttggttaacagagcagaatttcccttatttaggtaaatgttacactgaaagtagtaatccttttgaaatgctaattttttcatttaaacctagtaagctggaggaatttgaacgtgtgtgagaagtcttttatttctttggtcataacctattattttcttgaacttttggatggcagttatcatattgtgtgatatgtcctcagtttcagatttccggagacatgtaatgaaaacaatacaatcaacagtgaagataatatatcaaatatatcagtgcccattgcactgatggaataagagctaggctgttacagtcagcaaaaaacaaaaaacaaaaaacccaaaccagtgagctaagcactctgggttttggtgttgtgtttacgaaccatgtgtgtatatttaaatatgtctggggaaatagtttgtctctaaggcaattcaatcagtactcatttaacgaaagactggtactttcggaaaatatcttaaatttcagtgcagcacaaaggagccagtttctaccctaaattttcaggagttgtatatgatttaaattttagagcttaatttttgtgtcatttggcaaggatgacagccctgtgggaccctgttgcctttccccttgcacatgttagacagatctgtatctcttttatcggagaagccttctaacacagttttgagtctataggagttctgtaagcgcatcatgataatgtacccccaaagcacaaactttgtaaacatttttaaacacgtaatggatgagatcattaactgttttaggaagaaagctgatcagcaatggaagaaaagaggttcttattgtaaggtaactaacctaggacccgctgtctcgttcactcccctagcattgtattgccaaagaagttaaaatcaacacttacagaggattatggtatattatgcttttcagtagagattccaagactccagaatggcttgtgtttcatgcaagcatctttagcaactacctgatggccagcagtccagctagatctgagtcagagatcattgtggcaccgtgtggtgactcctggagatggcagtgtgtgtgtccctgggatgaccaacagcagccagagagattttttcctgggaggtcacacagcctgccagaattgggcttatgtgtatggggagaggatgggttcagagaattagagtgatcaagactagttctttcacagtcagtcctaaaaatttgcatccttcattgttaacatttttttttcctgaatgagaagactgaagtactgaaaagttatattctaaaaatgttggatatattcaacccttcactacaccacgtcttaactctcacatccccttaaatccttcatgcattctttctttgctgttctttgtacatcgttctgttattcaacttgctccattcaaagccctgcattcctgtttctgcaatcccattaagggcgtattgcacactctgggactctgccaagggccctgcccactcttcactgtctcttggatgtacgtataggttccaaccgttgcaaaatgatgatgttcttcacttctaggctttctcgaggttattctgataattctaaattatttcgaccctaaagttataagaataaaatgtgcaggataattgtctttttcccctttggacatagctataaagaagaatagatgaaatttgaatcgattatgggctccatctcagcctgtcttcattgtggggctagttccacataaggtgtgagtggcagatgatatactaatcaggaacaatttagtaacttaaagactttcttctgaactgacaaaattgccccatcttagaataaaggtcataaccatcccactgactatatatataagcagttaatttttttgagtgtacatttgctgctatatcctacagataaaactgtaaactgaaaatgcattcatctgccttttaagatcctaaaactctcaaaatatgtgtatatagtccgtgaagaatctcaatacgagtttcaggagttggtcaagtcatcccctgtaactttgcttttctccttttatcttgtaaagtagccttacgtctttgatccactcgtccaaaaaaagatcatagcattgcagttatggattttatttcagatgtttatttaaattttttaatgaattttgatattcttgttactatatagaacaagattttagctgtgttggagcatttccacttgtaatatagcccaatataatgccaaattaaatggaaatagttgtaggccaaattctgttggattattatttttagcttactcttttcttctttcaaacactgctttaaaaataattattaaaaaaaaaaacggtacccggagtgccattattttcttctctcagcttcacacagagctccctcagggtagaattggtgtcaaaaaaaaggtagtgaatatattcaaggtttacttgcagtttgcagctgccatagggtgtaatggttattatatttggcagcagttctccaacttgagcttgcagcagaatcactggaaggggctggttaagggcactggatcccatcttagactctaatttcatagatctggggtggggctccagaatttgcatttctaacaagttcttaggcgatgttgatgttgatgctgacagactgagaccacccattgagaacctctgcttaatggtaatgtctgcattcacgtgtaacagatatacatatgtgtgtgtgtttgtgtgtgttatatacacataggtattttttgcaagttacgcagtggtgccctccaaggcccacctatggatctgattgtgactgtcctccaaaccttagaggacgctggataatgactctttggaatgggtcatggcgttactgtctctaaaacaattaggcggttgggaaaaaagcaaaataatgaaagtgaattaagagaacagagtatttgaggtgacagaagtgtgagcatctagaggacttggtatattatgtatcaacactgcccaaggatgcatttctgtggctttaactaacttgcagaaacctgaggcaagttgtggttagtgaaggaaagggaccggaatcgccaagaacaaaaggagccatgggattacctgggggtgttatgtaagagcagccctttgagatgggtattaccaccctcattttactgaagagaaatgtcgattcagagaaagtacagaacttgcacaaggtcataaagccattatataatagaattgagattcaaacctcttcatctggtccccatacaatgctacatctagtggaaaaagaacaagaatttgccatttatatcatactgccttcccccatccaccaataaatcttattgctaactattttgttgtttttactctgttagcaacatcttaatgtatcctgattgaaaaatattctcagaattcaggagtatatagtataaatgtataaagaataaatgtaaattgtgtatgtgtgtatatatgtagatatatacacacataaaatatatagtgtagaaaataaatacgtaaagtatatagaatcatgtatatagcatatacttccagtcctttttatgcatttacaaacatgcatgtgtattttttattctaaattaaatcctactatatctatttttctcaattctgagcttattactgaatttagtggtaaacaaatttaatggtaaacaggttgtttgctaaacctcaccaaacaatttatatgaactgcttttaacaatttataatgacttcattagacaattaataacttatatccaaagagaatactcagggagaaaagcagacttatttttctgtcttacactctgtaaaaagaacaatgtcagtacatacaaacgctcattgcatttttcatttaggcattcaatgaccacctactttaaattgcttagtgtttgcaagaaagccattttccctctcaaaaaaaaaatacagcaaagaagaaactggccaagggctaatttgcaattcaaagaacaggtattgttatgtaagaagtcagaataagatattttcattgctttccgagtttcaccttgtgttacttgtatgtgctatagcctttagtcccacaatgtaaaaagcaaatcttttgagttttacaaccatcttacaaaatcatttttgtaagagaccatgcagcgactacctattaaactaatgtcaggagtttagagtagtagcctgacaaagaaactcactcctctcctcttctcatccagcattggttacataaacatcagtctgagaaggacaaagctttggttgtttggaaatggctccagaaactcgacatttaaacacttccatttgtactgaaaactctggctatttttggagtgctgtgctttggttggttttgcatttgttttggagaataacaaatatatttaaaatgttttagtaattagagaaggcagatacctttgtctataaagccagttatgttttccacatttcagtggcaccccaagctaaaagatggtgaaggtgtatttgagaagaataaaggtaggtaacagagtggagagctgtctgtaaagggtatgtttgttataattctggatatcctggctgttggctaaggtaagcagatctgactgtgttacttagctttccacagataatttatggaacacctcagggaacagctttcatattttacaagttatttttatgaatattctaagaaagtcctttattatgtatttatttatttagatacagggtcttgctctgtcatccaggctggagtgtagtggtgcaaacatgggttactgcagcctcaacctctgggcttcagcgattctcccacctcagcctcccacgtagctgggaccacaggtgcgcgccaccacacctggctaatttttaaatttttttgtagagacagggtctgcctttgttgcccaggctggtcttgaactcctagactcaagcaagcattctgcctctgcctcccaaagtgctgggaacaggtgtaagccaccacactcagcctattttttaacattttttttattgatatgtaacagatgtacatattctggggatacatctgatgacttaatacaaatcatataatttgtaaagatcaaattagtataactgggatatccatcaccttaaatagttgtcttttctttatgctggaaatattgaaattcttttgtagttattttgaaatacacaatagattactgtaaactatagttaccctactgatccgtgaaacactaggtcttattttttctatcaaactgtatatttgtacccacttatcatcctctcttcatcttcccctcacccccctactcttcttggtttctggtgagatctgcttttttagccccctgcatatgagagagaatgtggagcatcgtctgtctgtgcctggcttatttcacgtaacgtaatgtcctccagttccatccatgttgctgcaaatgaccggatttcactaatttttatgactgagtaatattccattgtgtgtatggactaaattttctttatccattcatctgttgatggacacttagggcgatttcatatcttggctatagtgaatagatctgggataaacatgggagcacagatctctcttcaatatactgacttcctttcttgtgggtagatacccagtagtggaattgctcgatcatatggtagttctgtttttagttcttttgaggaacctccatatagttttccatagtggctatactaatttgtattcccaccaacagtgtatgaaggttctcctaagaaagccatttttaagtgttcctttttcctactgtgttaactagtaatatgaaaaagaacaaaaaaagtgtatcaaaattagcaactccacatagccaacttaataataacctactgtagtaaatttattacctactaaataatacttagatataataagaattatacagttggggacagtctgtaataacagtttttttatacttctgtttttgataatttatccccaattctgaaatggttctattaaagaaagcccagatttttcaagtaaaggttgtttcttattcatatggtactttctgtataagtgtagctttcactgacaaatagatgagttattcttacatgttatctacaatgtagaaaatcaaatcaacatactgaactcatataatactgacaactatgaaaaatcatcagttagtgaactgtaacagttatcccaatgccaggaaatagcaaataaaaagtatctagagcttaattcattattttctttcttttttttttctgagtcggagacttgccctgttgcccaggctggagtgcagaggcgtgatctcagctcactgcaacctctgcctcccgggttcagttgattctcctgcttcagcctcctgagtagctgggactacaggtgcgcaccagcacgcccagctaatttttgtatttttaatagagacggggtttcaccatgttggccaggatggtctcaatctcttgacctcatgatctgcctgcctcagtctcccaaagtgctggaattacaggcgtgagccaccgcgcctggcctaattcattcttttcaaaatagtcactcatccattcaacacatacttatttagcatgcactgaagttcgagacactgatttggacactcagtgttacaagcttgtgagttgtaattctaaaaggctgagtatttttaaaacaaaaccttccagagctccagcactaaaatgaacattgcccttcagagagttcaccttgggcagttatggctgttccggcatcgtgagggtgatgtctcccctgtggcagccaggtcaggggacacacaggaatgtgggctaattaatgtcagcaccccgtgtttgtccctcagtgttttgtcatacacgccttactgatgtgacttaacttcagacttttaggtgtttcaaataacaaatgcgcttttaaagaataatggcctctatctgacagaataagaaaagcaatagaatacaatattagctttgaagactacttgcaaaaatttgttccagcaaaggctttggtaagagcagcactatccaaatccaaatcggggcattccctaccaagaccactttgctgatgctcccgcttgcccagtcctaacgcaccaggatgttggctgaaacactggatcattgtcttacatgtgccattacatattacgtcgtctatgcagtcaaatcatgtggtataactttactgcatagacacacttcacacacctccaggtcactgtggatcgtgtaggcagccttccaacaagaccagagtaaaggctcatttgaaaacatccacagttgattttgaggatccccaaattgctgtcgtcacttaatcctttttctgaataaaaattaccaagatcatgagtcaccacctgatcttatgttggtatcaatgtttcctttgtaaagaaaggcaggaggcatgagcactctgtttccggatatggatgtgtgtgaagataaataaggaagaactgcatttttttacagcaattaagtgccatacctgatcatctcatagctacatggcatttgtaataaataaatgacacaactaaatgaaatttaaaagatgtaattagcaaattttattaaaatgtcacaagctatttacttgttctacaaacatgtcagaggtgttgtgaaccagagcaacaccgtcttgaataggagctgggcaaaatgaggctgaaacctactgggtgcattttcggacagtgaaggcattctaagttacaggatgggataggagattggcacaaaatacaggtcataaagaccttactgataaaacaggttgcagtaagggagccggccaaaacccaccaaaaccaagatggtgacgagagtgacctctggtcgtcctcactgctacactcccaccagcgccacgacaatttacaaatgccatggcaacgtcaggaagttatcccatggtctaaaaaggggaggcatgaataatccaccccttgtttagcatataatcaagaaataaccattaaaatgggcaaccagcagcccacggggctgctctcctgtccatggagtagccattcttttattcctttactttctttttttttttttttttttgagacggaatctcgcccaggctggaatgcagtggcctgatctcagctcactccaagctccgcctcccgggttcacgccattctcctgcttcagcctcccgagcagctgggactacaggcacccaccaccacgcccggctaattgtttgtatttttagtagagacggggtttcaccgtgttagccaggatggtctcgatctcctgacctcgtgatccgcctgcctcggcctccctcctttactttcttaataaacttgcttttactttgcactgtggactcgccctgaattctttcttgcgcgagatccaggaagcctctcttggggtctggatggggaccctttcctgtatcatatttctctgtcctgtaacataatgtctggcgaccgcgaagggactgtagtgcagaaaccctgagccgcggggtcaggggttgttgggggtcctataacgtcttgcgaaccacaaagagaagacccccgacccaaaggaaatagactgcagcactgattgggtgacagtggataagtggtgggttcctgggtaaataatgggattgggttagtggcccatcttaggggagctccccatgtcccttgatcctgccctcttaataaaaggcagaggcgcttgaccttgggttagaggcccaacttaggagggttagaggcccctgaatcttaattcagggggttagaggcccctctctataaagtccgcctctgctaagaacagctttggcactatgagatgttaactgctgttctctttggattcatctgcgttgcactctttattaatggctgtgggtaacgggattaggcatgtacaggattgagggacatgggcaattcccccccctaccttcacgacagcaccctcagccgcctaaacttttcagtgttcctgcaatggtaggtcttcctctggcctccctgagcatttcgccttgcccaccctgccacggacagtgctttttattcgctcctttccctttcttatctctctgttactcagggcaaccatgttgctcagagaccacgtgtcgaaactcttaagtcagaggttggattaaagatgacggggctcacccatctgggggcaaatttaagctttgccaatttgatattgggtgctaagcagagtggctaatgtctgtgttttatcacttgtattttgctctggccagaacgaaaaaaaaataattttcctttatgatgcggcttggcccccagggcgatggtgccgcaagccggatcactagggccgctcagggaaagggaacccagaagcctggcttgccggcaaagggtaagaattctttaccagtcagatttctggcttctctctctctctgtgcaaatggctaaatgaatgaaaaaaaatcagtgtttatctcttctgtaaagttttgattaatgcgaaaaagaattctaaggctagtcttaagctgctgtattttgagctatgaattcgtttttctgtgttgagggtacttcaggatgaaacgtgggcttggaacacctgcaagcccgcttttcaagacggcccagcaagctggttagtcgcaaacttggctgcaggtccgtgaaacaaacaaaagactggatgaagtctccacgttgttttatgtccttgggaactttacattttaaccacgtggcggtactttctcttggtctctgccttccagggaacaggaatttgagggttcatgtcatagttatctctaaaaatcttattaaatagttaaaagtctttgcaatctcaaaattaactactctagactccttctgggaaaaaagacagagactgtcctgtgctgtagctcagtagctaaggtttttgccctttcccagtggcggtccaggttcaattccctgcctagaaagtaagtcatttctcgtttgattatctgcatgaccttgtcttttctcttctccgtggactgttttaaattttcctttctctgagcatcttggaggttacctttggtaaagttcagaaactaaaaatattggccacttggcatggctaaagttgggtaataagaaatctgaaaggatttcttttttaaagagcactatggttaaaagtcagcttaattagaagtggataaacaagctataaatatatttaaaaggcctttatgtttttctcttcttggaacttgtttttctgaaaaatggtttttttttcttagtcgactgaattatttttctccattttttttttgtcttgtcactcttaatgcacacgagaggccctaagataacttctggtagcctgggactccttgagaaaaacagaggaggcaccacagactccgttttgggaaaaaacctctgttttcctcatgaaatcccaggaattaaaggcaggtagttccctctcaaaatcaaaggttctgttctgttttgcattgtgttatctgacgtttttgagttttgggggtatcagaaattacttagcattataagagagctttggtgtataataactaggtaggaaatatactttaagggatggctaatagtagtgatagagggatacttgactctttgcacacttggatcagagaagcatgttcttggctacctggaagataaggaaccatctccaccccacgctggagatgagactcccatgaaggataggctgatgacaaaatgggctgattggctttgggctgccttgcaatgaaatacagggtaggatcacagccctgtcttctcccgtagtgtttccctccttttgggaatccaggaatcagtgtaaaacagcacccttaattttggggatgtgtctttgccttcagctgcttatttgcttatttgctgcttatttggccctagaaatgcatgctggccctgttcctccaacggctccaccctgaagccagtcatccaactaaaaaatttaaaaactggcaaataaaacatcttacaactattgtaatcttctgcctttctgtgtagctatatatgtgttgtgtgtagtgctcatataaaagagctctagttaattggcttaaataaaaataagtgcttaaatcagatattttaaaagcaacataaaaactgtaatgccttttggttcatgtaactttagtaatctttgagaaataaaaacagctttaaaaattattgataaaataaaaacatttagtctaaattatgcaagtcaaatattaagtttgctaaatgctttaaggtcataaactgcctctttaacttttaaaaattgttcaattgacctaccttaaaatttacctaccttacctaccattagattctagttaaggcctggggacatgtggagttagccacgccccctagctgtgctggagagtcagctcttatctgcacttctgcccggtgtgtcctggatagactccacacctagtacgtaattaaaatctctaatttactatggttttcaccaaaaatagaagttgctaagagttaacattataacatgtaattaaaactgttaaagtaacaattttacctgcaaggtatgtaaagaaagtaaaatgtgtttttggtagaagattgtaagaagtcatgggaatgtggatttttttctgcctaaattaaaatgtcaaagaattgttaggtttaaacaagttgtagaaaacttctaaaaattaattgtaagagagtgtgtgtgaacatactggctaaagttaaaagggtattattcagtttttctgtaaattcaacattggaatagaagcacagcaggtttttcttaaagcattaatctgctctttcacaaaaaaagtaaagggttataaaaggtttataagaatcttaccttatggttaaacattacaaatgggtaaatatatctataaggttttattaaaaattgggtttaacatgaatagtacattaacataaaggtaaaatttggcatatttgatataaaaatcatacaggaagcattattaaatgtgaaatggtgttttgctttatttggagtctatttgcataaatgtattattggcatatgttccgaagttatgggaaactcctatcattctaatataatttagtgtatgttattaataattataattgttatgtaaaattttgtgtgccacagaagtaaccaaatttccttatcaattgtggctttaatagtggctgtcctaaaactttttatcatccacagacaattgttgtcttgttttaatcctctttagaaggtggtttataatcaactatagaactctagcaggtgttcttaaatgcaggttttctaataactctggagattgtaacatcaaactaaaggaaaaaactttcaaaactctcatagaaaactaaaatgttcataactatcaaacaaaagttaactacatggactaaactgatgaagtctaatctttttaactttgcttgaaatgttgctaatcctttgtttttcagagtcaagaaaacttttcttttgagttatttacagcttttaacagttgagtgtatgcctatgaacaaaatttaaggcatatttatttctctctacctaatttctccagaatttaggaactagttgtcagtattcttaacttatggcaatataattatttgcataggtacaataagaatctgttttcttttgtaacaggacacaattggaaaaagtgattattttgccaaggctttgactggaatagtgtgttttcctttaaggaattaaacttaatttttagagctgatacaagccccatagggaaccaacctcataccttgcctaaaacagtccctgtacagggtttctagcctgtggtaagtaaaaaaatgtcactttctaacaagtccagaagcctcaagttatcttgggacttcaagagaaaagaaatttacccaattcacagatattggagtgtgcaaacccatgactgggctcagctttaaaaaagtcttatctgaaattccttctgtggaacaaagttccatcaaagccaatttaaaaaaaaaaaaaaagcttatgtgaaaaataattatttcttgctacactttatacaagtaatcatcccaagtataataaagcaaatcagtcttaccatgatttgtctttaataaaaatgggaaaccagaaagagaaatattatgtttcaaaaactatggtacacttgttattagattctagtctcatcagttgtttttaagtttatttctgcaatctaggctaaccctgcttattcctgtgaaccaaccagtgatctctgactgttactcagaagagacaagagggatgggtaatgtagaaatctgatcagtattctcattctgggcgcattacaatcagctaacaaccccatgtcagcttagttccaatagttgcccagttcataaaaaagccttctaatttagtttacttgaaataactttacttattttactttcctcttgtggaatatattgctgatatactctttgtataggaatacaggacaaggaatacaggacaagcttactgaatgttttcttaaacacttattaatcttccagtatctccttttgttgaaactcaagagttataaataaaccttaccatacatgctttctgactgagctcctctctaccctaaatgtaaaagaccctcatacttaggcaaaaatatcattgcccctattcagcctaaaaacattacaaaagatgagtcttcgtccctctgcaacccttaaaatgaagggttctcttataaaagggaggggggaaatgtgtcagaggcttgtgaaccagagcaaccctatcttaaataggagctgggtaaaatgagtctaacctactgggctgcattcccagatggttaaggcattctaagtcacagaatgagataggagctcagcagaaaatacagatcataaagaccttactgataaaacagttttcagtaaaggagccggccaaaacccaccaaaaccaagatgatgacaagagtgacctctggttgtcctcattgctgtgctcccaccagcaccctgacagtttacaaatgccatgacaacatcaggaagttctgctatatggtctaaaaaggggaggcattaataatctacccctcatttagcatatcatcaagaaataaccataaaaatgggtaaacagcagccctcggggctgctctgtctatggagtagccattcttttattcctttactaagtaagtttgctgtcactttggactgtgaacttgccctgaattctttcttgtgtgagatccaagaactctctcttgggatctggatggggacccctttcctgtaacatatttctttgtcctgtgacaaagatgttgaatatattcaaactttgctctttaaaaaaaaatagtattcaaatgactcacaatattaatacagagctcttgaaatggacagttcggaaatgctagtttttgacaggtgtgggagattatccatccctttgacgtgggtgtaaatctatggcagagtttgtgttggtcttcaggggtgtttctgtgaggacagaatcagagcatggatgagcgaggcatgtcacagccccagccactaaaccctgaaagggattcagatgtctgcaggggcaagaaaggaaaaatcatagaggaaggagacattatagcaaaatgatttatttttcacaaaatatagatgtgagagtactggacagttggccaagggaaagttaaagacttggtgcccggaagtgactctctaaatgctgttgagtgtaggaattaagtagacgatcactgagagaagatgtcacccaagccaacaaggaatcagcccctccctgtacaggccccctcccctttatagatctaaaaatcggacaaactctggctgcctccctgcttgacttcctctccatctgaggttcaaaactaaggggactaatccttggaaagtaagattggagagaaccttgaggattatctaatccatatcctctttctaaggaaaagcacacccagttatcgtaattaagggaaaattgctgatgaaaaaaagccaaactctgtaaaagatttaaagaggtttattctgagccaatatgaatggccatggctcggggaacagtctcaagggagtcatgagaaagtgtacccaaggaggttggctcacagttttgttttatacattttagggagacaggggtaacaggcaaagacataaatcaacacacgtaaggtatacactggtttagcccagaaagttggggcatccagaagtggggataaggagcattgggggcttacagatcataggtggattcaaagattgtctaattggcaattggttgaaagagttaagctttgtctaagacttgaagtcaatggaaaaaattgcctgagttaagataaggggggttgtggaagcctaggttcttgttatgtagacgaagcctccgggtagcagccttcagagagaatagatggcaactgtctcttcagaccttagaaggtatcactcttagttaatctctcttagatcctaatcccagctgtattaatggaaattctctgtagatgctaattccccccatgaaagatggctttacaggttcatttaagaatatgccaaagaaatatatttgggggtaaaatattttgatttccttcaaggtctgctatctgtcatgtgatgctattccagactgaaggtggaatttggtatcttattgctacacaaagaatcttgtttcattagtcttatgatttctattttaacgttagtgctggtcaattttggctaaactccaaaggagaaggtataggaggcgtgtctgacctcccttccagtcttgatctggaattcagtttttcaggtttctccagggtccccttggctcagagtggcatctgttcagtctgttggaggcttaggattttatttttggtttacaaaataaagaaagaaagagcatgggggaccaagatagaaggacatctacagagacctaaggtacacactcaaaattctcactttcaggaaatgtttgtgtataacctgataggttaaattcatcaatgcttacagtctggaccctctaaagatggagaatctatagtcagaatattcttaattttttaatattcttagagctcacttcaaaactgcagtatctctgacgctactatgaaatccccctgaaaatcgcattatccctacattcagcccaagtcgtggatcctgggttgattgacactgtgtaaaaataagcgtcacacaagcactgataataggtagtattttgcattctgttgctttattttggttttggaacaaaatcaaatacctgccttctttaattcctgtggaacccgtgttctcttatctctggtcattttaaaactatagttcaggacatagaaattcctcctgctaagacaaccagagtcttgagggctcttagtgtttattataaccgatcctgtttctgtagaacaggattcaatctttgtaaccagctagttatcgccttacagcaggacttattcttctttcttgacagttcaaagcctaaccacccccttcctaagtgcggctgaaaagacctttccctgaaatttagtctttagggcatccattgatttagaaagaccctggttcagggtcagaagaattgcataggaaacaaaagctcttttttctcccccttgcaatcatcggtaaataaggccttcccgtccttccaccatgcataggtggaggcgcaggacatcaggaacaggtgggtccagttgtgcatttcaattcttgtcacagaagaaggggacatgtccttgaaaattattttgcctagttttcacctgagttaagaaggaggacactgggagagaaagaaacagtggggatttagagatgttttgatttctttgctatgtgtgatgcctttgtctcggaacctcaatcctataagcagtggcgatatttttacggggcttcccatcttcaataaattgtataacggtaattaattctcacagcatccatttgactaaagcgttattatccctgtattatagaggagaaaactgatttgccaaaccccacaaagaaagtcaatgtcgaagaaaggattattgcgcaggagggtctaaaagtctaatctcagctctgagatgcttcttattgttaattttttctgtgagagcaggtgcagcagggatttgccaggtgacttcacggagggtgtgtgaacaggcggcagctctgcccttgcgcagtcctcgtgaccgttcggccagtttaagctgattagatgtggtttgtctccacacagctctcaacagagatataaaaatatagggtgaattattgtatagtgaacataacccaaaattttggtccacccatttccacctacatgagttcgaggtatagatgtcttatttattgagtcgacgtatttttgcaaaggttccgtagactgaaatatttagtttgcattcttttccataataacgacttacttaactataggtcattaatctcaatcctccacactgtaattcagccaagaattagtaagcaagcaaaataaatgtcccagcagtctcaaatatttcccacattcctctaaagtaacaacgcattgctctttggaaaaaccacctagagttgatttactacaggtttagatatggtgatgacagacttgctggagattcaccagataaagaaacaaatgaaatgagacgagagcaaatcttccgagaggccagcctgcagaaacgccaagctgaccctctgagaacaagggcagaaacagaactacgacacatacataagaactcacaaactttgtcaagcttaggccactggtttcccgcagaggcaagctgttgaattactacagggaagtccttcatgccaacacgacactcaagtaatggttactagtcataatgataaaactgaatattatttatttgttgaacgtttatggagcttctggggctctgacggtgaagaagacagacatggtccctaccctcatggagtttataatctagagaagagaaaagtcagtgtgcaagaacatacattactgcaatgatttcagcttgggataggtgctgtgagtgacatgaatgaagcaccatgagagagaatggctgagtgagatggtttccttcaggtgcaggggttgggagcatcagagactcgtaggtacctgcggtatgagtcctgcaggatctggaagggttttaaactggggagtgacaaggtttgatttaagtttgtaaaagacagttgattgtgagttagtcttgagggttgaggagaggagcgtaaccaggtggtcagtgaagatggttgtaactgggatgaatatggagaagatgatatggtttaatatcctctggtggaaacagaccaatcttccagacataatcataacaaaataactaacactgtttgaacacaggttaggtgctgggcactatgccctctcagtcgatcccccgacagccctgggagagggaggtgctgtcaagcacagctctgaagaggttaagacgtttgcctgcgatttcactacttatacatgctatatagctggggtttaagctcagtggtttggctccagagttcacgttcttagacctgagataatttccagaagataagcattttgcattctccaattatacctgtcagatttttgaaagacagataattcacttgggggaattcaccccaagaagcctgattagggcgagctattctttactcttgtgagtgaatcagtaacatgataagaatacaagtccctgctttgttcctttttggccgaatatccttattctctcaaacatcttccaggaagctctcattgattgtaccgcatttcattgatacatgctgattgtaagaggaaaatatgtacattctgttagaaggcaggtgcaaaacaattaaagaaaaatcaggacaaaaacactccaagagcttggcctaccctattcagacttgaggagcaggccacattcaacacaaggcaatttccagcagtgaataccctgttttcctttgacaaagggacgtgtaaattgagaagtgtgaaggaatgccaattcggaaatttgagctttacaaaaatattttggtttaaatttaatgaaggagctttgtattctaaagattaaagcatggaaatagttatctttcgaggaaggatgtttctcctattaatgctttaaataagaatagcatcttctcaagtatacatacaggtgttctttctccctacaatggacctgttagagcaagagaaagaatcagcaacaatgtgaaagaaacatatagggacagtcttgctggaggccagaatgagtgagcagggcaaactgaaaaggaaatggaaagagacttcaaagaaagtagaaaatgctaacatcacggtagtagcatgagaagaaacttctaggggaagctgggctaagaaaatgtttgagctggtggataggtaattcacacaagctacacttggttttgtacattgtagtcttctacattttttatttagtgtcataaagaaagcattttgatcagggcaaggacggagaggcctcctaattcacaggaagccctccccagagaggagaaaggagatactcctgagatgacaggaatcccggcttccactgagccctaaggagcgatatagtgtttggcatggcaacaaaaagatgtccttggcagctttgtcaccttcagtgatgactgttcagaggcaaagtggagtgaggacgtgtttggatattgaaagaggtgagtgaggagggtgagtttgactggggtcgcatgttcgccgtgttctacctccatcacttgaaggaggcctgcttaaccgcagcatcctgggcgtggatgctgagtttctgaaatgtaaataagtgcagatacgtagaaagtctaccaaattaaagctgaggtcatttgactttgtatttgagctctgaaacttgcaagataatgattacttttagagtacatagacagaataccttgagattaaatggctatttctgagtttaagtccagtggtctctaatttatttgttggtttagtatttattattattattattttgagatggagtcttgctctgtcgcccaggctagggtacagtggtgccatcttagctcactgcaacctctgcctcccgggttcaagctaatcctcccacctcggcctcccgcatagttcagattacaggcacgcaccaccacacctggctaatttttgtatttttagtagagatggggttccaccatgttggtcaggctggtctcgagctcttgacctcaagtgatccacctgtcttggcctcccagcgtgctgggattataggcttgagccaccgcacccagcagtattttttatttaattggagtgttgattagttggttagtttttattgtcgtctcgtgtaatggcagagtttcctcctgtgtgctggctctcctgaaccaggtgtgatggccatttttacacatcatccctgtttagcaggaaagaccataagaaacaggtgcaggacttgcccctgggcacgtatgagacatcacacttgcagcttgggagctcttcaagggcaagtagtgtgtcttattcttcacgttgttcctggcatctgttacactgtacttgctttcaccctcagatttgtggaaacattacttggctttctcaacaccaccacacaggcattccttaggcagattttgacagaacacctgcagtgtgacaagcagtgttctaggccctgggaataaagtggaaataaagatccttgttttcgtgaaactttggtattttgctggggtaatggagaagtgaacagataagataattttagagcatagtaagtactctttaaaaaaaaagaagagagatgttatggggcaggtgtggtggctcacacctgtgattccagtgctttgggaggccaaggcaggaggattgcttgaggccaggagtttgagaccagcctgggcagcatagcaagacccatttctccaaaaagttttagaaattaactgggcatggtgccgcatgcttgaagtgctagctactcaggagactgaggtgagaggatggaccacttgagcccaggagtttgaggttgcagtgagccatgatcatgccactgcactccagcctggcaacagagcaagacctgatctcttttaaaaaattatcagtcaatcaatcaaaaaaaatttttttaaggtgttatgtgttagaggaataagggagctgcttgacttggctggtcaagcacggcctctctcaggagtgaatttgcactgagacctgagtaatgagaagtctccagctgggcagggatttaaagagggggctggccaggcttaggcaccagagagcccacagatccaaaaagagagggtctttggtgtgatcctggaacagaaatatcagtaacattggagcagacacatcattttccacataagcacagagcatgagaggtttttgccctttacggtcaaaccagatgtctctcattgaccttttatcacgtgaaaagaatagaattcaagtcaacttaaacggttatcaggtaaccatacatgacatcatgttttagtgtttaaacgggcagaacactctttaggcctttcattcttctagccctcttgagataacatttgtgataaggtgttgaaaagagcataaggtttccatcaagcctttgactcgaatgcgaacctgtctccagaggacttgcggtgttacacttgtttaaatgccaagaatcagtaaacattattataaacaaattttcaataaaatcatcaaaggtcttttcccactgaacgtgaactaatcttggccatatttttaagcactgctgtccaattattttaaataatgtgcagcacttaactatgttatttgcctagaggaaataatgtttcagtgaaaattatcagctgaattttcttaggttatctgatttcctattgtttaccttctgcttattatctttcaaagtgacgtatttcatatatttcgtctgtatgtatatatagagctttccacttggcaaactttgatatctctctgctgggcataaagtctgctaagtaaaatgaaatgaactcagctctgtgttgtaaacactgaactcagctcagtcctgtaaacaggactaccttgtgaaacagaaagagctgtgttaattttactttcattaatatgaaggatagtatggaaagagcaagaagcatttataaaaggcctctttggcaatggcctttgatgtctacgtctgaacaaaatgtcctgatgtgaaaataaaatggcaatattaaaacagcttttctgtgaggtcaggtcctattacttgggaatgtttaaagaaaaagcataaaccaggcaataataggcttagaaattctgcagtgtggtcagaataagatggagtttggtggaattagtttatgttgagtatgcagtgccagattagatagcaatgttaaccaaatccacagatttttcctggggtgaaaatatctcatttcagagaaaccttatgttaggcaagtatgttcacagaggtagagttggggggtgggggttgttgtttttttaatttttttattgtcttcttttccatctgtttcagagaaaccaggtattttcaagcactctttaatatgaaactgttaaaaagcaaaattatacactacattttgggctgtgggttgctcaaaggtagatggaataataagcttcccattcagaacaaaggaatgttggttgctattattgtttatttttatagctactcttcactcataatagtagggcccttctggctgtgttgttaggctagacatctcctgggaacaagtgaattatctaagcagtacggcgttgccttatgaagggatgacaaaataggatagagtcccagttctctaccatatccaactactgaaggcaaaactgctcttgttgccagtaaaatcactacttttttctttattttaccaagtggtccagttctatcaataaatgctgctcagcaggcaattttaaattctaagcacctgaggaaatttttagaagaatccttttatttaaacagtagtgcaaaattacttagatatacttagataacatttacaactcagggagaggacaaggagttagctggtgggacccactccctaccgccctcaaccctgttacaggaatcctccatttcttggcctggatcctgtttgtttcttttgccattgatatttttccatgcagaccagaactgagaagtaattaactgccaataacaaacgtactagcagccaggcacggtggctcacgcctgtaatcccagcactttgggaggccaaggcaggcagagcacctgaggtcaggagttcaggaccagcctgaccaacatggaggaaccctgtctctaccaaaaatacaaaaattagttgggtgtggtggcgcatgcctgtaatcccagctactcgggaggctgaggcaggagaatagattgaacctgggaggtggaggttgcggtgagccgaggtctagtcattgcactccagcctgggcaacaagagcgaaattccatctcaaaaacaaaaaaaaagaaaaagaaaaaaaagaaatgtactagctgggtgagctgggcagcttaacctctttgagtttctgtttccttgtaaaatggaaatagtactaagaactatctgctggggctgctgagtgcatggtccataataaaccccaatcaacatcagctttggttggtatgatgatgaaggtgactatcataaaggaaatgagatgtgtctggaagtcacatatcctgggcctacctcaccactggcttatcacatgccctttcccagtgcctgaagtccccagtgtgcaaaaaaaaaaaaaaaaggaggtggaaatcagctccatccctctgtgacatttcgtgatttgattaatgaatgcctccagcgcatacagtggagctggcctgtcatcaatagagatgaaaattggtggagcactaactgtgtgcagcatggtgctagtgtaggtttggggataacaagagatttaagacaaaaccctatgtcatgcgctgcgggctccatgttttgtgctgaaacgaacagcacaggcagtaagtgccacagaagaggaggctctggacaagcccgagggctgccaagctctggaggctgcgcttgaagacaagagaagggattgcacaccaggtcggggcaggggccgctgcaaggatctggcacggacctaagagcagggaaggatctctcgcagcactgcacaaaccagcaattcgaagttgcttagctagcctatgaaaacccacatcagttactaaaatgactgccttcccttgagtgatccgcagtgtctttatttgctttagctctttcatcagagcaaggtatttggtttccttttttctgtgtgcgcttttaaaatattttgttgaatatgacagattatatatatgcatatatatgtgtgtattaatatatgtatatattaagaaagagatatattgcttataatatgattacttggaattattattatcatctttagtataaaatgtcgatcagtactcctcatagtctggaaatgcaatgaaatgcctgtattggacatacatgtagatgacattttgagtgcattgcctgttttcccacatgcaaggcagggccctgtgccttgagacaatttgatgaacaagccatcgttgaagtctggcctcaaagagctagcagtctataaagacagatactcgggtgtacataattattaaatatataaaagaaagtgggagcaggaaataaggatgtaggtcatgctcatgagccatttatatagtctgtgttttcttttattattatgattatcttttttagattcttctcttgttctgtcgttcatggagtatgctttctgcccatagtggatcgcagaatagtcattttctccatatgctttataatttttgctgtaaactcatctttggtcacatcccaggagctctgtggtgtccctgtagaatacttttgcatttgcctctgctgggccctaagggtttcataccagtttttatttaatatctcaatcaagagttcacaagcattgtaaaaatattgccttgaaacccacacgttgcagacacttcaggttctcctctttcaaaaagactttctccaccagtgacctgagcacctccatggccagataatggagccatgggtagaatttttcctgaacattttctcagagattggagtgtccttttcatcaccaggttcatgcagtgagaaaatccagcttccccagttcctggacccagtgtggacatcaaaactcctgtcctttaaatgaccattcagttggagacttcttttggccgctcgactttagtgaggcccctgctttaggctctcagtttcccccacggggtcttgctcccagaggttttccttttttgttttcaaggtgggccacataaattttttgattgcactctttgaaaaatgtgtattttattcaatatttctgtgtgttctacattttgggaggcagagacactgcttccaaccagtccatcatagtcactggaagttataatcactgagatttatatattcttgaataaggaggaaagaggaacattgacagtttatctcttactcacatagaatggaattcttttcaaccaaaattttagaatagataatttctatttttatggaaaatctattcttactaagtatgaacctgactcatggcataaaaatagaccttttcttctcctcttcctgttgcacatcagaagcctcatttcagtaaccagatcagcctctgagttggcgcggtacggaaaattgagtcccatccagacagacacctctgtgctgattacatctgtgccacaaacctggcgggtcaattggacttgccacttctctgggcatcatctacaaaaagggatctcttcaaaccttgttaagccaactttggaaatcttatgtaaaacagataagagtggagaggatctcttgaatgagagtgaaggttttgcctctttgccaagtagcctctaagttaccagcagcaaatcccctaaggagcctcgagaagcagagtttgtaaaccactagactagatacttctttcatgtctaaaatgacgtggttctgggagaacacagtagtaggcagcactactgattgtcagctgctcatctgtcgggtaatttctcctacaaactcctcctgttcccctttaataaagtaaaaaactcattgagtaagaggttgactccagtctccttcacatctttaagttgtaaagctatcatttttttctttaatagggattatccagccacactgggacatatggtcatcctatctttaatgattaagtgtgacagccttggtagaatttcctgcaatttagaaatatttaatactataatagcatgcattttgttagcatttgtctatgtaattgtcactttaataacagatatatttaaagatattcccataggttggacatgaatgagaaaataagacttccttttttccccaaagatcttttgggcattataaaccctctcactattacattaaatatagcccaacattgagaagaaaacaatactaccatagtctcttttcatgttgaaatttcagctcaaaggagcagaaaccaagttttttgttgttggtggtggtggtggtggttttttttgagacaaaggtcttgctatattgcccgggctggtcttgtactcctgggctcaaacaatcctcccacctcagactcctgggcagctaggactacaggcacacactaccacatctggctgtagaacccaaactacttaattataactcagatgtgccagatttctaacatgttatagtaatacatcatcattttatttatttatttattttatttattttcagacgaagtctcactgttgcccaggatggagaatagtggtgtgatctcagctcactgctacctccacctcctgggtttgagcgattctcctgcctcagcctccagagtagctggtattacagatgtgtaccaccatacccggctaattttggtatttttagtagagacagggtttcgccatgttggccaggctggtctcgaactcctgatctcaggtaatctgcccgcctcggcctcccaatgtgctgagattacaggcatgaaccaccatgcctggcccatcgtcattttaaaatttaattttaattggtagtgtggtaattattgtccagcaattaagtgtttattactgccagctgttaaaaaatcaacaagaaatatgtggtttaaagcaacatttagaaaatgctttataattcaaataccagtggaccttgatgaaaagtcaagaagtcttacaatgcagtgcccttcccataggcatgcccaaccccaaacattaggagggatgggcatcttcaaggtaattgccaagttatttcaaggacagtagtgaggatatggatagttatatcaagttctgtgatttcttcattatattagtatatgctttgtcatgtgctgtgttaaagaagcaaagataaaattttcattattttctatgtagagttttgcattattttcttcaagagtagtttcagtgtgttaatagcatgtaaatatgacaatcgaaagtggctgtcatcggtaagtgaaagtaagtgcggagtaccaatgtgcctttgcttgtctggaacctgaaatttttgttagaaaactagaaaagatactggatacaaatttatggttaaatgggccgggcacagtggctcacacctgtaatcccagcactttgggaggcctaggcagtcggatcacctgagctcaggagtttgagaccagcctagctaacatagtgaaaccccgtctctactaaaagtacaaaaactagctggatgtggtggcacgcgcctgtaatcccagctacttgggaggctgagtcaggagaattgcttgaacccaggagacaaaggttgtggtgagccaaaatcatgccactgcactccagcctgggtggcagagtgagactccatttcagaaaaaaaaaaaaaaaaaaaaaatttatagttaaatatctcctagtacatgcttatatcagtaatatattttatgaactattattttaaataaggactaaaatagaattacttccgctttaacagtctaccgacaatttctaacagtgaaaatactgcctggtatttggaaatattagaaagctgtggctttcctattttgatccacttggatacttaccgcatttttaaaaattgacttcaacgtaaataatagtaatctgctcctttttccttttaaacgtttatgtttaattgtgtaataattacatgaatccattcttataaaacgtaaataatatgataaaccatatctatttcataaacacttttcttcatgttaaattgactgaatttaagatggtggtaataaaaacgggggcctttgtttacccagatcatatgtcccttgctttttcgcaattatttttcactgttgtgtttcttctagagataccatttagtcattctgcatagtcccagatgagatgacattaaaaccaagaaggctgtgctgtgtgaacattcatcttttggatgaatggagatgtggtaggcctttatcaggccatccgactccacggtacactttctaggataaagatatatatgtaaatgtatctggttggctcccaagatggagtggcagagctcatctgtagagtttcctcctcagtccaggatggtctgtaatgagaagttgcatgagccaatttgagttctccaaaattaacaagaatgaataaaaagaagcgaatcctttgatactgcggtggatgtggtggggtgaaatactctctgagatttgccttgaaatacttcagaaaggaaagaaagaatgggcagatggggcagtcatttttgaatggaggtgatgggtatgtgggtgtttgttgtcttatttttcttcgatttctgacatttttcacaataaaaacatactgaggagttatttttaagcggtttaagaaatattaacccagagacgtagtccaaatgcgggtcttttgatggtgtttgtggagctgtggtctgggagagagaggtgcattacctcaacgctactttgtggtataatttttctgcctaaagaaagtgtttattatatggcttttaccttttaagaactttaaaaatattttccctttacaaagtctacgtttataagacatgagagagtttaattaaagtaaaaaaataataattgaacacttcaggttagggttttatttcagggttaccaaaacctgcctctctcctctgactggtatcactttcagatgaaaacgagtgcatgaaatcggagcattgccagactcccagtttcctttctactccaagattatatgttgcatgactctacgtttgcaagattttccagatgaccccagaggggcatattcacagatgttaatctcttataaagttattataattttggttttttaaaaatgtgggtaatatgtaacataccattaatatccaggcagtctggtattttaaatctatctgcggatcgtactggtcagcattataataaaaggtaactttgtggtgttttcagcgtattgaggtaaaatgaaggggaaatgttgaacctgtgtttattactgtggagagaatctgacactccactgcaccctgattattttgtataccctaagctaaatagactaacgctgttacgaagctgtcaggagaagcgtgtcagacactaggtgtatcatgcagtcagactggtgtcgcgttggaaaagccagtagttgggaagggaaaaaaaagtgaccttgtactctcaacattgtctttacactgagtagaacagatgagattgtgaattattcagaacaccgaaagcttataattgttagcagtggtggcggcgatagaggagagagacagggctgttttagtccaaatgtctgattctattaagcatcaaaggaatctttttcttaaaaccatctttgggaatttgggtggtgtggaccccatgaagaatccttccctctgtttgatacctttttgggaatctgggtcaaagaggcacaagttaatatttagcatatatatatatttggaaatgcagagtgaaagaacaaagacactctagggagaggatttgctgtttcagcaggtgacacagccacgcggttatcttccatatcagtattaagggttggtcttgggtttctactttccaacgctttgatgttattgcacttctcccttgtggtttaaatactacaggctttgggttaagcatggatggtatttgattgtgaattagatgaaaattcagtatacctaggttaattcttgtttgtaaatgtttgggcagtttggtgagcatgctagatagaatatggtataaggaattaacagtcatatcaatttgaaccataatgttttctgcgtctgtttcttagtctttgtttgttttgcaaagagctaagtgctccacatttacagtccacgtgtgtttatttagggtccactatgtgtctgctgatactgactgtggggtccacaactgaaactataagaccaggttcttgctcttaagttctcagctatctgggtagacgaaaccattttgaagcaacacatgaagacagatctgtatgacctacagattgcaagtcctctagaaggtgcatgaggaaactgctcattttaagccaaagttgtttggaaaggctgcaaaaagcatgtagcaacagagctgtttttggagcatgggaagaattggagaatgggaagatttgggaagtcaaaggcaaacgtcagaacttcagtggaagcgtggaattgtgaaggggatgtgtgcgtggagctaccagagaagcacagcctgtgttgtcagagagcagtgatgttttcagagatggaccaaggctggaccaaaaccactaaccataaaaagaaaaaaaaataagcctttaaacaacttgcagattaaaattgataaataataattacaatcgattaaaattgatgatgaaccactgatcatctttctgaagcagatgtcttttgggggagctacttcccagggctttgctgggcgtccccacagcacagtctcctgatacaggagatccatcgtggcttgaactgttcacgcagtaccccatcacaactattctggttggcagctggcctcacacctcttgcttctgggatcccctaaactgcagggcatgtttcttgctgggtattgccaagggtatgggcaagatagcttgagtccagctactttgcattacaacctggtgattcatgaagacagctgtgtctttgccacaaggaacagtggccatgcaggcagctccctgtttctgcctttctcttaaacctgccattctacaattttcttttcccttctcagataagcccagcatagatcagcaaattggcaggggcccacctaactgttcaaccagagattggaatgccgttctctacttcttgccagcatgcctgtctctatcagagcataccccttctttggttttcacttgagagggagaaagttctcaccacaaactgcatctccacaacgctgacggacccctcaacccccacatctcttccctctaccctccccagccctttctgtagatgcagaaggttgtgggtggtgactgttgggagcaggcctagctcttgacaagctttagagactgtttggtctcaattgttgacacttctcagaatgtggggctctcaatccttctttgtcctcagctttggtcccttgtggtaaattccaggtaatacgaaaaaaccccactctttttgccaactgaccaccaccccctctcaccaggactattaccgaagactctgaaatggtctctgtacttgcagtcttgccccctcctttctccctagcgtgtggtccactctacacttagcagccagagaagtcttttggaaacacatcagattacacaacagtccagacggaaactcttcagtgactgcccactgctgttaaaataaaatgcagaccaggcacggtggctgacatctgtaatcccagtgttttgggaggccaagggaggaggattgctgaggccaggagttcaagaccagcctgagtaacatagcgagaccccgtctctacaaaaaagtttaaaaattaactgggtgccgtggtgcatgactgtagttccagctactgaggaggctgaagtgggaggatcacttgggttcaggagttcaagactccagtgagccatgaccacaccactgcactccagcttgggtgacagagcgagactccgtctctaataaataaactaaaataaagtaaattcccaaatcgcccagtgtgatctggcccctgcctggttctctgtctccatcacactccactttcactcattccttaagcttcagcctcacaggctttttgttggtggctgtaatacaccgagcttttgctatttcagagaatgtgcatctgcagttccttccgcttgaaatgccctttcaccagaccctcatgtctgcttcttcgtttccgttcctaaggaatgaatccgtttgtcggttcaaacatcacttcctatgaaatgtttgtcctgaccagcctaggacaagtagttgtcctctcctcaacaatccctttatttcctagtacacttttctttctttacttttcatttattgtttatttatttattttttttgagactgagtctcgctctgacacccaggctggagtgcagtggcgcgatctcggctcattgcaagctccgcctcccaggttgacgccattctcctgcctcagcctcccgagtagctgggactacaggcgccctccaccacacccgtctaattttgttttcgtatttttagtaaagaggtggtttcaccatattggccaggctggtctcgaactcctgacctcgtgatccgcccacctcaccctcccaaagtgctgggattacaggcgtgaggtaccgtgcctggcatatttttgtttgtttgttttttgttttttgtgttttttgagatggagtttcactcttgttacccaggctggagtgcaatggcacgatctggggtcaccgcaacctctgcctcccgggttcaagcgattctcctgcctcagcctcctgagtagctgggattacaggcgtgcaccaccacaccggctaattttgtatttatagtagagacgagatttctccgtgttggtcaggctggtctcgaactcccgacctcaggtgatccaccctcctcggcctcccaaagtactgggattacaggcatgagccactgcggctggcctatttatttatttttaatagagacagggtctctctatgttgtcacattggtctccaactcctggattcaagcagtcctcctgcctcagcctcccaaggtgctgggattataggagtgagtgcccagcacctccttttcttttttattttccttgaagcccccatcccttctggaattatactccatcatttatcaacatgtttactagttttcacgtaagttcctctaggacaggaattttgtctatcttgttcctcactctacccagaatctaaaaatgtgtctggcacgtggtgggttttcaataaacagcggttgaatgagtggatggatagatttattcagcagttggctccaactactacgtggcaggcattgtgtcaaatgattacacagactaggtactgccatttccatgttttaggtgaagaagttgacttcagactggagtgacttctccaagctcatacagctgttcagtagaaaaaggaactgaaattagctgctgtggactctgactctagagaacaggctgttgctaccatcagcctggacgactcatggagcacagggtggaataccagagcgtacaaagtcattctctcaggtccaccacacctatgccgaaaaataaaataaataaaggtcgggggctggaaatgtgctaagcaatttaactggccaccgattttaaagattcatgcgagggccaggtgcagtggctcatgcctgtaatcccagcactttgggaggttgaggcaggaggatcgcttgaatccaggagatggagactagcctgggcaacacagcaagaccctgtcttggcaaaaaaaaaaatttaaaaattagcctggcatggtggtgcacacctgtagtcccagctactctggaggctgacgtggaaggatcacttgagcctggcaggcggaggcttcagtgagctgtgattgcgccaccgcactccagcctgggcgagggtgagatgctgtctctacaaaacatttaaaaagatttatattaaaacgcatttagatgttttgtttcatgatgtgtaatgaaacatttgtccagtttagataaaggacttactctatctacagcggcctgttcctggccccgctctctggatatgtcatcgccccctctgctgggtgtgcgagggcggagggtgagcagtgcagggccctgccctctgcctgcccaggaggccactggcactctgcagggacacatgtatacttgtcgcagttgtcctgtacacatgccccaacgtagcagcccagtttgatttatgttatccaataaatctttaactaaatcttattgagggaaacatttactgaaaagttaaagtttgagcttaggaaattaagatcatatacatattttgttcttttataagccaatgagatcaatttagaaagcaactccttcacctgctgagtctaataaacattaattgagaatcttgtatctgagtcttgtatctgaggcttagaggtgtatgaaaatgaagcaggcagaaccctggccttgtagaagttgaatttaatgggatgatttcattttccaatgtcttcagaataaaatccagactccctagcgtgttgaccaagttgcttcagtgtcgggttgcccgcggctccaccctagagatgacgctcaggaccccagggcaattccaccaacctgccttgccattctgcccctccctgtggatacctcattcctctgtctgggacccctccagccaagtcactcccgctcgtgccctacggtgctgtccaaggttcctctcctccaagaaggcctctctgccatgcccttcctcaccggggctaatcactctgtatgttagctgaccagccacttgctgtcttcctgtgtcgctgtggactaactggcggggcagtgtcttattctgtgtgtctccagatcagagtggggacctggcgtgtggtaagtgtgcgatgagtgctgtcgactgaatgagtgatgagtgaacgaatgaaccgtgagctggcactttacctacttcctccccgtactgctttcagggcagccccagaaacctggttccagctgcagaggcctggtttctgaatcctgaaactgagcagttgcttgtattttgcacgttcttgggacaactctgccaccaatttatctctacaatgcctagaaccattgctagatgtaatatggtcatcaaaccaaacttggcgactttaaaaaatggctttacgtccctaaaaagccttttaaataggaggttttgttttaatttgagacagtcttgctttgtcgcccaggcaggagtgcggtggcacaatctctgctcactgcaatctccatctcccgggttcaagacatcctcctgcctcagcctcccaagtagctgggactacaggcgcccgccaccacgcccagctaatttttttgtatttttagtagagacagggtttcaccatgttaaccaggatggtctcgatctcctgacctcgtgatccgcctgcctcggcctcccaaagtgctgggattacaggggtgagccaccgtgcccggccaaaaagccttttaaataggaggttttgttttaatttgagacagagtcttgctttgtcgcccaggcaggagtgcggtggcacaatctctgttcactgcaatctccatttcccgggttcaagacatcctcctgcctcagtctcctgagtagctgggattacaggcacgcaccaccacgcctggctaatttttgtatttttagtagagatggggtttcaccatgttggccaggctggtctcgaatgcctgacctcaagtgatcctcccaccttggcctcctaaagtgctgggattacgagtgtgagccaccatgcctggccaaagaggagtttaattccacagactctcagattgatcagtaagtgatatgaagcaagtgcaggatccctgtgctgatccaaggagtgtgccccgagctggctggtctccggcaggcttcccacggaggacaggaacctgagcctgtgtgtccatggccccatttgtccctgaccccaggttgttttacaaagctgcttgaaagagggtctccaaaggccacttagaggccaggagacaaagcatgaaagagcctggtatgtggggatgtggagtcattgtgatagagcaggacagagatgcaattccaggagatcataggaaataaggcgcacacatcagaaggaagtgtagatttcagttgtgaggatgccccgctgtgtgtcccacgcagcgctggatgcctgtacctcgtcacatcagtgaatcctcacagcctcctgtgagactggataatattaccctccccatggtacagctgaggaagcagcctcagagacgttatgtgatgtgcttcaggtcacacagctaattaattgtcagagccatcacagaaacgaaagccagcttgacttccgagtatgcatgcgtccctcctcatggtgtcttctccaaggatgtgatggatacacacagacccagaagctgaggagcagagcacgggctgcagagacacccacacaggacagcccagtggggtcgcgttcccatggcatattgtctccaggcgctctagggtcttaaactcagctgtgtgtgtagggctgggagggaggcaggcagactccaaccatgttatgtgcgtcacatttctattattcagccctagaatggttttctttgtaatcttattaaaacttggacgtcttagataaggacccataaaaaagttttccccaaaacatttttatgctcgtcttttttcctttttcagcccatgaaaaagctgtttttgccatatgagtgccttctgttgtttatggaacaaactgcaaggctaaagaacaatttggcactgctatatttcttttaatgagaaaaatatgatgctataaagatttattgtaaaaaaatgtaggatattagaaggtgggcatattgatacctgcaactaaacatagagaaaaacaaaaacagagccatctcagaggccccatgattggggtgatgttatttcatggtattccacccttacacacatttgggaatattttctatgtaaaattcacctcaaaaaaatgaacagtgcctatcttggtaatagattgcttgtctcacagagttagatttttgtcccttaggatctagccaaggagtggagatgtttccctaaaatatttcttgttctatttttccagtgtaacaaaatgttagtttctgtgactgctatctatattgtttgaaaagggttgtgtctacatcagccaccagttccaaaaggtatatgtttttgtcacagttcctttgagatcacagatccgcatggtcgcgtgggtaaatgcttcatgctttgatctcttctctctttccctctctgaaagtgggcgttgaaccctcactctgtgctgggctttggggaaatagtacccaggggatgcgctctctgcccttaaagaacttacagtgggctcaattgaggatacagatgaataaacaaggacaacttgagtgacactagtgtaaatatgctaaggaagtacattaggcccaggtggttgctgtccaaaggttttccataaggaagagcatcacagctgacagctgaaggatgtggaggagttaactagggggagaggtagacacagtcccaagcccagggtacaacatgctcagagacccagaggtgggagcgggcatggtgccgtctgggagctgggcttattgtcatgaacacactctagctgccttcactgattgcttccgtgtgttgcacactttattaagtgcctcactacattgtctcccatcacccttgccacaaccctatgggttaggtcttttaatccctactttttagctgaagaaccgaagccattaaaagttaagtaattcttctaggatgacgtaacaagtggagtccatagtcagggcatggacctagtctgctgcccatcttcctccactgcccacgagcatctttgaggcgattcagcagaggggattcaaaaccagcctccatccaaaccagacttgctaacagtggcaccagaaacgacagcaggtcccttatcagagtccacatggttttagaagctgagtgggtaaaacaaaccttccatgcaggaaaatctggagaccttacgtggaattcacttacagtaaagagggtggaaggatgcgtctctcttcctctttctctttctcctgctctttcttcctttcttgagatgtcaaagttggcgagacctaatgaatttgaactgaagaacaatgaagctttccacctttcaaaggaatcctgatacctttaaccaaagagcaagaatggtgctgattatcagtggtattctggtaccctctgaccctggacaaaacaaaagcatagacaacgtttgcctttgactttcgccgtatcctttctactgttctccaacacctggtaacccgctgcctcctccacatgctttaaagcgcccaccccgagtcccttccaaattttttctccctttggccctcctcaatcaaaactctctttccctgagccctcaattaattagatctgattatctaattaaactaattcgcactgaggtatgaatgaggcttaaccctcccaggggacatttgcattttaaaagaggagcttgttaacccaaatgcctcgacaatgacaattagtggcatgtgtggggagatatattttgggaggttgggtctttcctgcgctccctgcgtcctaggccatcacaggcccgggtaaacttcaggatttcctctaccagggagtcggaagcattggagtcagcatcacagatccctaccatctgcgtctctgcctttgacaattggctgagttaaaaaaaaaaatgtcatcgcttaagaagaggattcctactaatactgtgaaacttcagtcgtggttgtgaagtgctttcttttcttagaatcagcctgcgagattcgtgaggtggaggtctaagaattctgagtgacacatttttaagatttctagattgaagatctccagactgaagatctagatcccaggtggaagattctagggccaccccacagcagcaactgtggctgccctgaaacattcaatgttcaccctggttttttttcaccctaagtgtaaatccctaaacagacttttttttttttaagtgggaaagatagaagtatttgtgttccagcctggaattgacatggggaaaaagttgaccaaagtgagagcgtctgggtgagaagcagctctgaaagtcctcatggtcatgtcttgctgtggccttctctgtgaagagatagaaaggctgttttgtttcccagtgcctgtgagctagaagtgaaatagtacattccaacaagatccagattaaggaaaggaactgggaatccaaccaaaagctgctgtactactgaccacggctttgcatttaccaagaacgccaaatgttatcacttcccatcaatggatatggatcccacgtatagacacaaactaaaaatgtgtggggtgttctttttctgggatatgactcagaaatcttgaaaataagaatatggacaagcataatgtatatgcccattgccattatcgattgttttcttaaagccccttggtgcaatgcctatttttgctataattttgggatgcttattcacactttttacaccttttcttattttttggtgcatttaatggcccataaaatgttgagtgggtgggggcaggggctacagtttgacattttgataaagaattgggattttctgctctattttgagtgatggattaagaggattattttatgtgaatgctaaatgattttacatgcattcattcctgtaatatttaatatttaaattaattaaatttcctggaaagataaaaagtgatacgtattattgatgatataagacacagtgttgcatttactcggaatatatatggaaacaagtggtatatgtgctttgcttttcttttttttttttttttttttttttgagacggagtctcactctgtctcccagactggagtgcagtgatgcgatctcggctcactgcaacccctgcctcccgagttcaagtgattctcttgcctcagcctcccaagtggctaggattacaggcagctgccaccacgcccagctaattttttaaatttttattagcgatggggtttcaccatgttgtctaggctggtctcaaactcctgacctcaggtgatctgcctgcctcggcctcccaaagtgctgggattacaggtgtgagccactgtgccggatggtatatgtgcttttctagtctttatattttaagattctaacccttgtagcaaaaacaaatgttaatactgtaaagcttcagaaagcagagctgagatgcaagagcaaaacaaataatataaggggaagcagtaaaaattgtgattaaacctttcatccgattatttttcatttcaatgctatttgagtttttatcttaatgttttgcttcatggaaaagatgagtttgacatctggataacgcattcacaagggaagacataactgtttaccacgtatattttagttgtcaggacctaaaagttaaacaaggagaactgaccagatgggaacaaacaaaattaagttatagttaagtgatttgagttcataccattattattatttttttatttatttttgaaatagcgtttcactcttgttgcccaagctggagtgcaatggtgtgatctcagcccacctcagcctccacctcctgggttcaaggagaattcaaggcaattctcctgcctcagcctcccgagtagctgggattacaggcacgcaccaccgtgcctggctaattttgtatgtttagtagagacagggtttctccacgttggtcaggctggtctcgaactcccgacctcagatgattcgcccaccttggcctcccaaagtgctgggattacaggctattttttaagttattaagaaattacccatatactattttattttactccaatatacttgtttcactattaaagacatgaaaactcttttaggatctctgatcaaagttgatctttcttgataacgatacaaagtaaatcataagggactttttcttttcaattgtacttgaaggctatgggttacttttgtggatctgcaagctagacatcatgaaaaaaacttccaaaccagagaggtttataatcagggcaagccttgatctaccaaaagatttactggacgctaattggctgtaactagtggagtttgtcagatgagctggggacattaaggtttctagattgcattgacttgaaatcaagctcagagacctcctgttttgaagccattacagaaacgtgtttagcactgctgtgtatgcaagaagtctgcatctttagattgctgcctttgagtatgatgtcttaatttgtctttaccaaaatacttctaaatattatcatgggattaaaacaaaagagctcaatttttttttcttcctcaggagttctggaaacaaagatctgattttttaaaacacaaattgctggtgctaatttgcccttagttttctgggcaatatttcttcatttgtttctgattttgacagcatggcctcctggaaaataaaacatagatttccattgattcggaagggaaagaagatactagaacgagaagacatcgaggccatacacaaagaagggaagatagagattattcgcatcttacaccatattttatagttaatctctttaaacctttgtcttcttagctttaagatgccaatagtattattcacctccttatgaggagtaagtaaaatagtttatggagaacagcagcaccatgcctggctacagtcctttctgctctccctctccaggtggagaactcaaattcccatcatataactggggccacagctgaaagccaagtcatgtttatcagagactggttctgattattccaggattcactatgcaggtgacactgtcacttgcatagttgaaaaacagtagaatattggcagtttcctatggtccacccaatactgaaataaataatttatacaattattcagataatatggataagttctttttctgaattgtcttgatctttgaagtaggaaggtgctgctttttgaatggattattttatttctgtacttccattcctcaatacaggatgaaaatagtaattcaccatcctgtggtttcagatttcgtcttcattacttcttggatggaagactaaaagcgtcccctgatcctcagtgtcccaggctcccaagctgccttacgtcagacacaccagcatgtgaatttccaggaccatgtattaaccctatactaagaatagctcctgtagtgtggaagctccccatttgtgtttttcacggtcttttagatgacaagtctagatagggtagatggcctcattagctgttatttattgtgtgatacaagtggagtatagaacaggctaccgggcagccaggtggatagccaggatccaagcatagctcagttcctctgtcccaggcctgggcctcagtgaagttcgagtgactcatttcctctctctgcctctgttactccttcccattcacactcatggactttctcaggcctctcctctgccccatagcctgcgctgctcccacacgaggcctgtgctgcggcttctgcccaggcaccttggtcactcactgcacttcctcggagcctgtacccaggggtgcatcttacgttgaacgtcacctccttcagagagcatcatccccatcccggcacatgtactcatctcactgttctacattttaggaacctgatgtcttcatagcacctgtcgccacttataattaattatttgtatttgattatttattttgttgtctgtttcccccactgaactaaaagctgcatgaaaccagcgtatctctgttccccacccttccagccctagcacctcgtgcagtgccagccatatcctagtccctgagaaatagttgttggataaagaaatatagaaatgaggtggaaacgcctcagaagggcctgtgatgccatggcagacactccaagctcctcagagtagattctcttctcaaatacaaagagttgaactgttagtctggatgccccacctacagtggggaactttgttgttaaaaggaaatggattgtaagcagaaaggaaactttcagtgaaacattacataaaaatggacctcagattgaaagacttaaagattgtttgggaaagtgcagtcttggaattaaataacaaggtagaaaagcatatatgggaatcaagtacttgaaaggaagaactatatcaaagtgaagattggagaaaatgacactcaacaattgaagcacattaaaaaagaggtaatgggatcgggcatggtggcttatgcctgtaatcccagcactttgagaagccgaggcaggtggatcacctgaggtctggagtttgagaccagcctggccaatatggtgaaaccccatctctaccaaaaatataaaaattagccgggcgtgatggcgcccacctgtaatcccggctactcgggaggctgaggtgggaggatggcttgaacctcgcttgaacccaggaggcagaggttgcagtgagctgagatcacaccactgcattccaggcttgggcaacagagcaagactccttctcaaaaaaaaaaaaaaaaaaaaaaaaaaaaaaaagaggtaatggactggccactgcagattgagaaatgaagcttctcagtcactcagaggtaggagagttgtgaaaccactggctggggcttactgaggactgaaagaataatggggcattaaaaacaccagattatctaataatctgtaacaaattctcaattgcactagtttctcctagtattattaacatccactttgttgaaaaatgaaaaacagattcaagcaggggcatgcgtacatctctttgtaaaactagatttataattcaaagagtctttttgattggccactttctgaaatgctaaagtaagactttacaaacaactcttacaatttcattgaatcaatatggagcaagtggggaaaggaaaaggaagcctgtgctcctctaatggaagaatatagattcggaaattatttcatagtacaagataaggaaagaataaaaatgtttttaaaggcaaaacagaaggtgccacagaatgaatgctgcttatctttgctcatgttacacaggaaggttgacattttagtgtgcatcaaggtcacagaaattaggaaggaacactgtctttgagaaatctctaaattacagatcttagagttagcaggcacctcaggataatttggaccaaccctttacttccagaaagtcaaggtgttattatcccccattgtagagatgggacaagtaagttaaattacctgctgaggtcaggtgattgaaaagtgactgatggcggaggatgccaaggacggggggagggagggaagggttaggaaaatccaggccccagtgtgctattaggatgtgccttccattacagcacgagcagggtgattatttcccattttgatatgaacagaagaaaagacctgctgtattcaagtagatctttttttttttttttccttttgagatggagtcccactctgtcgcccaggctggagtgcagtggcgcaatcttggcttaatgcggcctctgcctcctgggttcaagcgattctcgtgcctcagcctctagagtagctgggattacaggtgttcacagccacgcctggctaatttctgtatttttagtagagacgaggtttcaccatgttggcaaggctggtcttgaattcctgacctcaagtgcacaaggcctctgcctcccaaagtgcttggattacaggcgtgagccaccacgcccagctcaagtagataattatttatgagaatcgttttcttcatgaaagaagcaagggaagaagaaggaaaggaaacagaaagaaaggaaggaagggaaggagggagggagggagggaacctctgctgaacatgacaattggtctctcaggccatacagttgaaaaggggacagaaattaccttgacttgttcttttctgtatgttgaattatgggatctgatgtcccacattttcacatgaagatgttgggtacatgttaccaggtcacaggtctgacagtcgagttaaacacctggaggattttgccactgactggagtggacacctggtgacggcttgtgcctacctttggccttagggatgggaggtagggatccactccagtgaagctgagatcagtgttctgcagccttgcacttgctatgtctccacaccaaatgagacttgatattttaccttttcagctgtagaattctctagctcgtttggcatatttgctgtccatagcttccagagcttccatactgcaagcatggtggttggaaggctgaggcttctccacaatccacaggctccctagacttccacaaaacagtgagattttgaaaaagggtagaaacatgatgatggactttccattttatacacaattctatttaatgatgaattacaaaataattgacttcattttgtgctgaaaagacctttgacctctcttagcctggcatttccagcctatgatttatttttaaaaaagtgttttatttgttcattagttttctgttgcatttgaattttaaagctctcctttaaaaagaaaaataaagtatacatttgaaagaagaatgaagaggactgcatcttatgcgtattaagcctctgtagcaaaaggatgattaaaaaggtatatacatgtttcctttcaccgtttcctatatttcctttgactttcataaaaattctttactttggcaggacttttgcagtcagatagagtcaaacatatgccaaccaaagcttacactgttccatcacccctctacgtgcccctgaaattttttccttcttttacttaaaaatgcaactaaactttaaatttttctcagcttgcctgtatgaaactgtttttatttttaaaataacattgatacaaataatatattttccccatattattagcttttattccatccacttcctccccccattcagcacaaggtacggttttgacaggtagcgtgatgagatttagaacagaggctgaagttaattgaggttagcaagaaaaatattactgtcaatttcagattttttctttaattattttaaactcatgaataatcagttaaatgaaaaagaaatgcacatttaagagcatcttgaaaattcccactcctaggtgcgtcagaggagagaagcctcttgtgacactatctacaatagaacacaccactggctttttgcagatgacatagtttttgttttttggtttttaatgatgcttcttttgaagtgacagaatgaatacactgggaagaggaagttgagcatattcagtcataaaaggcaatttgccttttcagtgataacctggctacactatcgcactgggaataagtgtggcacacaactctaaagacagggaattcgggggcctatactgagaaggataaacagccagcgatccagttctgcagaagggcaagcttcagtggctgtgcttccttgggacacgctcgggtgccttctgggtttccatatcatgggaaaaatactctggcctaaaaggactcacttgactaatacaattttcttttaaagactggtaagctgttttatcaaccctgctagccaattagagtgtctggattaattgcttttactggaaaaaaatgattattttgccaaaaacttttaaatgaagaaaatccatccaaaaaagaaaagggagctttctttgaatttgcccacagattgtctccctcccttagccttttctcattttcacgccccaccccacctgttctcatgtgtgtgatgtaagtactctttccaccataaaggaaggttagcatttcgttttatgtagatgcctgtggaaggtgaaagtcatgttaaagatgcttctgtgatctggacagaaagctggggttccctatgggtgattctttttgggtcactctttcagtcatgtatttatttagcaaacttttatgaagcatccaccagtgttcaacagacggatctacttcgctgagagtttgtgttttaagtggtttaaaagtaagacaagtagcataggatatttggtcatctttccctctaacaaaactaaatgtcttttttttttaagttgaatagaaacatcattcataatggtcagcccaaaataatgataacagaagatataaaacttgaagccaagaaactgctttggaaaacaatatttaaggagcgtgtgataaatttgttctatctaattctaaaatggaaggatagtgagggctttcttaacattcagaatgagagctgttcatctgacagtcatttttcctttagagtgctggttttggaggcattctttctcatttccatgtgagaagacaggcttctgtcattaagaactgagcttccaggtatgaagtcctgagatatccatgtattgagactcatcactttgactaatggaagatcctgaccacatatcatcttaagcacctcttcacagtgtgtcatttttccagctcagttgatttttgatacatctcactttatcagtcatcgaagtggaaatttcatcactcttatatgctttctgagtttttcttagtgtttgtttgtaataggttttatgggtgattagttatgggaattgcggcattctcggtgatgggaacctatcttaatttcactcatgaaacctgtttctctcataaagtatgtcataaaccccagggagaatctgttttgcatttaaacatagcttgttgaaattaggatagatgctttttatcatcacttagtatagaaatgaatagctgaaattatttgcatttgctctaatgttggagcattggccttctcaactgtgtgatttcacacgttggttactgtgctgggacgtgccactgactggttgctccactgggcacttgcagattcagaattttaccaaagtcccactgaaccatattatgacataagagtcatatttctgttgtgttggtggatgagcatctttgctttaaaagctttcacaataaagcgtaagaattgatatgacccatcatttcattgtatccaatgcaactgtgtatacctgccctgatagtcaacgcgctgtcattgtccaatgtatacattttacatcatgcgcatctggttttgagccgtagctgtctacttaacaggtgtatgaccttggtggggggggtgacttaatttctcttgagtctagatttccttatgtgtaaaaacaagttattaaaagaaccaaccttctaagtttgttgtagaatttcaatgagataaggcatgtaaagtggacatttaatgaggtactcaatacattttagctatggacattaaactttttaaactctctatttgacaactttctaggcaccacatggccgtaggatcctcagattaattgtatgtgttcattttaatggtttaatttttaattcgaagctttcctcttttgtttttatattgcgagattataattagaatatcctgctcaacgattattttttcaagatagaaattttaccataataaaagtcatggagacatataaatgtgatagcctgattttgttagaatagcatttttgctagatcatcacatttccagtattcgagaggaaaatttaaaatagactatgaagactataggggattggcaagtaaaaaaaaaaagaagtcaaagaaaatgagctaaatctagtagtagcaagtaggagatgccctgaagacaatattatattatcttttctctttcaagaaatttttttttttgagacgcagtcttgctctgttgcccaggctggagtgcagtggtacgatcttggcttactgcaacctctgcctcccgggttcaagcgattctcctccctcagcctctcaagtagctgagattacaggtgtgcgccactatgcccagctaattttttgtatttttagtagagatggggtttcaccgtgttagccgggatggtctcgatctcctgacctcatgatccacccgcctcggcctccctaagtaatgggattacaggcatgagccactgtgcccggccaagataattttttttaattaaaattggctgtattgtctcatcaaagttcacatcaatcaggaaatactattgatgattgaagacctgctgtgtacaagacacaaaggcaggcaacactggagtaggtttttctgttgggatgactgtgaattttgaagcagaggagggggtggaaaatgatggcacaataaaagttcagttacaatcagcactcctgcttctcacctgtcgtgtccaatagagagttgaatctgaaacgggaatgacacagcttaaaactgtttggcatggataggggatttgtggggttgtgtagatcccttattgtcctccagtggtttgcagccaccgtacttcggcttactgatgtgctgcacgtgaatgacaggtgctacgacagtgattcagtctgtcgaggggtttttctttctttctcttttttctttttcttcttctcctcctctgtcctcccctctcctcttttcttctctctttttattcctgtagcaggagacacaggtggatggtaaggtctaatttccagaaagctgagctttgctgcttgtgaacgtggtatctttggctaccactgagggttagactcaggtccactacagcaattctgacatatttactgaaatctgtgaggtttttgctctggaagtatagaagaggacatggtcaaggcagtaaacagatctaaaaaaaaaaccacaaaaacaaaaggaacagattgttaacaaataacaagttctgaaggccagcaagtaagacagcttttgtttctttatcaatactgtaaggtgctgatttactgtaaaactaattgcattataattggatgtggcttttcaatgttgttttgagtcttttattccttccaacatgccaccaaaatgtttatttcgaagtaggccgtgaatactgtgctggaggatttgttgaacaagaaaactaggtgtagtcagactaaaaatgttattgtggtgatccatccccagatcatggaagagagttattattcagaatctgcattttgatggtattcactttactgatattttagccataatttatcctctttcactacagttcttaaactaggtccttccgatgtgtgtcccagttctctttcccggttacacgcctctacttctgcacagcggctctttgcggccttcctgccttggccttggatggaagggtaaccccctgcagagtattcaatgatcagactgtgtcctgtgtatgtgactttgcagcaatacccaatgccagtttgatgcgtggtgcttacttcacagaagcccatttcatgtagggcttgggaggaagtcgttgctatcctggatgttcttacgttctttagtaatggtggaagggaaagaatttcgtacaccattgttattaacaccctgaatcctgcagatctggccaaagggagggtgaccctagccatctgggaagtgtgcaaggcagaagcaccgtccatatgggaggagctggaggtgcctggccctgtctggtcaggtggtgggtctggctgatcttttccccttcagcaccaggaagttacacaaacctgtacttcatgcacccaaggagaagaaagagggccccctcctctgtcccgtgatatgatagtgaaccatacttacatttgaaagatagtttctttctttctttttttttctttttttttgagacagtcttcctctgtcacccaggctggagtacagtggcaccctcatagcctgcaaccttgacctcctaggctcaggtgaccctcctgcctcagcctcccaaagtgctaggattacaggcctgagccaccatgtccagcctgaaagatgttttctgaatcaggtttgtacagccaagttactttgaaagcatacgtgaaaatgtttataagttataatacattttatatgtatgttattatcataagtagataggtgtttcctacttgaatctttgagttacctggatgcatttcttaaggagagtttataacaaaatgttttaataggaaatttcattataataatttgaacttttcccatttattgctttttattattactggataaatattgtgatactcctggtgctctgaaccccatctgagcagaaacctgtagtatctgaggactcttgccaataacataatggtagattgtgtcaagaatatgctcttcatctgcctagggtttcatgattttcaagttgtacatactagaaaggttctgtagataaagtatgagaggagaaaggcattatgtacattagttgaaattggcatcatgttgccaaactgtaataagccttaggggagctcagtgttgaaactactcaattgaatgctgcaatttcccataacaatttaaaaggcctgcaggcatgctaaagtcatagctggatctttcagttaacactctgtaacatgaccccaaagtctcatttacatcacagcaattaaaatatattccacattacacgtttactaccacatactgtagaaataatccaatgaaatgtggctattttccaaaaataatatggaaatcttgatatgatacgtattcacaatttcttctttccaaagtggtatcaccattacacacttgtacatacaggataatggtaattgtgaagggggaggaaagtggggcagatgaagaggaatgcagcctggactgatgaaaactagcaatcattactacttggtgacccacaggaaattggttttgtggtctcagtccggttcatgggtgacaggtgtccattgtgcaaaataatcatcgtaatctgtgctaattggccccctactggtagttagaaagtagagagaccaaaaattatatgagcacaaagaacccttctacacctcctggttgcagaagggttgcctctggactaggacaaaatgccaacacccagttgggaaagagatggaaatgtagagtagcactcacctgaggaaggtattttcatgaatttagagtcctttccttaatgctccatccaaattaaatttaaaatcctcctgacatagggattatagctgtaactattaattgatatcataactattttgtaatgagctgaacagcaaattgaattactttaaagcagagccgtggtgggcaaaattagatcatattttctcaacagtgacgactgcattttagcaatgcctccctttgaggaaacgtagaccaaattgacttactccaaattgttgttgtggtttaatatttattgaatagccacaatttactagcttaccttgaaagtgtggtttttaacagttgtctagaatacatcaccaaggtatgaaatacagtggcaaaagtccagcttctccacttggcaggcagtcaatgggaaaccaaggaaactgccttgctctctgtgcctgctggaacattcttgcctgcactccccttttgtggtcaggaagagctttggaagaatcctactttagcagacatctgagaacgcaacatttttatctactgactaggtccattttaatcctctgccgtggtttataactaccactagtaacagcattgaaacaaatttaattgggccacttactcaagagcctttgtgtccattattgggaggtgcctcctttgagcagacacagccccctcctaggggtgctgaactgggcaaccgcaaagcacaggctggattgagccccccaaccccctcagcagatgacccgatgcctgggttgggcgttgtctacctgacccatgaaaactttttaaaattatagattatgcacatatttggtttttttttttatgagacagggtctcactctgtcacccaggctggagtgcagtggtgcagtcatagctcactgcagccttgaactcctgggctcaagtgatccttccaccccagccttctgagtagctaggcctacaggtggtatgtgccaccgtgactggctaattaaaaaacaaaacaaaacaaaaaaacttgttttgtagagatgggatctcactatattgcccacgctggtcttgaactcctggcctcaagtgatcctcctgcctcagcctcctaatgtgctgtgattacaggtgtgagccgctgtgcccaacctatgcatgtatttgtctttatgatataaatcatctaggaaatccagaaccacaaaggtataggatacgtgtttcctatttttacttgactatttggcagtatttatacaaagtcataatatttgagtgtattgtgcctatgcattttaaggtgtgtaactaaacttgagaagtccaaacagtatatttctgtgtgagcctatacctagtcaagcatatttatattccccaatactgttgcattacaatgtgtttaaaaacaaacaataaacacccacgaagaaaaatattctagagaatggaatcctccgagtaagcacacagaccgctagccaggctggctgtttcccctacacattgatactgagtccagaaccgacctagcccctactgtctccacagcaagctcagagactttcctcagttcttgggacgaatcagacactcagactgaacccaaagggtttttgggatcctgaatctactctggaacttatctatcccctagagcttacctccttcaaggaggaagtggggtttgggaattcgtctgtccactgacagatgccatgttgacggagacacctgcattcgcatcgctgagtgcgaatttcccactttccagggatccgtgaggaaggtgccgtgtggctggtttgctgcttttcagactaagatgagagctgtctggtgggcagtagacagtgtatatgtttattatagtaattttgcctgtgggtaacagaggcatgaataactgcagttatcccttattctccaaatacttgggggtagttaccaggtcttcacctagttactaaaataagcctaccagcattcttcagtctggagactcttcatcagtttcattcctcctcttgaaagtcctgccagcgtctgcctactgctttctactaccaagacaaaaatatttggataacattagacatgaaatcattttgaaattattggtgtgggaacaatttttttcttatttgatgacatagtccctctgaataagctcataaaaattcaaaactcaaattctattcacacattttagcaaaatagcaatttcgtaacagaggtataatctcttgctctcaaccgtatagactgggctttggtgtatttttcgcaaaccagctcccccagattactgagatttaagcctaatgacagcggacatgattctcggacaccgggcaatgtacttgatgtcattatagtagctgccctttatcaagtactcattatgttatgtgccaataactgtgctgaatgccctaaaaaactttatctcatttaatcttcataatatctccgctagaaaggtattgtcatatgctttttggataattaaaagtagtaaactaagcctcagagagcttaagtaacctgtccaaggccatgtgtcacatcatttgtaaatagtggagctagactttagacatagttttgtctgattacaaaacctgttctctgtctccttcccagttgtattgatatagttttttcagttgaaatatccagggtaagaacttgttatttcagaagcatatttctttttctttaaattcttatttttatttatttatttttaattgagatgggatttcactatgttgcctaggctggtctcaaactcctgggctcaagtgatcctcctgcctcagcctcccaagtagcttggattacaggtgcgtgccaccatacacagctctcagaatcatttatttctgtcagtcactgaggtctgcttcttctacgtagacgtcagtgagcaggaggcaggctttctccaaatgacggcaaaaatgtaaacaagctacaagtttacatcttccccttagcaactctaatgaaaagagtaggctcattcccagtagtttcaccagatgtcccaggactgacctcattggtcacatgttcattcttaaccagtccctgagactttgttcaggctgttcctggaccccacgactggggtctgttccaccccaacccctttgtctccatgtgggggaagggtgtttttttttttcagggaaatacatgaaacaggtttttttgtttgtttgtttttgagacagagtctcactctgttgaccaggctgcagtgcagtggcacgatcttggctcactgcagcctccgtctcctgggttcaagcgattctcctgcctcagcctcccgagtagctgggactacaggcgtgtgtcaccaggcccaactaatgttttttgtatttttagtagagatggggtttcaccatgttggccaggctggtctcgaactcctgacctccagtgatccacccgccttggcctcccaaagtactgggattacaggcgtgagccactgtgcctggcccacaaaacaaaattagtacagctaccaaggctgtgatggaagagagcctgtctcctttgataactgaaccacataggatgacagacaagcaaagagaattgtgagcacgtctccctctgaaacacataatatcacaccagggtgtcatttatgttcttctctaatcgtcttttccctgaagaagcagcttgaaaatgttttcagtagattttatcctcttggtcttacattttacacctttcttactcctgagttgaatttcacttggcttttatttttgcatccccaaagctgtgatctctgcaaatgtaattttcaatatgacagccttcattgactttgttaatactggatctgttgacatcctgacatggtttgttaaactcattgctgtcatctctctctctcttttttacttcttaaaaaattttatctcttaaatctcctctttgttctaaggtttggaagtatagtccagaggttaagaggagagatttggaatgaaactgaaatgtgttcaaattcagctcaggtgatttctgactctatgaccttggatgggccagtgaatctctctgggcctcagttctgtcatgcgaaaatggagttgataattcttatttagcaaggttgttgtgaggattaagtgaggtcatatatgtaaagcacctggcatattttaagcactcaataaataatcaagattgaaattaataattcgtcaaggagcttttatgtccactctgaaagagaggaatatgcccagcacttagggaaatcacatgagctcttcattgaagaagctcccccagtggcacacagacttcccaactatcactgggccagtgagacccatctttaaggcactttttaaatatggaaagctgtagttgttttgaagtcatctagaaaacttgcttttctctcattacgactaaaggtttgaatttggacttgatgctacacaagtcttaccgtttggcaacttttccaagaaataaatggaagagcaccatatgggggtgtgagccccagcctagccacactactggttagttgcatgacttgaacatttttattagttgtcatagttcctcatctctataactggcaataacacaaactggctgtgttgctgttaggtttagaaatgcaatgtgtaaaatacccagcatgaaaaagcgtttaataaattgaggttattggcttggtgtggtggctcacgcctgtagtccccagtactttgggaggccaaggcctgagaattgcttgagtctggaagttcaaggctgcagtgagctgtgatcgtaccaccgtactccagcctgggcagcagagcgagaccctgtctcaaaaaataaagaaataaaatagaataaatagaggttattattattactgtgtgtgtgattgtgcctggcatgtccactgaggtggacatgttcagccgaagatggaatgacctacttcaatcagaataagacatctggagtgatatcaaactgtctatttggttgtttttttacctagtgtgtttgaggccattcggataccacagtattatctgaatgacatataattgtgtttcttacttttccctctgaaccagatattattactggcaaaattttcaaagtcctggctcatgccgaagcgcaggtgaaaaaagtagtggcctctatattcagggtgtctgatttaagccatcatagaaatgtgtaaataggtatgatggatattggttgatccaggcaggcagacaaattgagaggtattatttacactttaccctaaaggtctgcaagcttggaaagctgcatttggctcagctgtattggatccttgagtgccttttcccatctattctaagtatagaaattatgacctcttccctgtagttattcctctgtttgcaaccacaaactaaatgactggattaatatatattactagtgtctattaaattttctttccataatttttatcaggaaaaacagaattacttttattttcaaaccatgcaaatgaattgttttgttttgaaatcatagaatatattctcactttactgagtaaattaaccttattatctttatttttttcttttttgatcattttcagtttttgtttccttctacataggaatatttttgaaaaaatttttaatgcattgatgagagttaagccacttttcttatagcctaaggcactgttctatatattttccaattaaaaatctttcagtattcacagttattcagtagctattttaatatatttcctaaatatactatttatagttctatatattttattacctaaatttacgtttattcatgataattcatccatgatgagtagttttgaattttaaaacaataagttttctgttcattatactaaaaataacaacataaatatatctttatcaacatgaaaatgttcataatatattaagtaaaaatgggttacaagattatccattttaaatatatatatatacacacatgttcatatatacatacagcatatgcatggaaaaagtctgaaaaggtgaacaccaaaaagctaggagggcaattattattttttgtcttatctgcattttccagtttccagaaggaaaaaatattacctgcttaatacatattttaaatgaaaaaaaaacagcaaatattgggaatgtgtattaaacagtgcttaggggatggcctcctgttttctctctctcaggagagtttcctcttcactcagctgctcaagccagaaagttggtatcattctcaactcttttcttttcctcaccctcattttagcccatcacagtcatgctgatgccacctctaactatctctcatatccatccatttttctaaatctccactccatcccttttcccctattttccatccttcagccagagagatcttcctaagctaaaagtctgatttatacaattataaatacattgattttctttatattctgtctcctttctcagattaaaagagggcacgggctggctgggcgtggtggctcatgcctgtaatcccagcagttggggagtccgaggcaggcagatcacgaggtcaggagatcgagaccatgatgaaaccctgtctctactaaaaatacaaaaaaattagccgggcgctttggcaagcgcctgtagtcccagctactcgggaggctgaggcaggagaatggcgtgaacctgggaggcggagcttgcagtgagccgagatcgcgccactacactccagcctgggcgacagagcgagactccgtctcaaaaaaaaaaaaagagggcaggggctacgtgttgtgtattcctgcattcccattgcttcttacaatgtcatgtcaccatgacagctggtagcatttatacatgtaggataagtgaataagtaaagaaatcaatggtcactgtgctttgtgcacaatttcatgtctatacatacagatcagctgcattcttttgaatcactgcacagcattcctctatctggtcttgtcttgctttttcatccagtgtgacaatctctgccttttaattggtgtgtgtaaattatttatgtttaatgtgattattgatagagttagaattctcttttttcattcatttacttttaacctatttgtgttgttatatttaagtgtgtttcttggaaatagcatctaattggatctttaaaaattatccaatctgaaaatctctgcattttgtggagtttttagaccatttacatttaatgtgatttttgacctagttgggtttaagtctatcatcttgctatttgcatttgatctgtaccatattttccgtgttcaactttccccttttactaccttcttttgattagttgtatatttttatgcttccatttttaaaatttctgtttcccctttcgtgactgttagttataactatttgctttgctgtttcagtgccctgtttagggtttaaactgtatatctttaatataacactgtctgccttgacgtgatattaggtcacttcacataccttgtaatagtgtacttctgcatgtcctctcccttcctttatgctattattgagatatattttacttacacatgttataaatgctacagtacacggctacgatgattgcttagttatctatatttaaggagatttaaatagtaagaacaatatcttatatatttaaccacataccattttcaagtgctgtttattcctttgtataggtacttatttctatgtgattttgtttttattttgcctgaagggcttcctttacatttttttgtaatgagagtctgctgatgatcagcttctgtatgtccaaaaaggtatttatttcaccttcatttttgagagttattttcatgggatataaaattctagggttttttttttctttcagtactttaaagattttgtcatttagcttacattatttcctgtgagaagctctgtatgtgatgatgcctttttcctgtgtctgcctttaagattttctctttatcactggttttgagcagttaaacataaccaaatgccctggtgtagttttgttcacatttcttgtgtttggggcttgttgagctactggcatctgtaagtttataatattcatcaattttgaaacatcttcagttattatttcttcacatttttttctgttcacttttgtctgtcttcttcttctggaattttgaccacatgtatattggtctcttaaagtagtcctgtgtctctctgatgatttatttatttatttatccacccattctttttctgtgctttattttgtgtagtttctattaccattttgagttctctgctcttttcttctgcagtgtctaatctgccattaatcctattcagtatattttttatctcagacattgaagtttttctcttgaagtttgactttagccttctttttatatatgccatgtctctaattttttgattgtatgggatgcagttattataaccattttcatgtccttctctatgaattcttacaccaatatcacttctgggtagtttcaattgattgatttttctctatattattttccttcttctttgcatacctggtaattttttattggatgtcaaccatggtggattttatcttgttgaatgatggatatttttatatttctgtaatattcttaagctttgctgttgtgcaaaaagaagttaagcgacttggaaacagttagatccttcctggtcttgcttttaagttttgctaggtagaaccagaactgtgtttagtttactgctaattattccccgcaactgaagcaagaactttctgagtacatcgcccagtgaagtatgaattttttttttttcccaatctggctgctggaaacagacactattcttggccttgtgtgagccctgtatacttactttacctgtgattcagtggtcctttagaggcaaaattttgccccagggacatttggtaatatctagaaatatttttgattgtcatgactggggctgctcctggcatctagtgggtagaggctaggaatactgcccaacatcctactacaaaatgcccccactcccacaaaaaaggaatttttctttcaaggaggtgagtagtgctgaggttgagataccctgatacagtcctttcagatcattctttctgtgccctccagtggtctcctcacacacttgtgtcgatcagtactctgtggaacaccccagagggacccttggcagatcctcagaattctttctccaagtggctctcttttctctagcaacttgtcctgcaaattcttaccacctgttctacggggctcagcttcacctctaattgtgagggtcttctggactcttcctgggtcccccttcctgtgctacagtctggaaattttcaaggcagtaagcaggtgtgatccatggcacagcttaattgtttctcatctctcaggattcactgtccttcactgactgatgtcaatggcttgaaaactgttgttccagatattttgtctttttgttgttatgttttagctatcagggtaatccagttcttgttactgcaatcttggctggaagcaaaaggtggcttcttatttattattgctgtcaaaagttctctttgtttactgtcatgtgtaaagaaaacaacctgcccaactttaacctcctcaatcactattcattatattgatttttctctgtctctgaatcttcccaacaagtctcacattttatattcatagtagattccccttttcctatatttcctttcacagtctttgtggggtgttttttcgagacagggtcttactctgtctccgaggctagagtgcagtggcactgtcatggctcactgcagcctccacatcctagcctcaattgatcctcccgtctcagccacccaagtagctgggactacaggcatgtgccactgtgcctgtttttttttgttttgttgttgtttggtttggtttttgtagagagagggtttcatcaagctggtcccaaactcctgggctcaagcaatgttcctgctttggcctcccaaagtgctggaattgcaggtgtgagccaccatgcctggccttgtgttttaactttttaccgctaacatgatagttagattctcttgtgttctactatttgaaactataagctcaaattctagttatgcttgaatttagcactaccaaaaatatatatatatatatgattttatttttgtacttaattatttcaatttttggatttatacatttgcctcaggaaacataattttctctaaaatgaacaaaagcaattgatttcctcaattattttagctattcaataaaggaaatgctttgaaattcttatggtatgcaaagttgtatttactgttcaattgatataactggcaataaatcataaatactaacattagtgaaaatacaaattgtgagtaacaaaaggcaaaaattttttggtactctgtacaaagaacttaatttagacctttaatctaaaatgtgttggtgtaaattagtgttgctttgaagtctggttattgtgggggtgagcttttccagactataataaagataggaggacactatatagagatatccaaggtaacattcaaggctttgtaatttgtacagaaaacagataaaaatggaagcatgagtgagtttcatctagaggttatttaatcttttgggtttggatatttgttatatttcagtctctacatagatatatataaccttatggaattttagaactacaattgatgttagggatgtttgataaattgtaatcattggcatcaagggttttaaagatacaaaatttacagttaaaatcaagttactttctaaagatacaattaaaagtatttcatcaggattaggaacatgttataaaacaatgtaatgatgtcattacatcattacattacgaaacttctctggccaagtttcaaaatatatttaaataatacatctgaaataaaggataggatcaacctaagtttagtgtccataaggcagggattgcctgcccattcattcattcagtcaaatactttgcagagtgttgggaagaagcaaataaccaagtaatccaacttgctttaagcccagctgtggtttccagaggagtgctatggttagtagctgagttgcgtttcaaggagctaatgaaaattaaccaactcagcttgatattgttgtgtgtttgctgtagccagttcaatcagaagttttttatctgttttgttttttgagacagagtcgcactctgttgcctgggctggagtgcagtggcatgatcatggctcgctctgtccttgaagtcctgggctcaagcgatccccctgtctcagcctcctgagtagctagaactacaggcatgtgccaccatgcccagctaatttttgatttttttatagaaatgtggtctcactgtgttgcccaggctggtcttgaactcctgggctcaagcagtcctctcacctcagcctcccaaagtgctgggattacaggcatgagccactgagcctggccaatcaaaaggtttcttttgtttgtttttttgttttttgttttttgtcacctttctaatggctttccttatttttcaaaggctttgcccactgatgcagctaatgtcatattcattaaatgctgtttgctaaatatgcacacagtgaccctcttccttgtgtaggactgtgcagtcactatcaaagtgctctaacaatttggcattacttaagctgcatttcttaaccttctcgtcttcagccttgagtggaagagataacacagaaaactgccttttgaagtcatattgaactcactgacttccatcaatgaagcatatcagtagttgcaaatattgcagtgtagattaaatcctcgaagagtttgaactatgtacgaaaatgaaaaggagatacagaggactttttattgtttacagtctaagatcaaattgcctcgatctttgatggcataatcaaatactacatcttgatgtattgtggcactggagaattgcttcacaaataaagaaaactcagatatttgatgctagagatgttttagaaagcttaagaatacctaaaatcatctttccattactaggtgttaacatttagttggtattgatttataaactttagaagtattaccacaaagttgcatctttaattgctattactgtgttaaagaacgtactgattatctaatttgcaagattataaaatggtatcatgaaaatgatacagtagagagaatactttttgcccttgaagatccaaatggggccgggcactgcagctcacgcctgtaaatcccaaccctttgggaggccaaggcgggcagatcacctgacgtcaggagtttgagacaagccttgccaacatggtgaaaccccatctctactaaaaatatacaaattagccgggtgtggtggcacgcgcctgtaatcccagctatttgggaggctgaggtgggagaatcgcttgaacaagggaggcagaggttgcagtgagctgagattgcaccagtgcaatccagcctgagtgaaagagtgaaactccgtctaaaaaaaaaaaaatccaaagagaatggaaagacggatggtttaactcagaggtttacacactgttttctctaaaggaccagatagcaaatagtttagactttgcaggccatcaggtctctgtgttagtttcctgtggctgcagtgagaaatgaccacaaccctggtggcttagaacaacaggaagttattctgtcagttctggaggtaaaaagtgtgaggtcaagggccacacctctgcggtccagagaagaatctgcttcgcgcctctcttctgacttctgttggttgctggtggccattcgtgctccttggctttcagggccattgctccaatctctgcctctgtcttctcctggccttctttcctatgtgtctgtgtgtgcctgtatccaaattttcctctcctgtctctcataaagacaccagtcattgcatttagggccctccctaatccagtatgacctcatcataatcttactacatctgcagaaataaaagtaaaaccccattttcaaataagatcacagtcgcagatactgggagttaagatttcagttaagatttatcttttggggagacacaattcaaaccactgcagttcctattgcagccactcagctctgtctttgtagcatgaaaatggccaaggacaataggtcaacaaatgcaagggctgtgttccagaaaaactttacttacaaaaacaggtggtggatccgatttggctggcagagtttgccagtcaatacctggtccaactaattgaagcaaaacagcagcagagcagaaaacgatttccccttgcttcaatcagttcagttttaaagtaccaaaatgcatacatatgtgtatatatagcaacacttattttaaaatagatgtcaatttagggcaagaaatgaaacttttataatgacttcaaatcccgaatctttattactaaaaatgctcgaattatatttttctgatcaatgaaaagctttttaatgatcatttagttttcggtctatagggccctccctccaaaaagatcaagatgatttggaaacaaaatttccctggaactgagacatatttattcactctgtcagaaagaatgtacctgtttccctgactaaatgtatgccccataaggacaggaacatttatccactctttgtcctcagcacctagaaggcagcctagcacatagtagtcacccagtaaatattcatctaaaataacttcttggggccgggcgcggtggctcactcctgtaatcccagcactttgagaggccaaggcaggtggatcacctgaggtcaggagttctagaccagcctcaccaacatggtgaaaccccgtctccactaaaaatacaaaaattagctgagcgtggtggtgggtacctgtaagtccagctactcgggaggttcaggcaggagaattgcttgaacctgggaggcaaaggttgcagcaagccaagattgtgccactgcactccagactgggcaacagagcaagactctgtctcaaaataataataataataataataaaataacttctcttggccgggagtggtggctcatgcctgtaatcccagcactttgggaggctgaagtgggcggatcacgaggtcaggagatggaggccatcctggctaacatggtgaaaccccatctgtattaaaaatacaaagaagtagccggatgtggtggtgagctcctatagtcccagttacttgggaggctgaggcaggagaatcacttgaacccaggaggcggaggttgcagtgagccaagagcgcgccactgcactccagcctgggcaacagagcgagattccgtctaaaaaataataataataaataaataaataatacttctctttgttggaataaaaagagtgaattggtgtgttgttgttttaatcctttggtataaaaatagtctgtcaccataccttgaaattgtttattatttcaatttaagtttgaaaggaaaggtacaatatgagaaattcagtttctcttaagagctattggaagaatttgtaaatgtaataatggagtaatgaatcagaggggtcagtgaaaaatcgttttttaaaataaaaaccaaattcatggaaaagaagacaaaggtagagaaatcaagatatattccaagactaaactaaaatattagcaactactttgaacagctcagtatttggtagccatatcggtatttggaagcagagaaatatggaaccccacaagggaacccttcattggcaacatggagagaggagggtataatttggttgaagacatagcagggaggaacactccaaaccttcccaggtctgggctgtggaactctgtgattattccagcgcagggagtcttgccactcttcttgtagctgatggaaggcaaaacttggaaagtgaggggtacatttgtaacgttacaacagaaaggatcaagaattcttgacaactccaggataagctgagttgacatgggagagagtcagccacaaggctccaagttggaagcacattaatgagctgtatgatgtgtatactgacagtgcatgctcgagagagtgggggagaaagagagagacagtcagagacagagacagacagagacagagacagaccaagactgagaccagagacactgattctttgagagagggactcactttttttggaggtgaagaaactactatctcaacagcggtcacggccaaaggatactacaggaaccaaggagaaggcctgaggccagttgggaaccattgatttcaagttgactatggaatcactcaaagaaaaagtgaatttaccaaaaagtgattttagtggggtgggaggaaaacacgaagggctgaagataaagccttcggggtccttcagattaaaaggagagacaacatgagaaggaataaagataaaggagaaccatttgaaatgcggattcgccccgggccactctccctcttgaaggccccagtcttttgccggcagaccctttcctcccaccctttccactgtcagttcagcaaattcaggaaatagagagtttttaagcagagcaacaccatttgcctcgcttattcgtgcagttgcaggaaactccccccatcaaattagccccttgaattaccttaaatatcacgatttgcgctgattaaattcatttgctagagaggaaaatccattttaagcagaatggtatggggaggaggaccagctttttccacagttcaagacatttgagttcttaaaacatgaaaattgtgccctctgaagaaagagtctttgtaagatatattaaaaaaaaaaaaaaaaaagttcaatgcatttgacaaagtttcagtggcaagaatttcccaatttgttcctgctctttagaatacattgaaaaagaaaaaaatagtgtacgtttataagaaaatgaaagggaatttattttgaatggagaaatgctataaagagaaaaagccattctaacttttccattgtggaaaatttaacaaactattgaagccaatttttagctggcttctgtagtgaaatttcagcgtgagcttacaattttttttttgtattaatggggaaaatcagatacagtagcttcaataaacactcatagcactcaccagcagaaagcgtgcttcacctcttggtgatacaatgtattttacactgatttcagaaatactaatttcttgttgaaagcaagtttcctagataagcaatactattgtttcctaccatcccagattgagaagggtagagagtagccagtttttaggtgaacgtcatgctgacctcatgcaaaccttgtatcttcacagagaggccaatgagacttgaaccctgagcctaagttgtcaccagcaggactgatgtgcacacagaaggaatgaagtatggatgtgaaagaacgcaggccttactgctccctgaccaagagcagacgagagaaggaacggcgctacacaaattcctccgcagacaatgaggagtgccgggtacccacacagaagtcctacagttccagcgagacattgaaagcttttgatcatgattcctcgcggctgctttacggcaacagagtgaaggatttggttcacagagaagcagacgagttcactagacaaggtgggtaactgtcctagtaaaataaggcaatgctcacgttactaacttgtaggtgtcgtgattttcccctcaaggtgacatgtctgttttctgactttggcgttccatctgctgattctgattttgagatattagatcatcatgcagtattccagatgagagatagaaagccaccggtgggcacattggtgccccaggcacaggcactgacacgtggagaattccgaagcctcacctgctatacgtgaggtttatgattctgcacgtggcccaagcgtttgtacaaacttgtgtaaacttgaaactccagtctctggggctcccttttagttgaatgaaggtgctcacagacattgtgtctgtggctagaaccggtacaaggagaacaggagctgttggtgaagaaacccatctttccctcacaagaaagtgtggcttattaccccagatcatctcaggacccaagcagtcctgctgtttgcctctgtctgattcacacaaaagcctgccacggaaaggttccattgtctttctcccaggcaacctagtaaattaagtttataccttaacacttcctagtttcccacaatgtaatccactagggcttggtcattcgcgtctatctgttgaacatttttacactgtttttggcctgaggatgctcccagtggaatcatgactcctgtaactttacttcactctcctaaacctacccatttctactcttaagacagtaggttattttttattagacatacatagttatattttgtttcttctaatacagtcttgagatgtgggcaagattactaataaaaataaaatcctcttacatttgtaatgtgcagtataatttacatataacttagcattctttagctaatttaatctggaaatgagaaaaaataaattaaactttaataataaagaatatattcattcttttccaatcaccgtacagacagtgtgactaacagtctgatattgggcaggaacacatttaagaaaaagtaataatgcaataaatcgttcaaaagttggaaaattttccatggttcttttcttccctgcattgtgcaaagagccattgtaactagattgaaatagtgttcactcacccaagccggtttacatcaaagaaaactcatttgattcgctaaggagagatttttataccctaaagcatgccttactaattactggtatcaaattttatgaaaagggacaaaatagcttaacatttttaatccgtttttcaggggagatacaaaacatatttgaggtatgtactcttagttgactgtacaatgtattgtaattttaaacccatttttttcatattgtctgcacagctgaaatagattatcagtgtacattttttcaacaatttaaaaaatagtaagtagtgtagaaatgcatgcaatctgcaccaaatgtgaagtcttgctttttgtatcaaaaataactctttagtgccctgttggaaaacgaaaaaaaaataaaaaaattaaaaaaacccaaactccacattgtggaatattattcgaaggaaacagcagcacatgtggcgagatgcactgggggtcatctccaccccggttatctccacaccaggcaagcatttctttttggcagcacagacgatgcctacacaggttaaaaatagcgcactgaactgttctcctcctaggcagccttgatccagcgcagactgttgttgacaacccggcggtagcatttgtagaagccctgaaacggaggttcatagggggccaaagagtgttattcctcactccttccaagccaaggactgcagaatccaaaggggcggaggaaagagaaagggcgccaggcggccagggaggccttgttggagagcagaagtgaatggagaagcgctcgcgcagtgtgtgatggtgccgcaggtcacttgatgtgtatgaatccgaactttgtagaaacgtaaatgggatggactgctagttacagctaatgctgccaccctactgcgtgctggtcagtgcgctaggcaggtgtgtgaggcagctcccctggtgaggtgggtcccggtagcgtagtcttttcacagattgagacggatgaggtttggagaggctggagaccccatggctcctgagaactaagctggaacttgagcccaggcttgcctggttctggcctggcttctaatctctgtgcagttgccacagtggaaaacaggcaactcagtaaaatatcaccctttgatttattgcagtcaattttttaagtctattatcattattattaattaattaatttagtgacaagctcggtctgttgccaaagcctgactgcagcggggcagtcatagctcactgcagcctacagctcctgggctcaaaaaatcctcctgcctcagcctcctgagtagctgggatcacaagtgcacaccaccaccatgccagggtaattttaaagacattttttttaatagagacagggtctcgcttgttcctcagactggtctcaaactcctggcctcaagcaatcctcttacttgggcctccctaagtgctgaaataacaggcctgagccaccacgcccagcccattttagtcaattttgaattcgaatgttcatggtgtggatagtgaggtgtgagcaaactgtaggcatatttaggaaataaaattgatatgattctgtaattgggtgaatgaggacgagtgtgagggtggcgttgcggatgctttctccttcctgtggtttgatatgcggagtatttgtagcgggagtggtaggtgtaggagagaaacgagtaaggaaagtctgctatcagattatgtttttcttgagcaagcataatgagaaatccttccaggctttcattttctttgaacctgacaaatgtcaattttttctcacggactattatgctatgggattaattatttaattgagaaaatgtgcttcctgccacagctcctgacatcatataggtcataaaaatgaaagattaaaaatattcatagtagccaaatatcattgaaacaattccaaagagtcatgctaatttagctttttttgtccatggagttttaaaacagctgatcagtcctgtatccatttactccttgaatgacacagggaaatgcaacttcggctggagaaagggacaagcagggtttccgttggtgcgattatatggagaattcaaatcgagaaatatgatgtttttatatttttaattgaccaattttatgtctaattatcaaacttgaatttaatggttttgtatggctttactgactggcaggtgactactgttaattacatgttatatttaggtagcataatgctggggatcatttcttcttcacagtcattgtgtaatttgacgggatctcacattgatctctttctctttttaaatctcttcatgtagtttgttggtgatggaaatgttgctctttgaacagctgtggagcttttgctgtaggtgagggtgaggttagggtaacaatggcttgttttgcattcttagatgctattttcttttattaatctttgaagaaaatttatcccatcaggtctcagacaaatttcttatgaaacagctgcataggatcatcccacagcttttggagaagtggtaaaataaaagaacatttttcctctgctgcagctctgtgggctatgcacatgttctgtagtattcttgaccaaacacttatcaattccaacaaggaacgctgcccgtgagggtgaaccttgaaaagagacgatgtctggaagtaagaatacatttgttccactgaatcataagcctgaaaagaaccactttggggccctaacccaaagtatataagagttagtcaataatcagtgttggggttgtgaatttcagaattttaacatttgaagactaccacttattctttatttgtagagtggcaatggagaggaaggactctgttttttgtttttgtttttgtttttgagatggagtctcactctgtcgcccaggctggagtgaaatggcatgatctcggctcactgcaacctctgcctcctgggttcaagcaattttcctgcctcagcttcccgagtagctggaattataggcgcctgccactacgcccagctaatttttgtaattttagtagagatggggcttcaccatgttggccaggctggtctcgaactcctgacctcaggtgatccgcccacctcggcctcccaaagtgctaggattacaggcgtgagccactgcacccggccaggactctgtttttaaatttgaaaaacaccgtgatatctatgtttgtacgttactgaaattaaaacagaaagtaaatttgcaaagaagggaaggaagaaggaaggcagtttgagaacgacaggcactgattgatttctaagtgtgcctcatctctggtctttgctgacagcgtggctccactcccagaaactcccctctttgggccgtgccgtctcttcattcttaccatcatcagtaatgctgagcactcccagcccccagaagcatggcttctgcttctcacctcctgcccttgctggttcaaggccagttcaagtgtagtttgggggatcccactggggagaggaaagaaagagaagagggaaagtagatcccacaaggcctgattccccactgccggacctcccttatgggctgcatcctgagcgctagcccatcttgtatgcaaacattccagatgctagacctgccccttaccaaggataacccttgtgaggaaacaaaaggacattagaggagtagtctgaatgttcctgtaaatatgtatcttggaccctggcatgatggtggcttgaatgagggctcatccactcatctcccagcagactcgctacctcctgtgagctgagcagtgatcgagggtacacatgacatctgcaactctgttaggatcgtgaaggaccaagctggcgcaagtgttttccgctttgtgccagaagagagtgtggaatggggtgaagccctaacgtgaaggtcaagaagaatgctgtggcctggtggttccagagagaggctgacctgcccctcccatggcccccacttgggcaaatgttgccttgtgggagcagctggtttccttggcccctcaggagctggggaagcctgaacagatgcatttctccctctgatagggtgagaatgccatctaagaaaaccaaatagtagagatgttggtcccaggaatctaacacgatttcccgctctttcttaaagcacctcaggaaaacaacaaatttaatggcacccagaattcaggaagtgggataagatgtaaaagaaatagactaagaagcttgtaatgaaaatgaacaatggagataagagaagacaacctgaaccaaaataaaacattgtaactaaagcatgtgcagaaatcccagaatgataacaacaaaaaagcaacaacaacaaaacaaacaatggccaccaaatgctggagaaaaaattaaaatcataatttacaaactaaaaatggcagcagattagttgaagaagagaggttaatggttttgaagaccaggtagaagaaacaactcaaaacagaaaagagaatttcagataaaattaagaagacaacaccatgcacacacacaaactgaggcacattctagaaaaattctttaacttcaaggataaagagcgtttacaaggtgccacagagaaaaggcaggttacttttttttacttactaaaaataaataacaccaataatgaatttctcatctgcaacaataaaagcttgaaaacagtggaataacacctactgagagaaaaaaaaaatgcaacccagggatcttatttgcagagaagatactgtaggagaggaaagatttcttttcccatgcgtcactagttcatgactaaggcccctataacaaaagacagattaacaagagaaatgcacacaaattcatgtaatgtaagttttcggtgacacaagaacctttataaggaaatgaatgcccaaagaaacaggtaaacttgtgtttttttgtgtgaggttggatgaagaggggacagtcatggggaagtgtgattgaacacagggattgaatggtgataaactgggaggaactgggcaaggtctgctcgttcagattcttctctgtgtccttgtgtcttcagagatacggctgttgcttcctcctcgtatagggagggcacctcttggatgagggtcttatgtcctgcttcaggggagaaggtcaaggggaaagtgagagtggccttcctgcttctgctgttttctcaaatgccaagtgccatgttttgggtagcatgtcctgaaccccatcaatagcatttatctctcagagtaaatgaaagatacttaggtaatgctgggattcagagaccacgtcaacagtgtacacacaccgtctaaggaagtactcaagaagaaataccaactgaattagaatcatggcctccgaagaggagacaatgatgagaaagcaactctacagtgtatatagttaaatctcaaacgatgattacagagcaactggaaatgtgtcagaagcactacaagagaaaccttaacagaaggctggaactaaaagcatttacctatctcagcaaaatccagcagttggaggaaagtagaaaagtaaaagtgttccaaattctcatctcatctgaagagggagagtggggaaacagttatgaaatagagctttagtggagggaaataattgctatcttgcatacatatgacaatgacaaacatatatttgaatatgaatgtcaggagtgggaaggtaatcattaatacaatgaaaagaggacaatagacccacctaattagcagtgaggaaagggattgactagcagtctgaccaatttagcaaaaacagctccaaggaaaaaaaggcaacaggaaaaatcatgaataatcaaaaaacaagatgaaaggagtcaaatctactctattacctatcacctaaaatttaaatgtactgcattttggccgggtgcggtggcttacacctgtaatcccagcactttgggaggccgaggtggatggatcacttgaggccaggagtgcaagaccagcctggccaacatgcagaaacccggtctctactaaaaatacaaaagttagccaggtgtggtggcaggagcctgtggtcccagctactcaggaggctaaggcacaagaagcgcttgaacccttgagatggaggttgtggtgagccaagatcaatgccactgcactccagcctgggtgacagagtgagctctgtctccaaaaaataaaataaatacatgtactgcattttgacataaactactcaattgtttcataaaagttattggtatttttaagacatacacttaaaatggtaaagaaaatggttgagaataaagatatattaggtgaatacaaacaaaaagaaaggaggaatggcagtattaatatcaggaaagatggaatttatgatgaaaaactctcagtaggataaaaaggaccactgggtaagtgatgaaaggcatactgtgcagaagaagaacattcttaaaatgcgtaccttaaacaataatatagtagctaaatttataagcaaaaactattaaaaaaagaaagattgttaaaacacgttagtagtgagatattttgattcacttcttttagaatcaggcagatctgaaagacaaaaataagacagcaattacataatattaatcgaaaatttcagctaaggtatatatacagaaatttataactgtcagaaatgatacaattttttatatttctataggatagttgcagaaactgattatgtatttggccatctaaagaaacattaaaaattcagaaaatagattttataagccaaaacattttatcataaaatgtagtaaaattagaaataaataacaaaaagataattagaaataaataacaaaaagataaatgaagaaaagcacttttgccccttggattatgatgtcccttgactgtgatgaaaagcaatcaagagcaatgaaaattctacttccaaaatgtatgggagacagtgaaagtcataatcatagggaaaacattgtgaagaaatcaggaacaaagactaacaaaataggaatatactatatatttaagaaatgagttcaagccaggcacagtggctcacgcctgtaatcccagcactttgggaggccgaggcgggcagatcagctgaagtcaggagttcgagaccagcctggccaacatggagaaacccccatctctactaaaaattcaaaaactagctgggcgtggtggtgggcgcctgtaatcccagctacttgggaggctggggcaggagaatggcgtgaacccgggaggtggaggttgcagtgagccaagatcacgccactgcactcaagcctgggcgacagagcaagactccatctcaaaaaaagaaaaaagaaaaaaaaaaaaagacaagaaatgagtagagtacaatgtctggaaaataaatcagaggaagtaggaagaggtacataagatataactgaaatttaaaacagacaaaacagctaagtctttaaaaaggctagtaaaatagaaagcacctatgatcctgattaagaaataatgagaacaaaaataagacatcctaaaaagactgtaacaactaagaggtgctattattccaagcaataaatttgaaaaatctagaggaatttattttttctcagaaaatatgagtaaccccaaaagatttcagaagatggagcaaacttgtcaacaccaattatttcagacaagatgagaaaggtgattaaaagagagaccatttccaagggccagatatgttcctaggtacattttgcataaccttcaaagtacaactaagtttaatgtttaaaaatctattcaacaccacccttcataacagatggaaggcatcaaagttcatgttatgaagttggcatgaccttaataactaaacttgattagagtagtacaaaaaaagaaatcatacataaattgcttcacctaccaaaactgcttttcagtaggtgtgtaaaaattcaaaacaagtatttgcatttaagaatccagcaatatataaaaagaataatatgctagaccaaattaatagccaagtggttactaatccttgctgaatatacaaggatttttcagtgttcagaaatctactaacataattagattaataaatcaaaggggaaaaccatgatcttatcaatagatgatttacacgttttggaaaaaatttagaaaggattctttattcaaataaactcacaagaagaaaaaacacttcaatatggtagtaatatttgacatgatcactctagacactaaacagcattctaaaaactgagattctaggacatttcagttgaaataggaacataagaaaggtttacctattctcacaattattattcaaaattgttttagatgttttagcaattgtaataagaaaattaaatgatatatattttggaaaaagttaaaatcagtacttttgttaaagatatggttgtatgcatacaaaaaccatgtgtctctagaaattaaaaaaaaggaatttgaagtgaatttggtatttggatgaatacaaaataaatatatggacagtgtagatcatatagtataacggttgagagtataggttctgaatccacatgacctgtgtgtgaatcccaggtctgccttgccgtagctgactggcagtttacctaatcttggccaaggaacttttttggacaagttacataatttctctatgcctccattttcattattcatagattgtgctgtagtttgttgaggataaaatgagttaatatatgtaaactgtttagaataatgcctgatacctgttattaatatctactgcttggaagtcagaaaaaaaaatcctatcacaaaggcaacagacactataaaattctttggaataaattttgcaagcatgctatgtgacctaatgtgagggtacctataaaatattatttaaaaaacgtaaaacaggacctaaataaataatcaatgtttttggatgggaagatgataccataagaatattaattctccccaaattaatgcatagaagttaaggatatcaaatagaattccggtgggttagagttaattttaattggcgtgagtgatcttcaaatttatcttaaaattcaagtgatcataaaattcgtattttcaaatttctggaaatagccgaaaccatatttaaaagtcaaatagtgaggacaaaatggagttaatatgtattttcaaaagtatgatgaagctgctgtaatcatgtctatatgatattggcataaataaagacaagtagattcatggaatagacaaaaacttcagaaatatatcctagtatataggtaaatttaacataaaacaaaaaaaaggtttttctattcagtgggatttgataaatggtgctggcacaactggttatccatctggaagaatataaaattggacccatatctctcagcatattcaaaaataaattaagatggattaaagacaaatgtaaaaaataaagcaagaattctagaagttaatttgggagactaagataggaatgacttgagccatgagtagcagaaagcttcagcttaaaaactgaagagaatcattttcttataaaacacgaagtccagagatagactatctagccagggcgtaaagatatcattaaggcatctctctatctttttcatctttgtcattcttagccggtagcttttgtccccttggtgcccaggtggcagctgtgctttcatattcctgttggagtaagaatgaacgcacaggtaggaaggccttctctactttggactagttcattttactcccctgaaacttctcgctacccctctcttttcagagctgttatacttgaccatacttagctgcacaagaagacaaagcggccgggcgcggtggctcacgcctgtaatcccagcactttgggaggctgaggcgggcggatcacgaggtcaggagatcgagaccatcctgtgaatggtgaaaccccgtctctactaaaaatacaaaaaattagccgggcgcggtggcaggcgcctgtagtcccagctgctcgggaggctgaggcaggagaatggcgtgaacccgggaggcggagcttgcagtgagccgagatcgcgccaccgcactccagcctgggcgacagagcgagactccgcctcaaaaaaaaaaaaaaaaaaaaaaaaagacgaagcatttgccatttttgctttccagtccttataataaaggtggcaagaagaaagtggtttgaatccacacagccgatcccagggactcaatagtaggggagaaattttgcaatagaaaattagaatgtttctaacagaaaacccagaagaaaagatagacttaaatgattagttttaaaatttaaaaccttttacatgtaaattaaaatacccagaaacaaaatcactacattgggaaatatgtttataattcttatgacatatataatgtctatatctataatatactgaatgactgttacagtttgaaaacagaaagataaacagcccaatgggaaatggcatgcatagacaattcacaaaagagaaattcacacggtcagtaaacgtgaaaaggagaatcgatgttcctattagtgtgggaaaggcggtagctaatcccaaattctacatccctactatacagcccctatcctggcatccttcattgagcattcatatatccagggaatatgcctaggaagtttctccccacttggtaagcaggaaatcaatggaagcggctactgtaggcgggatcttcctcattggtacatttgttcaaagagacagtctcacacatggaagccatgccctagagtacaattcatccagttcttcattcagacacagataactcagaagacctgtgtgttccatcttggcatcctccatgttgttttcatgggaaaatgcatactgattcttatcaacttctaaacccaacaaattcctaaagtgagaactttctatatagtttttgaagttctggcttaggaagaagccaaaaaaaaaaagcaattcatgaatagctgtgctcaaaactttacacagaagctctcattatagtgtgtgaaataaacaataacacaaaaaactgaaagaaaaaaactgcaaaatattcacagagggtgcatttgagagtggggctgtgaaggaacaccttctgattttcagtcaaaaggtcaaaggccaaaaataattcctgcttcggaactgcagcaggttggttctaccctttgggggttggagaagaaaagcacctttccagatggccagatctagcttgttaatgtccctgctgccctgatggcttggttttcaattcagggtgaacttcagatatggtgtttaagggaggagccagataagaacatagcattgtgcttttgatttattttagggatgaaatgtaaaccaaaagtccccaatgctgaaggaaattttaactttttcttttccatttttctccttggactgttgatgctattattcttagcttttttttttttttttttcttgtgttccattgtgctgccttttttctgcctctgcataaactgatatggttgggagatctttgagagcctctgagtccactgtatacatgaggaatatgagactcaaacttgttaaagtgttcactcagacaacagctggtgagttctaggtccagaagaaaactacaatcaaatttcaatcatttttctacactactcttttatctttctagtttctattagaaaaccgcagtaaaaagctacgtatgttcttaaatatcttcacaaatgtgagatagacaaagatatcttagaaaggtcctaagtggaataaatataaaagaaaaaaattgataaattggacttcatcaaaattacaaagttttgcttatcagacattacctttaagaaaatgaaaagcaaatccacaatctgggagaaaattatctatctatcacagagacttgtctctagaatatataaagagcttctacaaatcaacaacaaaagataaataaccaaattttaaaatgggcaaaaaacttttaatagaaacatcacagaaaagagacacaagtgactaataagcctgtggaaaatgctcagcaccgttagccatcagagaaatgaaaattaaaaccacaatgaaatactaccactcatcttccagaatggctaaaattaaaaaagacccatagcaccaaatattgaggatgtggaacaactgaaactttcatatgtaaaatgacacaactgctttggaaactgttgggcaatttcttatataaagttaaaaataacatctcccactggacccagcaattcatctccttagtatttacccaaagtaaataaaaacttaagttcatagcagctttattcataataggcccatattggaatcaccaagagaatggatataacaattgtatgttaatacaatagaatatgagttggcaacacaaaagagtgatctacagatacttgcaacaatgtggaagaatcttaaatatccactgagcaaaaggatcctgagtacatcctgtatgactccatttatataaggttcaagaacatacaaaactaaccttctgtagaagaaatcaggacagtggttgcctgttgggtggggattgactgggtacgggagagctttgtgggagtgatcttatcttgcttggggtcatggtgggtacatttgttaaaactcatggaagtatccactttagatctatgtatgtcactgcctatgaaatttacctaaatattaataaatacaacagaagcaaaaatcagcatgttcaaacaactgtagttgaacatggaaagttttgggtttgtattttcccggcttccacaggggtaagatttgatttggtgccaagagcagagttgcactgtctctactgaaccataaccacaatctttcaaaaacaacctccgctgtcatcgcactataatgttttgctggataaaggcattttgcccattaagataataacatatacaacatatccaggactgcactgagagaataaagagtttgtgtcatagatgggaccagatcttcaaatattttcatctgtttccaaataaaaaagagcctgttttaagctcttagatatagactacttattttgggggagggggaggcagttttattagaatattactaaaatgataagtggtttttaaatgtttctttatattgtatgttctggctaggtcaaaagaattgaaatcatatttcttaaatatataacatgaaagttgtacatataattttagaatgtcactggtagcattggacagatataaaaatagtgtcagtaactcctttgattaaaataataatgtctctgcaccattttatcctgctttggatgtgaaatggaataaattatttttgttactcttcttatttttattttatttatttgtattttttttgcattatgaaaatctattaaccattcagacatgttggaaattgtgaaagaggaagatttgagagccaagaggaaaatgcttttaattttaaagactgagatttagtttagtcttggatgccattatagtgaataatgggaactgatccgagacttcaaaagaaatatgaccatatggtcctaccattcagtacttaatgctgccatgaatttccagttagaccccaaacttttcatttccccagtgttccccctcacctctgtcatcagacaaaaacgaaaggaatctgaaaccccttttcatgttttctgaaatactggtgctgagaaagcttatttttgtgagaattgagttttatgaaaaaagacaaaaacctgaaacattaatcagatccactgggctaattactgcaactccaaagtttattacttttaaatattaactgcttaaaatgattcatttagagatcaaaatgattaatccttctcagtcactataaatgtcagcggcaggattaaaggatttagatggtcatgtttactcaaccttacatttctgtacttaaagacacaagttaaatagctctagtttatcattgtttcatgttaatggttttcctcttagctccctcttttagctcccctgcctaactgattgttaactaattttggctgttaagtaggcaagggcttctttcaggctcggcagccaacctgctttgtggattacccaccagaaggtgtgagtagatagatgtagcttacagccctcctcaggacgcagtgggggtaatcctttccccctgcctcggccttcattggtctgatgtgttgagccccagcttactgctcaacttgtatctggttccttgccacgttgcccattttggatccacagtgtgactcaccgcggtgctgcttcagtcgcaattattaaacacctgccgctttatgccaaaccataggcgtatttataccaatacctactgcagttcgactatcagatatcagcagatacattgcaggcgtattatcattgccgggccttggattgttctaaagaagtcatttctaagtaaacataagaagcaaatttattttcagaatgtttttgatttaaaaaaaaaagctattttaaagttatttcttaattacaaatgtttgctaaagctttttttatggttgccccattaaatccttcatttccagacctaagacatgctctttctttatacgtcagccaactcacaacctaatttttcttatttgggccaccaaaccttccattcaatatgcatatgttcgtcctcccctggaggcctcacaaattttatcttgaagaaaatgcatcttttctggggccattcattctagtcctggcttttcagcttgcagatatacctagggtttccctttcttacccacctcctcaagttcaccttagtgcccagcctggaatttccattgaaagctacatttgtgatgattgccgaggggatgtcctgcaatggcttccattagacttgtgttgtgagtcatcaattagattatgagtatggtgtccagtggtcattttcagcgtcctctggaaattcatgggtttcaatatgtggttatgggtattaacaacatattaatagataaatcaagtaagtagttgaaatggggtggggaccttaaggtatttagtgggattttaagttagtttcttaaacctgttttttgtagggccttatgaataaagatttgtagcctcactgaaatttctattgcatgttcaagaatgggtattttgttcaaatggtgacacatttaacataaaaggttaaagagtttggaatgtcccataaaatatgtatttggaaataaaattacatatacttcttttgctgtggaatcttcttacgattttgcaaatacagcaaaagagagaactctggaagacatggtggtgccactgattcaacaagcacctaataagaaatgctttcccagtttgtagttttgtgttctgcctgactgatggaggagagtcactccatgcctgagaagaaataattccattcaagctcacaacaaccaaggaaaataattaaagacagctatagattgttttatttatgtgcatttaatttatatttattcatccattttttcccatattcaattttggggttactgtaggagaaatgaatggttattctcctttaaaacaatccatatatgatgaagaaaaagggaaggattgaaatggaggggaaaatgctcccatgtatcttacaaagtttcatttctttacaataaacgaggaaggatttttaaaactgagcttcccctagaagaggcaataaattaaatttctaattattgagtagaagctattaaacagcaaatcaagaaaatatatttgttttttagaaagaagataggctttaattttttctttattatgtttttaaattattgaaataattatcatgagaagtaaaaattcaaaactataaaatagaaaattactaatttccttcatttacaaccttttctaaatgacccattataacagttatatatctccttcctcacctttattcagattcaacttatataacctgtgggtccttttccttaatttccaaaagtgggattatactatatacataattctacaacttgcattctttttctacttaaaatatatacaaacgagcttccctgcagatccgaagacatgggtccaactcattctttatgctaaccacagtgttccacagcatgggcatgcaacttttccagccattctctttctggccaacatttgggttatttaaaattttgcaacaatgctgtagtaaacaacttgtttaaataaacattctgtatatttaagatcaggtgattttatttctataggatatagttccaaaggtagatttcctatgctaaataatatttctgattttaatagaaaaatattttacatggagtgaaagcagcataatagaaggcaaagaaaaaaatgatagaataaaataataaatttgcatagcagactcacagaatcagctgcttttcaggggaacaatgattcttgtttgccctctaaatttcaataccaatgacctatattttaagccctcattgcgaactccaagtcccacataaagtgtggtataaaagagaaccaatagatgataacaagtgttcatgagcctgtgcagaattaaaaccctcatacactgctagtgggaatataaaacactgcagtcattgtggaaaacagtccggcagtgcctcaaaaggttcaatacagagttaccatataccccagcagttcctcttctaggatatgctcaagagaaatgaagacatatgtacgcatgaaaacttgtacaggaatgttcctggaagcattctcataatagtaaaaaagatagagataactcaaatgtccattaactgatgaatggataaatgatagtgtgtccatacaatggaatattattcagccataaacaggaatggagtactgatgcatgctatgacatggaagaactttgaaaacattattctaagtgaaagaagccagtcacacaagaccacatattgtggatcttctttatttgaaatgtccaggaagggaagtagatgagtggttgcctagggctgggggtgggaggggtgaggggaaaatagaaggtagctgataattggtataaggtgtctttttagggtgataaaaatgttctaaaattaattgtgcccatagttgcagaactctgaatatactgaaaaccattaaagtgtacacttcaagtgggtgcattttgtggtatgtgagttatgtttcaataaaactgtttgtttttttaaaggaacaaacaagcaagagaccaagagagaaggagagaaagccaaatctagatattagagaaatccagacattagtgaggagagaatgccttccccgtggggtgctttcgtcatcctatgtacctctgagactagtccctcgggtagaatctgtttctcatacaagagatagtagatgtgttacccattggtgaacatcaccctgattgtggctttgaaaaatccctcactgctccaactaggttatagacaaatagaacaaatttctatgagaaaaagaacaaatagctaacccattttcccaatctccttcttttattaaagagggagctgtgctatgtgccaatctcatttgaaatatttgtccttacaccatcctttctactttgtcaaataccctcactcgttttttaaaacgtgaacctaaaaaaaatgatgcagcccacctaggttgtgtttattcagttttccttttctagattttcacatttatgagtgtcataaaacaaaaatgcctaatataatccgagctaaccttgccttttaatcacagtgaattccatcctcaggtgtactttgttcttgctacaatttattgttttggtcctgtttcaaattgtaatgggaaactcttgttggctctgctgatcaaggttaccaaaattcaatgtacaggagataaatacttattttgccagttatggccaagcagaattaatataaagaccgtaaaaggcaaagaaagaaattaaagcaatgttagaactactgcaaagaacatggcttttccaatgtaaagaaaacatggaaaatgagaataaagtattgttccttgaagccaaagctgactttacataggattgtccagggttcagcctggtcccaggggcatctcagctgccttgtcctgcctcttcccacttctctgcactgccataaagccctccccactactacaagcccagcccagcccagcccagccctcccgccctcctccacaccgcttgtcgcagtcagggagctctattctctccatcttccctgcactggtcaaaactgcagatgttttccatcagcatagtgtatcttgctaaacactgctagattgcaagaaataatcgaatagactaatttattctagtttaaggttagatctttccaggggtgtttgcattaaaataagggatcctaaaaataaaaatttcttaaccactgaggagaagtgacaacaatagaatgtgaagcactgagggaggtctggagcagggatgtttttgaataaaggcaattacttaagtaaaactcaactttggtggtggtgttgctatttgaaaatgagttgaaaatgatcctctccctactctcaaactatacacttctctgtgattattaattacgtttgtcaaggtatttattttttaagtgatttttttcatttagcccttttttgtgtgagtcacatttacataaaccatctcctaaaccaagtcaggacagccctgaaagatgaaaaaatagagtgtaaagtgacttaaacagagctagtgagtggctttaacctgagtccaactgaggccaagtttagttttctctcctaggggaaactaaaacaaactttttaattcagtaaggaaatctaacagggactcctgctatggtgcttgcatcatagcttcatttcagaagcagccctggagaattttgaatcattgtaagacattgacttcagagggaagtcgatggagggaagtatttatggagtttgggatacgtatatcaattcatagggatgatgtgttgtgtttttagttgcaaagtgaactgtgtttacatacctgggtaacaaagattacagttttctgcttccttcacctcatagattttttgcatcaagatggcaatagtgtgaaaagccaatcacttggaaattgtttcaagccacattgtagagattagaaagagagttgttactggccttttatttctcttttcatttctgaatgtgggcacctctcaaaatagaggcaaaaaacaaaggatcttatttatttttccctctttaaaaattattttgcatccttattttgaaaaatcagcatgtttgatggcaatatctacacgttttagagtcctcccgtatgttacaagtgacatataaatagcagtgggtaagctcttccacagcaattccattaactgttcatgtggacactgaccttgttcagatttacttttataagtacaatctgcagtaatgattttaacatgctaacaatactgagtctcatctcagtgagcttgcctgccttctcactgttcaacgcacaggcgctttttcctttttttctcttcttttactcttcttttgacatactttttggttcagatacgtgttcacatctctctgataagcacactttgatttgcagctaattgtagcaactgattttcattatttatgagtgtcattgtcggaatccatttggaagtctgaccgagataaagctgattccaacttctgatatgaccacagcaataaagcaattaaccacactagttaaaatgtgtggcagcctggagggtgctaatatctttacaacccaatatttactacattgtccattaggtttgatttatttccgagaagattcaacatggtatcattttatcacaaataatttataataccctctttcaaaaaatataatgtatgtttctcatatcaacctattagcattaaaatgttcacagatttaagaggtagaagtagggaaatcaaaactatgagtaatataaatgcttaatatacttaaaaggtttggttatgagatagcagcatttaaatcagtctttgtaggttactattctttacctatattttgattctgattggcacctaaatctcacactctaccatgtcaaccagagacaagaaatagaaaagctttatgtatgcatgacaagcaaacatttttctcactcttctcatccatagtagtataaaacgtgaaatttccagaataaatacaggattggaaaagtcattaataacagcagtcattttaaagtgtcacctaatttaaacacttttgctttaagttattgcagtgtcatgagttttattatgctcaatttattagtaaaggcctgcagagttcacagccatttatttttcagggaacttgattttatcattaatttttaaatacgtaatactcccactttatttttagagtgcactttatttgcaaagattggtttactctgatcaatacagatgttttcaggtgtgtagtaaagcaaaaagcctagaaagtcaaaaatgtacaaaatatgcagcaaattttttagacgttatactccaacatttaatgtgtatatacacccaccccacacacacacatatatacatacatacatacatacatacatacatacatacatacaaaatactacgtgttatgttgattgctaagtcaaggcggaaaaatataagaagaatgaccaagctcctgtttctactgtttgagtaacttattcttgaagggaaacttttctcttccaaaggagtgacatctgggtgggaaaattttattgttggggactcgagccaggacacagaaaataattctgacaatttccattgcctcacaagtctgctaaacaaaattctatcattgcactaatcctttctctgggttgagttctcatggttggggccactttacttgcccatctctctggaggtacttatgggcttaaagagttgacaaaggagctctaagttggggccccgccctcctcccataattgcgcccacttgatcctatgccgtgtgacgctactgtaaacgcctggtgctgatcgctgaaaagcctaaatgtttgagtgtttatttctgaaagacattcttaaaaaaaaaaaaaagaaaagaaactaacactgaacatatactcactagttgttatctttttttccccctaattaggacagaattttaccctaaggcagttaggagtttgtgaaccagcaactcgaagaggactggcattttgtgcggaaatggggctccctcacagaggttactctatcagtgcagggtcagatgctgatactgaaaatgaagcagtgatgtccccagagcatgccatgagactttggggcaggggggtcaaatcaggccgcagctcctgcctgtcaagtcggtccaactcagccctcaccctgacagatacggagcacgaaaacaagtccgacagtgagaatggtaagtttcctttttggctttataatgttggcattcagtgcttctgtctgttttggttgactccgcggggggggatgtttttctttctctccttcctctcatccttctttctctctctttcttgtccatttctttttgttttaatgtagtagaactcaagaaatgtccttgaataatgcattttttcctggaaaaaaaaatcaatatttgacatcagattgttaaattaggcaagcagtctacaatgttttggctatagttttgaaaaacaggttaatcatctacagaaaaaaaaaatagctttgacttctcttggaccatgtcacctgttgtcttctgtggggtggcaaagcacgtgttgataaagtttaccccagagccgtcttgcaatcaaagatgtctttgtagattcctcttgaagatatctcaaagaagttgcaaaatcttagaatggatgagtgagcacgcagaatagtttattaacagggctctagtgattgaagaacaaatatgatcatgctttaaacttaagagttgatgagagcaattgaaatcttggtaaagagggggagtgtggcctttaatgttctttggggactggattactaagcaattaaatccacacacaaaaattggattttaggatatccaaatagcagctttttgtatattgtaagaaaaaaagtctttataaattattgggactttttttttcctattgccaatgcgggatgattttttaaaagttaatttatatgcaataatacattttaaagaaaacttaatttttagtcagtgctgcttctaggaagaattggggcatcagcagcaatgcagcaaacaaaaaattctccttccgcttttaatattaacagtgcacttgctatttcagtctagttattaatgctatgcatatcctatgcatcaaaaagcaaagagaaaattaaaatgaaagaattgcatgacatttgaaaagaaaaatggttgttttatcaatgatatttcaattttattatttattgggtgactttgtcagctttgctttgtaataggaaagcggatctattgttagctttcagtttcagctaagtcacagtgtgaagcagcacctaaggcttattagttattttctttctattcatgaaaaaaggtctaatttaaaccaatgcaatcaatttcttatcctaagtagaatatcttagtgcattaaaccaaagtcaagatcaaataatagctatatactcaatatcttcatttggaagtttcagttcttggtggaggctggctttattccaattcaaaagaagaaacaaggacagttattttgataaaatgagcctcagaatcaggatgccaacatttctctcagttaatccattcacctcagtaaatcctgtgtttctatccattttcatagtggattcagaagtcactaaccttaaatacgtatgatttggaataaatattgcttcctgtccagctgtacttcacatagcactccttgagcaatggcaggtaccatggtcatattcaaaggtagcacccagcatttaattttcttaaaatacacaataaaatctttgacgttatagaagactagaatgcagcaggataatgcgatcagttctgattatctgcatcatagatcatccacatccatagctatcaaatatgttttaacattgggtcagtgtgcactttccaaacaaaccttctatggcatctcatcctttctctctaataacaaaggtgtcttgttatggtatctgtattggtaaaatataaattaattttatgatttttaaaattatacatctgctaaaaggatctcatggtggatccccaaacatatgtatttttttttctttttggaaaatataaactttgtaacctttagttaacgacacataatatccaaatgttagggagaagggaaggaagacttgtgagtttctcataccactgccctcaccattcgcatggattaatattaactagaggaggaaattgtttccccaggaatcttgtagaccttgttcttagagtgatgtaaaggcaagaaaagttgcactctttaatttctccaagtagtggctaggaagcagaatgaagagagacagggagagtgtcaagggccttgccttgaaattcagaacatttggcagcatttgttgagagtaaataggtcagccaagttaagagtataaagtgtcaaaagcaatgtttgttgagctgggcaacatgatgacttaaacttgtgtttactctttttccgaaggtttggttgtggttgtacttttaaacaacgttttgatggtctaagaattccaaatgagagcagtttaaagaaagaaacaaaagaggaaataaaatagatacgttgtcttaatgaatactggctattgcatatatttcaaacatatgtccataggaacttttcagattaatttatttgttctgaaatttcagcgattacttagaaggaacaagatttcatttaatgtaattaattacattaagatatagggaagcataattttctgaagtatttagcagaccttataattttgaattgtggaattaaacaatagcactgaggatttttttcctgatattaaaaaattatgtgtctttcccttaagctgggttatagtaagaagtgaaatttgcagtcatacataggttcttctaacaactttataaataatcgtctcaaaactaattcacatttttacctatattactacttttagtcaagtaattctaatataaagttaacaaaaataattcaattctactatcttcaggtgtttttaattgctctaacttaaaaagctatagattttctggttatattttcttttgactcttcaattcttttcattttctcttttattcatttttatactagcttgagatgtgttcttggaagttctattgtatcactaaaggttgaaaagagaaggagatggatgaaataactcaccaaaaggaaacgaatttaagagccagatgctgatgtgttttcatctggtttaacatgagagcttgccttgactgttttcttcatttgaaataactgtgaatgaggctgtttttcccagaaaaaaaaaaatgttattcaacattgtaaaattatgcaagcagagtgcctgatgttctagctacaatttcaaagaagaatttagtcactaaaagggattagattccatttatttattgataaagaggccaacagttcaagttaagaaggtgctagaactgctgtgaggctaatgaaattttgatggcccgagcctcccacaagagtaagagaacattcggaccgtgtcacacagctctctgttagctgagagtcaaaacaagtgataagatttattcttttgcaaaactaacttttcaccagccatggggagttgacattaaaaagcattttgaggaaaaaaatattttacagtatatattgagtttcctgtgtaatcccaaatattaatcttgttccaaatgaaggatatgggagaagccctttcttggcacccattgattgttgtggtggtgtttttgtagtggactgccacacaccagggcaagttctggagagacggtgatttgggatcacctactaacagcagtttgagtaaaaatgggtgaaaggttataaaatcagtgtgatgggataccccagtaaaaggtagaattctcagtgtgctctggtttattgtaggcatctctcctgtctccaatgtggtttttgttttgttttgttttgttttttgagacagtcttgctctgtcgcccaggctggagtgcagtggcgtaatctcagctcactgcaacctctgcctcctgggttcaagccattctcctgcctcagcctcctgagtagctgggattacaggtgcacaacaccacgcccagctaatttttgtatttttagtagagacggggtttcaccatgttggccaggatggtctcaatctcttgacctcgtgatctgcccgcctctgcctcccaaagtgctgggattacaggcatgagccaccgcgcccggccactgacgtgttgttaaaagagccgtgactgaagtcccaccacccagctttgcaagtgctataatctgacctcagttccaaatacctatttaaacgtcaggaacaaagggcttttttttattttttcaaaacatcagtctttaagctttaaaaatgtttccatggagagtaactcagtgtcaagagatgtgcagaaaatccaaagaagggtaaggttgcccctggtatcaaggaaataagaaccagaagtcatcaggacagtgaagatatttagcaaagaaatgtaagtgggaaaacatgtaataaagttagttttgtgatttaataaataaataaaatgtttgcgtatgcatcgcttcccagaagcagccaggcatctattgttttttgtcatccagccggtgcgacgttgtcacaggtgcctggatttggaatcacactggtcagggctcacattctttcattcatcccctgtgacagttaccccctgaatcacctagagtggcagttgtcaactcttgcatgccttgtctgctccttcagctgcctgccgagttctggaggggcggagctctcctgttggagtctagttccttcttccagcctcctcagcctgttagccctcttggagaaagatgacctttgatgtaaggcaggccagcaggcgttggcgctgctcttccacctcctcgtgactcaggaccccgagagcctccattgaggacagtctttgcgaatgtgatgcccggaggcgggactcctggttttgtatgggcactaccacctcccgactttgagaccttgggcaagttgctcaccattccgtgccatggtttccacgttgtaaaacagggacagcagtaaacagggctctagtcctatgaggtcagggctgttgtgagcattaagtgagttcaggtatgcctggtgcttacaaaactccctgacatctagtgagttccgaataagtgtgtgcccttattattatttgtaaaaggtggaaaattatatctgtttatgtggctatgaagattaagttaaataaacaatatcaagtgcctacctagtttggactaggtagatatctatagatatcaatagatatctcctcctcccctcccccactcctccttccttaccccaccccaccccagggctgcattcatcaagtgttctggcaagatggaggagaactcacggtgtcttccagaaagggcgctgatcatttgtgcagtctggaatttctgtcaccatttattgactctcttatttttctccaaaaccccacatcccttttaatttactgtaattaaatgaatgtacattgaatggtgctgataattagtctgatggttgtagacttcaaagattttagcatgctccttcccctcctggccaaagaaaatttcaaaattagtgtttccctcaaaggcatgttacttagacagctggtcaattaacaggcaatttaactgatgctcatcagttcacacaataaaataaatcattccaagaagacttcatttctcacctaagtttgagcaatgtacctgttgtcggaccccactaatgccacattaattgtgcatgatactgaagtattatgggctaatttggctaatgaaaaagggtataacattaaagtgcagtctttttaaatgtaatagacactttgcacagctgaaacacttttcaaggaaccaatttcacttgtcctttgaaatggtattttaagtctactttctgtatggagagataaagtctaaaagttgcattattgtattttaagaggaaaaaggcgtacccctcaaaccaatttgataaatgactgtagtgatagcatttccatcaatctctaaagagagaacttcagctattttgcaatccagattttcttgtcaagcagaatatgttatctggaaaggagggcagtgccatttcttctcttcctgaacaactgcagataggtgagagagtgaggaaatagacggacttgtagctcttccagtgctgatcaaattctaggagagtttgagagaaactgctagccagctatgtcatgtacttgcgatcattctaggacaacacaaatgccacatctctcctagatctttggaggaaggggtactgtcttagaattctgaagatgatttgaagagaggtgtactttttcacctcactagcattattccattccttcagctttatccaggaaccttttctgagcctactttggttgttgattgaaagacataaaatggaattctgttgctgtaagaaacacatggcatttcagtgttattctaattttatgagtttctattatacatactaaactatagcttgaatataaatttcactgtgggccctcttccggcatgtaatggtcatttctggcatggtctcctgtgataaattatattttatgttttatgtgcactagaatgtcaaaaatagcaaacgtaatatgtcggtgggcttcctaaatcaggctcagaattaaagtgctgctttacaaaatgccgtcaaatagttcctgatatataaaaataactacattgccttgatagatatacatttacaatttcaatagtgacttgtcattctttgagcaaaagcttccctgtttcatttaaggatgaaatagattcacttcatgggtatgtacaagtcactttttagtataataagttatgatttaactggctgggcgtggtggctcacgcctgtaatcccagcactttgggaggccaaggcgggtggatcacaatgtcaggagtttgagaccagcctggccaacatggtgaaaccccatctctactaaaaatacaaaaattagctgggcatggtggcagatgcctgtaatcccagctactcgggaggctgatgcagagaatggcttgaacccaggaggtggaggttgcagtgagccgagatcgtgccactgcactccagcctgggcaacaacagggatactccagctggaaaaaaaaaaaaaaagttacgatttaaataaaatcctaaaaaatttagtattatgaaactagaactgaaacaactgtaaagttcactactgttgttgttactacaggcttaagtatttatatacattcatatttttctgttctaagaggattttcagaaagcttggcagtttgctatgcttcacatggaaattgccatttctattaagctcgatttgtgttctaagtgtttttgttaaagtatacagaatatatgccatctctgtttcaattctaaatgttcttttagttgtagagttgaaattaaagtgaagcatgctatgaatgtaccaaaactgatgatgtatgctattttgatttttgaatgtgtttttgatatccttgaaaaatcacagtggtagcagtaaaattgttttaattaatgaattgaatagcagtgagtgctgaatcaggtttattgatgtaattatcactgaaatagaaaaaataagtgttagagccatagaaccttcgtttatttgccattccgtgagcactcaagtgtcggaaaagcagctaactgagggtttttttggtgttgtttaaagaatattcttctcaaatcataataattctgtttattaacattacatacacatataattttatacatgattatcttgtacattatttactgaatggtttgaatactaacttcagtatattgaaattttcttatatttatcagttgacgagatcgttttccataataaataggctgtacgcaaactaaacgtgaaacctatttgaatgcatgttaaaatggatagaaatgcgtatacacttaagaaaagagcaactaaaaatgtctgatgactattgccttgactttagtcacgcagaacctgaaaactaaataaagggtaacttattgaatagatttcttatttagtatatcaactaagtcttcattcaacgaatcataaatgctggatatggtaccaggtgctggaaaaacaaaaatgagtaagatgtattccctgacgtctagaagctcacagggtggttgggcaaaccggcaagtaggcgtgtaattaggttttaatgtggttagtgttattacaacagaatatgcagagtcagtgtcagcccagagccgattgttgccaacagagactgggggcaggagaggagagaatgtttcacaaagaaggaaggaagcagcgttggaccagaggcttaaaggatgtggagaaattcgagatttagacagaacagcaaaggagaatgtgtaacttccctggggatgctccaaaagccacaaggagtttgatgcctgggacacatgaggctacaaaagtagcccccgagcaaagtcttcatggtgatgctaagggatttgcacgttttcctgcaggtaatggggaggctctgagggattttaatgcagaggaatagtatggtcatgtttccgttttacagagtaccctgaaagcagtgtggaatattaactgtctttcctcaaggagagcaacctccctggggacatggccctgttcactgttgtacctctgtgctcacctcacctaatacctgaacctggaaataaaggttttgttgaatggaaaataattgacttagaggtcaaacttggaagcaaattggccagttagatagtattataattatcaacataggaaaatagaaaagtttggatcaaaaaccagaaaggaaagggagacccatttaagtagaatcaagatttgatgattaattgggggaagagaaacatttaaagagactgtcttccccaacatgagagactcagtgagtgatggtataatccaagttgaaagttaaagtattttgtctatggtaaagttagtaattcacatgagaagacatagtgtttgatgtgtctgtgggccatcaagtttcagtaatttattagccaattatatatatattatatatatatatatgaaattcaattagattttgtgtaaaaatatttactctgtgatctatattattgcagttaaagccacagggcagaattaaacctctttctgaaagcaaatagaatgagaaaagaagaggagtgaagctagaatcctaagctcaccaatatttaacataaggttatagatgaagcaccaataaaagaaacgaaggaccttttatagaggcaaaaaaaacccaaaagattaattgacaaaagacaacaaaagagacatactgtgatcagcagagtcaaaaacttccaaaagttgctgggtacagcaatacccgtgtctgtagtcccggcactcagaaaggaggctgaggtgagaggatggcttgagcccagaagttagagaccagcctgggaaacatagtgagaccccatctcagagaaaaagcttccagtgaggataatgtaggtatagtgggtgtggaagtcaaatcgtggtagttcagagtggaaccaaaaccttaaatgtggcaccagcaactggagattattctctccaaagctcaactaaggaaggagagagcgtggctgagggatccagggatggaggtacttgcataattggaggacatttcagcatcttcttaaggaaagggacggagcggcagaacaacaagaaggtggagtagaggcgattgagggaaaatgaaaagcgtctgacctctgagaatcaggagtgaaggggtccttggagtatgaatgtgggtaactgcgagtccctgaaaactttttttttaaatatatttttaaaattattatttttttattattattatactttaagttttagggtacatgtgcacaatgtgcaggttagctacatatgtatacatgtgccatgctggtgtgctgcacccactaactcgtcatctagcattaggtatatctcccaatgctctccctcctccctccccccaccccacaacagtccccagagtgtgatgttccccttcctgtgtccatgtgttctcattgttcaattctcacctatgagtgagaatatgcggtgtttggttttttgttcttgcaatagtttactgagaataatgatttccaatttcatccatgtccctacaaagcacatgaactcatcattttttatgactgcatagtattccatggtgtatatgtgccatattttcttaatccagtctatcgttgttggacatttgggttggttccaagtctttgctattgtgaacagtgcctcaataaacatacgtgtgcatgtgtctttatagcagcatgatttatagtcctttgggtatatacccagtaatgggatggctgggtcaaatggtatttctagttctagatccctgaggaatcgccacactgacttccacaatggttgaactagtttacagtcccaccaacaatgtaaaagtgttcctatttctccacatcctctccagcacctgttgtttcctgactttttaatgattgccattctaactggtgtgagatgacatctcactgtggttttgatttgcatttctctgatggccagtgatggtggcattttttcatgtgttttttggctgcataaatgtcttcttttgagaagtgtctgttcatgtccttcgcccactttttgatggggttgtttgtttttttcttgtgaatttgtttgagttcattgtagattctggatattagccctttgtcagatgagtaggttgcgaaacttttctcccattttgtgggttgcctgttcactctgatggtagtttcttttgctgtgcagaagctctttagtttaattagatcccatttgtcaattttggcttttgttgccattgcttttggtgttttagacatgaagtccttgcccatgcctatgtcctgaatggtaatgcctaggttttcttctagggtttttatggttttaagtctaacatttaagtctttaatccatcttgaattgatttttgtataaggtgtaaggaagggatccagtttcagctttctacatatggctagccagttttcccagcaccatttattaaatagggaatcctttccccattgctcgtttttctcaggtttgtcaaagatcagatagttgtagatatgcggcgttatttctgagggctctgttctgttccattgatctatatctctgttttggtaccagtaccatgctgttttggttactgtaggcttgtagtagagtttgaagtcaggtagcgtgatgcctccagctttgttcttttggcttaggattgacttggcgatgcgggctcttttttggttccatatgaactttaaagtagttttttccaattctgtgaagaaagtcattggtagcttgatggggatggcattgaatcgataaattaccttgggcagtatggccattttcacgatattgattcttcctacccatgagcatggaatgttcttccatttgtttgtatcctcttttatttcattgagcagtggtttgtagttctccttgaagaggtccttcacatcccttgtaaggtggattcctaggtattttattctctttgaaacaattgtgaatgggagttccctcatgatttggctctctgtttgtctgttatcggtgtataagaatgcttgtgatttttgtagattgattttgtatcctgagactttgctgaggttgcttatcagcttaaggagattttgggctgagacaatggggttttctagatatacaatcatgtcgtctgcaaacagggacaatttgacttcctcttttcctaattgaataccctttatttccttctcctgcctaattgccctggccagaacttccaacactatgttgaataggagtggtgagagagggcatccctgtcttgtgccagttttcaaagggaatgcttccagtttttgcccattcagtatgatattggctgtgggtttgtcatagatagctcttattattttgagatacgtcccatcaatacctaatttattaagagtttttagcgtgaagggttgttgaattttgtcaaaggcctttcctgcatctattgagataatcatgtggtttttgtctttggttctgtttatatgctggattacatttattgatttgcatatattgaaccagccttgcaccccagggatgaagcccacttgatcatggtggataagctttttgatgtgctgctggattcggtttgccggtattttattgaggatttttgcatcaatgttcatcaaggatattggtctaaacttctcttttttggttgtgtctctgcccggctttggtatcgggatgatgctggcctcataaaatgagttagggaggattctctctttttctattgattcgaatagtttcagaaggaatggtaccagttcctccttgcacctctgggagaattcggctgtgaatccatctggtcctggactctttttggttggtaagctattgattattgccacaatttcagctcctgttattggtctattcagagattcaacttcttcctggtttagtctagggagagtgtatgtgtcgaggaatttatccattttttctagattttctagtttatttgcgtagaggtgtttgtagtattctctgatggtagtttgtatttctgtgggatcggtggtgatatcccctttatcattttttattgcatctatttgattcttctctctttttttctttattagtcttgctagcagtctatcaattttgttgattgtttcaaaaaaccagctcctggattcattaattttttgaagggttttttgtgtctctgtttccttcagttctgctctgattttagttatttcttgccttctgctagcttttgaatgtgtttggctcttacttttctagttcttttaattgtgatgttagggtgtcgattttggatctttcctgctttctcttgtgggcatttagtgctataaatttccctctacacactgctttgaatgcgtcccagagattctggtatgttgtgtctttgttctcgttggtttcaaagaacatctttatttctgccttcatttcgttatgtacccaatagtcattcaggagcaagttgttcagtttccatggagttgagcggttttgagtgagtttcttaatcctgagttctagtttgattgcactgtggtctgagagatagtttgttataatttgtgttcttttacatttgctgaggagagctttacttccaactatgtggtcaattttggaataggtgtggtgtggtgctgaaaaaaatgtatattctgttgatttggggtggagagttctgtagatgtctattaggtccgcttggtgcagagctgagttcaattcctgggtatccttgttgactttctgtctcgttgatctgtctaatgttgacagtggggtgttaaagtctcccattattaatgtgtgggagtctaagtctctttgtaggtcactcaggacttgctttatgaatctgggtgctcctgtgttgggtgcatatatatttaggagagttagctcttcttgttgaattgatccctttaccattatgtaatggccttctttgtctcttttgatctttgttggtttaaagtctgttttatcagagactaggattgcaacccctgcctttttttcttttccatttgcttggtaggtcttcctccatccttttattttgaggctatgtgtgtctctgcatgtgagatgggtttcctgaatacaacacactgatgggtcttgactctttatccaatttgccagtctgtgtcttttaattggagcatttagtccatttacatttaaagttaatattgttatgtgtgaatttgaacctgtcattatgatgttagctggttattttgctcgttagttgatgcagtttcatcctagtctcgatggcctttacattttggcatgattttgcagtggctggtactagttgttcctttccatgtgtagtgcttccttcaggagctcttttagggcaggcctggtggtgacaaaatctcttagcatttgcttgtctgtaaagtattctatttctccttcacttatgaagcttagtttggctggatatgaaattctgggttgaaaattcttttctttaagaatgtttaatattggctcccattctcttctggcttgtagagtttctgccgagagatccgctgttagtctgatgggcttccctttgtgggtaacccgacctttctctctggctgcccttaacattttttccttcatttcaactttggtgaatctgacaattatgtgtcttggagttgctcttctcgaggagtatctttgtggcgttctctgtatttcctgaatctgaatgttcctgccttgctagattggggaagttctcctggataatgtcctgcagagtgttttccaacttggttccattctccccgtcactttcaggtacaccaatcagatgtagatttggtcttttcacatagtcccatatttcttggaggctttgttcgtttctctttattcttttttctctaaacttcccttcttgcttcatttcattcatttcatcttctatccctgataccctttcttccagttgatcgcatcggctcctgaggcttctgcattcttcacgtagttctcgagccttggctttcagctccatcagctcctttaagcacttctctgtattggttattctagttatacattcgtctaaatttttttcaaagtttttaacttctttacctttggtttgaatttcctcctgtagctcgtagtttgatcgtctgaagccttcttctctcaactcgtcaaagtcattctccgtccagctttgttccattgctggtgaggaactgcgttcctttggaggaggagaggtgctctgctttttagagtttccagtttttctgctctgttttttccccgtctttgtggttttatctacttttggtctttgatgatggtgatgtacagatgggtttttggtgtggatgtcctttctgtttgatagctttccttctgacagacaggaccctcagctgcaggtctgttggagtttgctagaggtccactccagaccctgtttgcctgggtatcagcagcggtgtctgcagaacagtggtttttcgtgaaccgcgaaagctgctgtctgatagttcctctggaagttttgtctcagaggagtacccggccgtttgaggtgttagtctgcccctactggggggtgcctcccagttaggctgctcgggggtcaggggtcagggacccacttgaggaggcagtctgcccgttctcagatctccagctgcatgctgggagaaccactgctctcttcaaagctgtcagacagggacatttaagtctgcagaggttactgctgtctttttgtttgtctgtgccctgcacccagaggtggagcctacagaggcaggcaggcctccttgagctgtggtgggctctacccagttggagagcttcccggctgctttgtttacctaagcaagcctgggcaatggtggtcgcccctcccccagcctcactgccaccttgcagtttgatctcagactgctgtgctagcaatcagcgagactccatgggtgtaggaccctccgagccatgtgcgggatataatctcctggtgcgccgtttttttaagcccgtcggaaaagctcagtactcgggtgggagtgacccgattttccaggtgccgtctgtcacccctttctttgcctaggaaagggaactccatgaccccttgcacttcccgagtgaggcaatgcctcgccctgcttcggctcgcacacggtgcacgcacccactgacctgcgcccactgtctggcactccctagtgagatgaacctggtacctcagatggaaatgcagaaatcacccgtcttctgcatcgcttacgctgggagctgtagaccggagctgttcctattcggccatcttggctcctccctgaaaaacttttattttttaaggtacttttcatctcacaactttatatacataattaatttggtgtttgctatagaaaagtttttctgaaaaagatacctttctgtctaagattgattgaaatcataaccaattttaagtcagtgtagtataaattgataatatttgatggaactgagcgaccatgtcatcagaagctttggaggagcagtacattcttatccaaaattgacattttacttaaaatccttctataaaactgtgaaactggaattacacatccagattctaatggaaaacagttattagctttggagccagaactataggattgctgtcaggactagtccagggacataggtaacttctgatttcctctccttgatccttgatgtgagtatgtgatatttatatatattcatatagatgtgtgtgtatatatatatgagtgtgtgtacatattcatatatgtgtgtatgtatgtgtatatattgatatatgtgtgtatatatatgaatatgtatatgtatatattcatatatgtacatatatacatatatatgcatgtttatagtctttgcctgaggactaagttaatagctaggaaataagtttcctccttagtaactgccacatagttttgcactagcaatgttcttttgcttaaaaaaaaatgcatgtttataaacataaaattatataatcagatttaagtttttaatgaacactcgagacaaacattattttaaagaatatgtatacaaaaggtaaccataaaacctacttacaagtgatatatccaagagaaatagaaataggcctttaaaagccagagtgatagttattatttgcatattgcaaacttggaaagttatgactttgtgaaaaaatttttaagactaaactggctaatataaagtaatcagtgtgaagtatggttccccttccaactggttaatataggagtgttaatgttcacaaagaaagaacttaaaattttagcatacagcagatgaagattcctaggggatttgaaagtagttgaatgaaatatcagttgctacagaaaacaagtacaaaatattttcttgtaatggactgtgtctcatttattgtgactggagtaccattgtatagatggcagagtacaaaatatgcctataggtgaaccaaattatttaaatgaacccatttaaagagtttgtgctttcacataatcactggaatttttaaagcatctaatcattatttgtaatgtactgtcttaataccccaagtaaaatgatgggatacgacagatgtgataaaagtggaacctgagatcaaatgaacttaagaataaatcatttgagtgtttaaatcaatgcccttaagttatctatgatgtgatttaggatttcatgtttattgggcaacacagataagcagatggataataaacactagtttctcttttaggatttacacttttattcttaatctttgtgtgtgtatatttttaaaaaaataaacattgcaacttcagttgttttttgttttttgttttttgtttttgtttttttgagacggagtctcactctgtcacccaggctggaatgcagtggcgcgatctcggctcactgcaagctccgtcttccgggttcacgccattctcctgcctcagcctcccgagtagctgggactacgggcgcccaccaccacgcccggctaattttttgtattttgtttagtagagacggggtttcaccgtgtcagccaggatggtctcaacctcctgacctcgtgatccgctcgtctcggcctcccatagtgctggggttacaggcgtgagccaccgcgcccagccccaacttcagttttcacctaagtttccacatgctattggatttttttctataacatagtacttttttcatgccatgatttatcataatttaacatatctactactgttggacatccaggtttgaactttcgctactataagtgattctgcaataatgatctcagtggctaaatctttgcctctaattctgttattaccttaggataaattcttggaagtggaatttcagagccaaagggctatacaacctaaggcttttgatacactctgtcaaaagtgtgaaaaagcttgtatcaatttatactcccaacagtatacaaaagtgccttttcccccagggcactgacagggagtgtttccatgctttaaatttttgacaattggaccgatgaaacgtgtcttacctttgttgtaatttgtattcgtttgattagtgagttgaatacattttcacatgtatgtaccatttgtatttcttcttttgtgaattgccagttcttgcctctgtcccttattctgtgtggatgtatgaagaaatgggtcactcagggtataaggaaaactgaaggcagagatggacttcgaggacaccagcacagtgactctgctttttctcccttgtgtatatgtggcctcgatgagacaggtttggttgcaggaccttttgtatataaacatctccttacaagtgggccttctgctcatagacataggtgtaagtttcacaatggtgaagaacaggtgtacgtgagctggggcacaggcccaatgtgtggtcctaaagtctagctggatgccgcctgtacactttttactacagattctaggtgccaagaagttctgcatttactgcagttcagagtagcaagttcatttccacaaagtttctgtatccttattgagtaaatgaaaaacataaagcaggcgataaatagcactgggaggtaaatctcttttcatcaatccatagagtgttgcaaaagatgcaggagatacatagggatatagatacagtcctgtgccacttaactcatacgttcagagaaatgcatcgttggacaattttgtcattgtgtgaacatcatggtgtacctacacaaacatagagggtatagcccactatatctaggctacatggtatagcctgttgctcctaggctacaaatctgtacagcctgttactgtacagaataccgcaggcattcataacacaatggtatttgtgtatctacacctagaaaagatacaataaaagcatggtagtataatcttatggggctactgtcatatatgtggttcatcattgatcaaaacattattgtgtggtgtgtgactgtagagatatagatacagatatagataattatggacatggatttttttcttattaagttgcaaatagtttttatatattatgaatcttattaacccttaatctatttgtaaatatttagatcttaatattctgcaaatattttcctgtttgactttgtttaaggtatttttgatataaaggattttttttacaaactttaaaatataatcaaatcaatagcattatttacttgtggcctctcatgcttaaaaatactgatttcactctagagcaaatactaattatattttttctttatttatatgtacaaatataattatattttttcctcatttatatgtctacatccttacttaagtacatttactatatattatatagattacatttaattcatctgaattttgtaatgtaatagttgaagtaggaatttaatattttttcacattatccacttttgtaaatgtcatttaaattaactaggggatacttcatatcgtctaataaatatacgctaatctacttatatttcagcaatgagacatcaataaaaatttgtgcagtcaaatctttgcaaagaagtgggataggatttgtgaaatataataggtttaaatactaaattcagatttgatgatttctgatagacttagaatgctaactaaaaataaatattttcagaaatacacagccactaggagtgtaatgtgtaacctttagacactgtaaaaaaaatgtaatagtggaaaagcagacttaaagaagcttatggaagttacatttgatgtcagaagcagttatcaagatctatttttcagtaaaaataaagtgttaatcctgcagaaagtcaggttacataagcacataagcataacatttaatccctatattacgtattttgagagttcgttttaaggaataaaagacatcctttgctgtcaagcttataggcttgtaatattgggctttacaacagggaaacaatcggaagacaaaacaactagatgaaatacattgctaaactgcactttgaaaagagaaaagcaatgaggattcagaaaagaaaagactttacagaatttacaggttgagcaggacttcgaaagatggtaaaatctgttttaagtgtagcaggacagcagtacgtacttatagttggaaccgctccaggaagtagtggaagcaacaagggaaaacagtggtagcattgtaaggaggccacccgatctggagagatcctcttgggaaaccatggaagttaacattgacggtaaagtggaatccacttaggcggaactgtgaacgttgtgccaagaggtctaagactgtctctgtgggtagtgtctggccagtctaggtcctagagcagaactgagacgcgatgaacaatgaatggactatattacgatgagcttggaattgatgagtcaagatccactacgaaataagaaggcgtcacatcgtgaatagagtagaaggaacaagtggtagcagtgttgacagggctctgtaatgtgagagaagaagagtgaaaagccaaaatgactccaggcttttgggtgcagaacctggagaaatgttcctgtaatagagagaggaaaaaaggaaaagccatagaaagatagttaaaatagactgtcatctgcacaattacataaagtcatattgcaggagagttgagactgaagtttgtgaaatagtagatagtatataaaagtgttatcaaaactcaaaaatacatgtggatttaaaggaaaacataatggttttagagaataaggtggacagtgaacaatagcagatcaagttcaggatcaaaagatggaaggatggaaaagttatttttccatctttcataagtcatttcttagaacaggtcattcagtgaccactcggtatctaataaaaatactacatcatactagcctagttaactttcatatacctgtactccaataccagctaaggtgcactaatttgctgctagagtaagaccctagcgattgaatagcagagtctgagaatattttatcccatgcattttagttacttcctgcaaatctcaaaacaatcacaacataaaatagatttcctgtactcttgactttgtatttatcttcaccacagccgtaatgagggttttgcagctgatatactttccatgggaacctcctgagaacacgagcatcagaggcaggatggtgcaaggaagtaggctgtaggattatgatagtaaaccgtattcccctccacctttgagtctcaatcctgagtaagattttaaatcaagttggttgagttttgtagacagcttgttaaagacacagcagatgtcctgaccagtgggcccttttatcctgtaaagacaggctaagaatccagtagtttttattgtcgacctttgcatcttcagggttcccatgttagttccttactaacttagtttctaactaacttccttagttgctaataccattagcagattgagggctgttaccattttgtctccaaacagcaaaaggtgagtgtggaggatcagaagggagcataggctatatagtgtagccttaaaatgttgtcatagtttcacctgtctgctcccaaattgatctctaaaagggataaaaaccgatgtaaagggatctatttggaggtgaaggtttgttctttaaaggataagaatattgcccacgtatatacccacgagtcctggtttcttcccccagattgcaagtagcttgtacggcatgtgcagcccatctgtagttgacagctgtcaggcaagattctcttcagaagcatcagagaggagagagtgtctgttgaccctttccatgagatgcatttcttctcctatttcgatcatatgttttccctcacaaaaatcctcttactccaaccaatgctggttctgcgattcaaacatcgttccctcatgaaacactttgtgttcgctccaaaatcctttgccctcccccacattaaatgtcattactatccagaagcattttgaaaacagccatttgtaacagtgacctttccaatgataattgctaaggattttggatgtgaatgttgttgttactgttcttcagaaaaaccagtatatgaaaatctaaatggcagagaagttgatggaggcagagatagatatttggactttactcaacacttattatgtttaatcttttcaactaccctctgagattagtagtattatctgtgttttacagaggaaagaaaactaaggcttagaaagaatctaaataccctgctaaggtcacacagatactgagtgacaaagccagcagttaaagccacagcctaattctaaaacccgctgagtaaacttcctgttcttgggtggaatctattggcatccagacagtagtagactgtaggtcctcagattacgtgctttgcaatgagaaggaaagagctttttcaacttaaatgtcctcactgtctccaagagcttctgcgcagttgaattcatttcctactttttagtttaagatgtaatcctgctatattaaaagtttctggccaggtgtagtggctcatgcctgtaatcccagcactttgggaggctgaggcaggccgatcacctgaggtcaggagctcgagaccagcttggtcaacatggtgaaattccatctctattaaaaaacaaaaaattagctgggcgtggtggcaggtgcctgtagtttcagctactcgggaggctgaggcaggggaattgctcgaacccgggaggcggttgcagggagccaagatcacgccactgcactccagcccacgtgacagagtgaaactctgtctcaaaaaaagaaagaaggaaagaaagaaaagtttcataggcacagtggtaagggcatttgatgagaagataagagatctggtttcttattctggttctatcattaatttgttgttttaccttaggcagttcacctggtgtcactgggtttgagtttcttcaaattctgccttcttattaaataattttaatgtgcattgttttatctttgattaagactacaaagctaattttgcaaagttttttcttgaggatttctctcaagggaggaaagtcatgttgggtcaggataggtctaacaaagtgaagatgcaaagcataaaaatccaggaaaccacctgaagtggtaagaaaagttagatttaagatttattttttgcatccatcaaacataacccaagtttccgttgggtcttgtgtgtctgttgtaagtatcatgtctatgacaaatagaacttaaactaatacagcataccctatcgcctacagagctattcttttattttgttttgactggtagtggtattcaggaagaaattttttgatgaataccttaccatacctagcaagcaggtcctatatttaatagattaatacaaaaataactgacattacctgaatattttaatcaacctttttaaaagataagtcggttttaacaaaaaagagacaataacatttcccctttctctttcacatacttttcaaagagaacaacgtggtgtggtacttactgttttgcttaaccatggtcctgatttctaaacatgagtcattcctaccccaggttttcccaagtattgttatctgtgtctttcttgagatactacaggctcttaaaacgcaatctggagcagttcattatttcactgtgagaatattcatgcgattatctgcatgtttctagaagtgatctctgcaaaacaattctgctttctgttgctaaaggacctgccaaatagttgaatatcttaatcataagtctgctctggaccttgagagacattagttttattttctgtaaggaagcctcgagagacaaactcaactaggtatcatggtttttctgaatttgcctgtgtttgtgtttaattaaatttttttttcctgcttttgtcctaagttcttaatatgaagttgagacgttttggtcttcagtttcatggcatacttcttttcacatttgagaagcaagactgttatcctttctttctcaaaactaattagaccaatattcattccttgagaaattgttcctaccttttagccctagtcattttcattattcactgagctttttcccagtttatcatgactccttcgtttctgagggcctcaaaaattctcctccccatcacacacacacacacacacacacacacacacagactttcttatgttttaatgcactgttgatgttggtacccagcatctttttgcctttttaatgataataacaccctatttctgttcaaagttatttttgttgtctaaaatgtgtatcaacgctatgttaaaaaccgtggtgtctgccctcaaatatgtcttcaatgggtaaatctgttctgtgacccttttcttcaatctgacctaagcctcaccatgatgtttctgaaaccactgaaaatatccacaacgtgttacctttctcttctcctacttcttggtaaatttctgtgtaatttccagctttggatttctctagagttttccataaaattcttatttcctggatcaccatggatgactagattaggattttctgatcattctcttcccacatcctctagtcttaccaatcgaatgcaatcgcacggtcttgtctcgtttcctatcctgcttctaattatcagaccctctccctcccgtcccctctcatttcatcattttaaatttcctcataactgaggcattcaaatacatgtttctttcaacttgcagttcttaatagaccaggatgagcaataaatatctatttgaagtcctgacttagtagcttttcaaatgttatttcccacaccctaaaagtcgatgcaactttaaagagatctaggtttgaaagagaatacaatatgtgagttaatgaaaggctgttccacgaacctgatatttcagtttatatctgttttaaaaatataccttagaatatcttattgtagtttgcagcttaaggtgttatatagataaattatgcaaactctcattaacaaaaataacttgctatacattgcaaatatacttccagttagaagacagctgttggggaatagaatggtagctctcttttagtagcctactttttttcctagcaggcacaaatcattaggaataaattgtcttctgtcattgtagccagtaattggtgacattttcttgtcactatgggattataaataacagcaatatatgtactgtcaacagattcattatgttatgaaaaacataaaccagtagtctgtgtcttttagctatagtttgcatgttttccgtattaagtatgacactgacatctttacaaattaaaaaaatactcgacagtgcagttttgttactaataacttcaaattttttaagctttaaatatatcataattccttctatttcttccatagttcttctggaaaatatattcttccaagatttctttgtttgcaaacaagattgtaagcatttgtgatgcatcttagcggagctcaagttataagagtaatgataaataccttgtcctcaaaattttagtttacatagtaaatagtggtcacctgtcccatgctgaacaaaaaaaaaataatccatccagaaggaaaattaacatggactaaatgttataattacttgcttcattgataattttgacagattaataattttcttttttgagtctcgctctgtcactcaagctggagtccagtgggatgatcttggctcactgcagcctctgcctcccaggctcaactgatcctcccacctcagcctcctgagtagctgggactataggcacgtgccaccacacctggttattttatttatttatttatttttttgggtagagatgaggtttcaccaggttgctcaggctggtctcaaactcccgaactcaagcaaattgcctgcctcggcctcccaaagtgctgagattacaggcgtgagccaccacaccaggcctattgataattattaagttagatattattttctaatttgagtgtcctggcaatggtatatacctgtcacctctttgacctcccgataaagaagggcaacatctcactttcagtagctgccattgctttgcagagaagaagttttatttttctttgcctttgcaaaattaagacagaaaagactctgctggttatggagagtgcatggaaagcaagctggctgcagcgttcatgtgacccctatcttcctagacaagtttgtcagcctctgagtgagtctgttttgccttgctatcaaggaagtacctgaggctgggtaatttataacgaaagaggtttatttggctcacagttctgcagactacacaagaagcatggcgccaacatctacttctggtgagggcttcaggaagcttttactcgtggaggacggaaggggagttgaagtgtcacatggcaagagcaggagcaagagaaaggaggaggtactgggctctttttgacaaccagctcctgcatgaactaatagggtgagaactcactcatcaccaaggtgatgtcaccaagccattcatgagggacccccctcataatccagacacctcccacacggctccacctccaacattgggtgtcatatttcaacatgagatttaaaggggacaaatatccgaactatatcagcctctgaaccaagacttgaagggcataatttcttgcctgttccctagagtcatttttgggagccccctactaaggggaattgtgactttcctatcgaggagatgccttctaaacttctctgtttctctcttaacagctatacaacatttaaagacttcaaaattttggattcccctactttgtgaaaatactgttatccaagttttctttacctcgtttcttatttattcactcaacaaacacagccaaggcattgtttctgactcttcagggactacaaagctgaaaaacaagacctaccagtgtgtatagtatatatatatatatgtatatttagaagtaactctaacgggagctacagtcacgtgtgagtttcacacgtctttactcacatgctttgtgtcttactatttctgtattaatttttcattattctgggcagtccatcattcagatatccctttcttcatctaaaagttagtcctctaataaagcattttgctactgaaagaggcaccacagtctttttggttttatagactaaatctgagctgtatttgaatttcaatcctgctgtttttttcttggccacttcgttgatatcccttctatttaaaataatgctatctaaagcagcaatataaattgtacactaaacatattctctctctttcataatggaaaattgtaaaataagtttttaaaatataaaccactataacatttttgagacattatgaaatcacatgatgagttgtgttatatatttttcatcatggcactcaaaacagtttgccaaagtggagctcaagtttctattttttcttcccacttaccatttccaaatcacttccaaaatttcaagttcattagccttgtctttcttccctacatgatatctttccattgccatgtacttccatccaattcaaacgatttatttcaaaactttttttagtcctgagtatataggaggtgtatatattacttcttcaaatttcttcctgtcttttgtccttttcttacatctagaaaatttttcccccaattctcttgatcttggcttcataaaacgtctttgcaccagtgaagacaggacagaagttgcatcaaccttctcaggaaaacttaaattctctaagcttatcttccccgttatctaaacaccaaataatcttatttttccattctttccttgcaattcctgtgaagacattgtaatggagtcttctttattatttgccatattgtgaataaaccatgagttttcttgcctctctgcctttgatcataccaccaacaatctgcaataccctcttagccactctttgcagatcaaaatccttccaatctttcaaggctcaacttaagtatctcttccttttagtcatcctaataacaaagggcagtgagctgtccagcctctaaatttcccagatgtttactctctctaatgcttcatgacatttagcatttactaccttattttgaagttatctgtttacctgtcttattttcctatactagatcataagtatcaagaaaaggggaattaggcttctaagtccattccttggattgtgtagcaataaagccacaccccaaatagatgcctggttaaatgttttcaacagcggaatgaacgaaatgtccatggaactaggcacaatgtcacaaaatgctgggaggaattcagagagaaacttagtcttaggcagagaaaggtttttattttcctagtggaaaaacaggtatttgtattctctgaccttttgtaaaaatattttttaaggagttgcgtgttgtggatggtttttatttttatttttttatttttgagacagagtcttactctgttgctcaggctggagtgcagtggcgcagtctcggctcactgcagcctacacctcccaggttctagcagttctcctgcctccgcctcctgggcagctgggattacaggcacaggccaccacacctggctaatttttttgtatttttggtagagatgagatttcaccatgttggccaggctggtctcaaactcctgacctcaggtgatccacctgcctcagcctcccaaagtgctggggttacaagtgtgagccaccgcgcccggctgggaaccgcatgttgtgggtgctttttaaaacaacatttgtaaaagggataatgaatgcactgacttccatgacatagtgttttaattagaattcagaccatttgtgcaccccttatgatagtttcttcttatttgcattcactagatttcctttcctaaatgatttatacacttgcataactggaaattttaaacattaaatttattgcatcttgtcattatgtattaaaattattttcctaatcttgagtactcgaattcgtcatatgttcttatacacataatttatgttaagaattgcttcagcaacatttgcgctgtcatttggcacgcttttggaatcaatattgtagaatactgtaaggggaaaaaataattctaacagttctcccctgtgttcccattaatttgtttattatccaggtcttcattagtaatatagttgctaatgtaagcccataataaacagagtataattgaattttcaatattttgtcacctgggagtaattttcttccaagacctctgctccatcttgtgactaattgtcgacagttactcagtgccaccacattaatgtcatctagcattgcaaaaatatctacctgactgcattatatttaaagatattcattccaagcccttgatattttctttttaaattatttacctcaagtttaaatatcatttaaaatgcaataaatgtaatgagccaacatgttgtgaaaatacagatttagacatcagctaagatttgtttgggtagaagataaagacagtcatgttgggtgtcaccaagcattggagcagcaacgtggcagaggagggaggtggctgaaccggagtcagtgtacagaaaccagagcgatggccattggacccattttttttttttccctgaattggggttgtttctggtcaaattactttttttttcctgtgagttttacctgggttgaatcagatgttatcttgatattacattatgctgaataatgttctaaaagtgtattatcaaaaataagtgaagacaataacaattgaaaatgctagacacaggcagattgattgaaaaatacaaaaatctttgtttttgttggcactgtgtagtcagaatcaagcttttcacaaattcagaacacaaaatagcaaccccggaatactccaggtttatgtctgttgtcccagtgtaatccgtccgcactgtctccttccactcttaaacatgtcttggtttggtcattaagttaaatggtcagctaaccgacaacacatttttagtttagtacctcctctatttcccagacagcttgctaatgacccatatagtaaaattaaaacaactgtgttctgattcaggaatcctacacttgacctaatttgcaaaacttttcaaactctctttgttcaacaatcaaattttgattctgcgtataggcacataaagccacattttgtatttatttattcatttatttatttattttgagacagagtcttgctctgtcacccaggctggaatgcagtagctcaatctcggctcactgcaacctccacctcctgggttcaagcgattctcgtgcctcagccttgcgaatagctggtattataggcatccaccactaggccaggctaatttttgtatttttagtagagatgaggtttcaccatgttgcccagactggtcttgaactcctgacctcaggtgatccacccgccttggcctcccaaagtgctgggattataggcatgagccaccacgcccggctccacaattattccttaatccagatattgtcattgcttgtttctgatacactatatataaagtcatatatgtaaaacaaatcatgtatatagatcatgatattgtttatatgatttttaaattttcattaggaatacagtttcccaaagagaattattcacattatgggaaagcaagagagcctggtgatgctagcacgttatcctagactctgtgggtactctcttagtatatcacaacagcaaagtttgagtgaatgtcttattgtgtgatcatagagaagcaaatctctgtaggtgagtgaaatagagcaaatgtggtagaatgaaaaactgcgatttcggatggcatgctcacttcagttcaagcagacattgatggatgtccacgatgctcactgtgctaggtcatgtggaggatacggagggaaggcagttcgcttgcaaggactgcagtttggaagtggaagtgggattgggagtagctgctccctttcactgagcactcccagtctgtgcagattttgttctcggcttcttaaaggcagtgagctcgggtaagtgtgattcctattttataaataaggaaaccaacatacagagagatttatccctttgtctttcttgagcatctgcatgtgctgttgtgcagacgactggggatatggtgatgaaccaaacagacaggttccctgtccttatgggagcttacaagtctagagggaaagacagacctcgcacaagtgaaccacaaaaatatgtacgcacactgcatacaaagaatggagctggcttctgtgagagggggtattcagaatgtaggagagggagacttctttggaccaggtggccagggaagtcatctctgaaaaagtgacaggtttaaagctgagacttgaggggacagaacgaacaagttagataacatagcaggagagattccagatggaaggaaagcatcgcaaagaccccaggagtgcaagagctaatgggagcgctggagaaactgaaaacaggcctcggaagggtcacccagcggtcacggaggacagtggcataactcatgaaataaggttgcagaggaaagtcgggttttgcagagtttggatttgaaaagattttgaatttttaaaagattattttggattgcagaagtgttttttctcccaaaattgcaataggaagccatgaaagggttttgaacagggagagacatgatccaacttgcctaagaacctggagctaaaaattcagagagctagaactgaactcaggccagtctaacttcagagctcagctccacattctaaaaccgtttcccttgagactctacaaataactgggtacgtggcagaaggtgcgtaccgtggccagtatgcacaggcattgggtagttctaagcgggaagatcgagcatcggatttggactttcataaaaactcgaggagatggcaccagtctggagactagaagcgtgttgcaagggccaggcttggtggctcacgcctgtaatcccagcactttgggaggccggggcgggcggatcagcctgtccaacatggtgaaaccccgtctgtcctaaaagaaatacaaaaattagccgggcgtggtagtgggctcctgtaatcccagctactcgggaggctgaggcaggagaatcacttgaacccggggagtggaggttgcagtgagccgagattctgccactgcactccagcctgggcaatagagcgagactccgtctaagaaagaaaaaagggtattgcaagaaacaggaagagcataaaaatggggcagggaaaagggactgttttgaggggaaagtgagcagtccaagtccccacagtgtatcccacccatagtgtgttactagaaaattgtaaaggtaggttaaagactgaacggggcttttcatgctcgtctgagacattgtatataatgcagtaactagtgaagagtcactgaagatgtctgaggaggagaatgacttgaacagagatacacttttaaaactctttttaatctgagggtgtggatgtaccattaaggaagggaggctgcatgaaggagagatctgtaagacatttgtacagcctgcgagtatgatggcagagtccagccctgagccaggccgtctggccccatgttccaggtccaccgctcactagctctggggccttagacagttttctgcatctcttggtatttccatttcctcgtcaatcaagggggttaaatgagagaatctacttcacagggttattgagcagagataactttattgatcaagtatttaccagacctcttggtgtacattagtacacaaggcaggctagctatttcaacaacaacaacaacaacaaaagactagtgcaggatgggcgcagtggctcacccctgtaatcccagcactttgggaggccaaggcgggcggatcacctgaggtcaggagttcgagaccagcctggacaacatgacgaaaccctgtctctactaaaaatacaaaaaaattaggcgggcctggtggcaggtgcctgtaatcccggctactctcgaggctgaggcatgagaatcacttgaacccgggaggcagaggttgcagtgagccgagattgtgccactgcactccagcctgggcaacgagagtgaaactccatctcaaaaaacaaaaagcaaaaacaaaaacaaaaaagaactagtgcagccattcccctaagagctagttaagcttcagctagagtaaagtgagataaatggaggagttgtgtgaaagactgacatgagaccagaaactccatgtggacaggcaccatgtccacttcgcctcctgtttaacttccagcagctagtgcagtgcctggcattgcgtaagcatgcaataaatatttgtgcatttggattgaattaatatatgaagtataatgcacttatatgtgccctgctatatataaattatgctggcttatagcatacacatgtgctactgatgatattgatcagttttggtaataccctgccaagcaccttgaactacacataaaaaccaacaatagaggggaaaggattcaaaattgttatttaaaatgcctcccaactgtgagaatgtatgctgctcacaaaacttaccagtttcccggaatttaacgaaggccacatcttgctttcccatttcagcaagggtgtgattagtttaccagtgacgcaaccaaggttaacccaggctttggctaaggtcccagaagaatttagtaaaatcttcttgaaagtctctaccacataccctctttgccttcctgacctcatatgaaacctcctcttgtttggcaccagcgcatggagaaagctgatgcaagggtggtctggcttatgggatggtcacccgctcttatttcctctgtgctagcacagggctgacgctgacgggcagtcttctagtgcttgagtctctccgtacccctgagggaggggtgtgctctgaccaggaacgagatcagacagctgtgagagtcccgaccagggctgagctgaggagtgagagcaggtgcttttgatagccaggaaagaattggtctggggatcccccgacagggggaagtcacagaaattagagacggaaaacacctattagtcaattcccatgccaaagataaattgatccctagtgtgtctccctagctccctgaccactccagttagttatatctctgtcaacatgtaaggaggagggaccatgggatgcagggaaaaaaagactcaggatgttaagatggtttcgatactgggatgaagagaagatcagtaatcattaaagaaaaaataatgattttggagaaaaataagagcagtagacattttccccctagggcctgagatttgaatagaggtaggcaactccacaatgggttctatagctgttcttttcttttcctcccctcccctcccctcttctcccctcccctcccctccggagttttgctcttgttgcccaggctggagtgcaatggtgtgatctcgatctcggctcactgcaacatccgcctccagcgttcaagtgattctcctgcctcagcctcccaagtagctgggattacgggcctgcaccaccacgcccggctaattgtgtatttttagtagaaacagtgtttctacatgttggtcaggctggtctcgaactcccgacctcaggtgatctgcccgcatcggcctcccaaagtgctgggattacaggcgtgagccaccacaccgggcctatagctgttgttttcttaatgaagagctgatgttatttatccaaagggaagaaatcgtcttgttcatgtggtcctcattttgtgctagggagtagaggtcttgagtgagtattgctgacattgctagaattagaatatgcattttgcttttggagtagtgacagtagagaaacctaggacgatgctctgatagaatgtattaaagagggaattatatggtagtttgtaaatatgtggatttggttgactatctatggctatgaagagagccaaaggatgttatcgctaaagataagatcatattgagatgcaagtagatatataatgaaatctgaattggctctgttttgcttggactattttcttcattatttataagaagaaaaaaggggctaattctcaaactatgtgtcagtaatttctcttgattttaatcacattaaactagatggctgattcattgcatcaactttgattgatatttttgcaccatttcttgttttttttttttatattttcaagttatacccaggcattttgttgcatatctcacatccaaaatagctcaaatgagcaatatcattcccagccaacctctccccgcctctctcattcacactgcagttgaaggacttttccaggaaatgtttagagaaccatgggctaaatagcctttgccccaggacttttttcttccttcattgtatttgttttttaaacttatcatggtagagctaactcctgctgctgtcttctctctaggcatcaggtccggggtgcccaggctgcctcccagattccacaccacagtgtccatgatagcagcttgatccttcagccagatccactctgcacattgaaaggcaggcagaggtcgaagccataggccccaaattcctgtgatctttaaaaacctcttttcaggaactcattatgtttatcacacatataaaatggtggcaggtgagctcatccttttcagggtacctgatgccagactctggtggttcctcgacccatgatgttcaggctgatcacccttgctacggttcttacagttttagttccatatgaggaatccatgagctgggaccacctactcgttggtgttgctaaggaaaaattcattctggcgcttgctaaaacgttaaggaagactattcagaattgttgcaactggtgtcaattctgttgcaataggggagagacatcaggctcaacctcaattatggaacgagtggggatttacagccaaagaacaggtgtggagtcggggtggtggatggaaaattactaagaaaagacatcagggtagggagattcttgctaaactcacttaacaggattcttgctgatggtaggccaaggacttatacatcaagttgggagatgaggaatttgaccagatatggaagatgtgggggttctctctaaactgatttagcgagagtcttgctaaatctgggctatgtgggcccagcaaggggaagggtgaagaaggtggaggcctagtcaaacagagcacttggaggggcctgactcaagtggagtcaaggagagagtctttgtcagtgtgacaagcagcagttgttttaaaaaacatatttttatttatttttttaaattggagactcaggggtacaggtgcaggtttgttacatgggtacattgcatggtattaaggtttgggcttctattgatcctgtcacccaaatagtgaatataatacccaatagatagtttttccatgcctgtcttccatccctccctccccccattttggaatcctcggtgtcttattgtttccatctttatgtctgtgtgtacccaatgcttagctccctaagcagaaagaacaaagccagatgcatcacattacccaatttcagactatgcttcaaggctacagtaaccaaagcagcatggtactgttacaaaaacagacacatagaccaatggaacagaggaggaaacccagaaataaggctgcacacttacaaccaactcaccttcaacaagcagcggttctaccctaagaatggatacatcaaattcagctaagtatggctctgccagaggcaggaccgtatttctgtgcatgcacagtgtatattcttgagctcatgccaggctctccccgcttcggtcagttttgttttgggcacttccctctcccatgctcattgggcctaggaagtcaggccttcaggtttcaagaatacggatagtgtgtagggaagggacgtgagaaaagcccttggacgtgactcaataatgatgctcagatctttcacactcaccctgtgaagccgactttttcaaatgaaaaaacatatactactcacatgtgacattttattcagagccaaaattataaagcaaaggagttcatgtgtttatacccagaaaaattggcaaagctttctttgaaaatgtctgctgtggttcagtttttttttttttcttgaaaatataaatggttcttcatttagtaccattactttgaaagaaaattacagagtagacgcaggtaggtgtcactgaggagttttattatgtatgtttacaaacaaagagtataaacaaagaaatgcatttgttatacttagtgcccccaaaatcatttgtactaaagtagcccttgaacaagctggaaaataagtggaataaatgtggtactttggttcctttccattgactttcaaaaacaccaccgatattgaaatatttgtgtttcctttgctgtagtgccagcaacataatagatgagaagagagtagctattcactgttctccagaaatacaacttagcctcttcctgcaacttgagcctccacactgcagccttcccttgtctctgcgatttcctgcttgctccctcctctaattactcttctttttttcagactcctttcatgagtctcctctttttttgtccccctttattccctcttgcccacattccacatttcttttcaacctccctccgtatttggctacagtgtttaaaacgagtattaagtctggaagctgaataagccccatctcctaaaaaacagttttacagattttctactgacagagttagcagtctggcctcagtgctggggaactgaaaagacccatcagcagcctgaaaaagaagagcttcttcatcagtgcagtaaactgctctgcggcttcagcctcatttttacgtagatgacggtgtcccccagcattgttgtaagtacaaacacatcatcaggcatcctggaaagaaaaatccttctgcttgtccagattaaactccgaattcatccaaacattaaatgacaagaatgttgagttgagaatgtagaattgtaccagcagggaatcttaagaggtaaatctgggaaaaggaagttttattgtgcgtcttttttttttttttttttttgagacggcgtctcgctctgtcactcacactggagtgcagaggcacgatctccactcactgcaacctctgcctcccagattcaagcgattctcctgtctcagcctcctgtgtagctgggattataggcacccacaaccaagcccggataatttttgtatttttagtagagacaggatttcgccaagctggccaggctggtctcgaacctctaacctcaggtgatccacctgcctcggcctcccaaagtgctgggattataggcgtgagccaccgcgcccagccagtgcatcttctaaagataagaaattactattactctattcagcaataatccattgcaatatttgatagaggctttgttaaaagttattttttaaatgaatgaaagtaaactaaatgggaaatgaaacaaaaaaatttcatattttaatgaatttgtccttttctttgcctctaagataaattatttcaacaagaagctgatataaattgagaatttcttaaaactactggtagatgacagatgtgttttaaattatcatatgagatacagctatttttcttggaagaatacattgctatttttcatattattattatttttaatggcattcttataaggtaactaaactgatatccaaactacattttaaaaattgtgtcatttctgattttatacctaggaaaagtaatatctaccttttaaaaatgaaaaccctcccaagaatattataaattagcattgcttttttatgtgataagcagcaaaatctcactgtttgacttagaacgtaagaaagaggaagtgaagactgatcacaagtttctatttggagaaaatcaatcatgcactcaattagaattcgcaaaagtatctttgtgccttttgtttaaaaatttcagtaaacatagcccagtctgatttggaaccctcataattgtgaatagcaaacaacttatcacaagaatagattcccacaaaagggattctcacaaaatgtctgggtattgttaacacagaagggacaagaagttttaccttatagcactgctgaagtgtttgtgttttgaaaagaaagaatgatatataaaatagtgagaggtgacagcgtgctggcagtcctcagaaccctcgcttgctctcggcgcctcctctgcctgggttcccactttggcggcacttgaggagcccttcggcctgccactgcactgtgggagcccctttctgggttgaccaaggctggagcccgctccctcagcttgcagggaggtgtggagggagaggcgcgagcaggaactggggctgcgcgcagcgcttgcgggccagctgtagttccgggtgggcgtgggcttggcgggccccgcactcggagctgccggccggccggggcagtgaggggcttagcacccaggccagcggctgcagagggtgtactgggtcccccagcagtgccagcccaccggcgctgctctcgatttctcgccgggccttagctgccttcccgcggggcaggcctccggactgaagcccgccatgcctgagccttcccccgcctccgtgggttcctgtgcagcccgagcctccccgacgaatgccgccccctgttccacggcgcccagtcccatcgaccgcccaagggctgaggagtgcgagcacatggcgcggggctggcaggcagctccacctgcagcccctgtgcgggatccactgggtgaagccagctggcctcctgagtctggtagggacgtggagagtctttatatctagctcagggattgtaaacacaccaatcagcaccctgtgtttagctcaaggtttgtgaatgcaccaaccgacaccctgtatctagctgctctggtggggacgtggagaacctttatgtctacctcagggattgtaaatacaccaatcggcaatctgtatctagctcaaggtttgtaaacacaccagtcagcaccctgtgtttagctcaagctttgtgagtgcaccaatcgacactctgtatctagctgctctggtggggccttggagaacctgtgtgtccttggagaacctgtgtgtccaaactctgtatctaactaatcggatggggaggtggagaacttttgtatctagctcagggattgtaaacgcaccaatcagcgccctgacaaaataggccactcggctctaccaatcagcaggatgtgggtggggccacataagagaataaaagaaggctgccggagccagcagtggcaacacgcttgggtccccttccacactaaattttgctactgctcattgtttgggtccacgctgcttttatgagctgtaacactcgccacgaagatctgcagtttcactcctgagcccagggagtccacgagcccaccgggaggaaagaacaactccagacgcgctgccttaagagctgtaacactcaccgcgaaggtctgcagcttcactcctgagccagcgagaccacgaacccaccagaaggaaaaaactccgaacacatccgaacatcagaagggacagactccagacgcgccaccttaagagctgtaacactcactgtgagggtccgcagcttcattcttgaagtcagtgagaccaagaacccaccaattccggacacaataggactctggtttctaaggggtgataattgcaaaaaaaaaaaaaaaaaccaacaaacgaaaccagccattcagtcttgctttggaatttttttttctctccatggttaagcaaacgtgtaagcatgtatctgcatgccccaatggagactcgcactttcgcaaattatgaggaattaaaccttgcgaattagggtattttcaaccatctgggcatctggggttgctctttcttttctctgtagctgcctcttccccttcattcccagctgcttccactctagttcaaagttccatcgccacttctctggaaaccaggaactacttcccacctggtctccttgacgtagcagtccctctcagtcctctgcctggcctcatcaagacttcttcagcctgcttctattatgttgtttttctaaaaaacagtccgatgatgatgataacaaaaataataatataataaacatttaatgtacacccacttcttcaacagtttctacgcactaagctgtgttacatcttttgaatccttattttgtttaattctccaaaacagtcttgtgaattgtgcttgagtactaaccacatttaataggtatggatttgaggtttaaacgggttaaaagtactttgcaggaggctatgcagcaacttttccttgttctctcaccaagtcaaaaatgctctgctggcttttcaaacatctacatccatcctactaccttagaaacactgttttcaatgtaattctttttctagaacatttggtagaagattaactggaaatttgctattgcttttgtgtattatcatgcttttgaatctcaaatttagatcataaaggaaattgaatgtgaaactctctggccaccccaatttttcagaagcctttatctgtgtcacaaacaccagaatcattttgaaaatgttcgcaatctatgaccaaaagttgttggctctgcaacaagagcagactgatagccagcaccaagacagatggaggtgatgttctaggcagaggtggcttctagaccttcctttgcactgccagcttctagtcagtgttattaaatctagtccctttcataactgaaatttcaaacataaattatattgcaacatccctatagaaatgtctgaagttatatatgaagaaggaaggaagatgctgttctcaatacatcccacatcattaatatgtcaaatctcttttcttgtttaaaatgaaactgggatgttttccaacttttcatcctgatggtaaggatagttgcccgtgttgggtagggaagggagggaggtgtagctgaaagtacagttttgtgtttccactaatctgatccctcccaccagctgccctttccacctgccctacaaactctctgctcagaaagtacacattgatacaacttatcaaagccagccctctgttgtagccatttcagcaaaataagccaatttgggtttggtagatggaaaaaaaaaaaaaaaagaactatgcccaggccatagagattagactttaaaacagagctaaagtaattccgaaaccattttacctgccagaaaaaaaaattacatataattactttaaaaattagccattttaggtcagcgtatgtggcacaaagaaatctgaaatttaactatctaacagggaatatgacaaagtggaaatttgtttaactatgcaccatatcgtagagaaggcaccaatacgaattaggttatttctgtgtaggcacaagactgtagttgcaaagctgcactgcagtagatgactcttttttttttttgagacggagtctcgctctgtcgcccaggctggagtgcagtggcgcgatctcggctcactgcaagctccgcctcccgggttcgcgccattctcctgcctcagcctcccgagtagctgggactacaggcgcccgccaccactcccggctaattttttgtatttttagtagagacagggtttcaccatgttggccaggatggtctccgtctcctgacctcgtgatccgcccgcctcagcctctcaaagtgctgggattacaggcgtgagccaccgcgcccggcccagtagatgactctttaaaggtcattttagcaagtgtaagatagatcttttgagggtgcacatagcccacctccctcagtttggttttctgtttcattgactgtattagcgttaaactttttaagagtgacaggctgcaggaaggggatcccgggtgggtcatgggatctgcacagccagctgttccttagttcagagagttcttctttttgagatttacagatccgtttgcatttgacagaccatggcaagtctttgtactgcccagtcccagtgttttaaaggagagcagcttaataatttattaactgcaacatttcctctgggctttatctgtgtgatgctgttgagtcacagaacattataaatatgaagaatttagcagaatcacattctttaaaagagctatggcctttttgttgtggtggttgttgttgccaaggactcctctgagagctcttgttggtttacctggttggaaagcagcagaaaatggtcagctttgtaaagtgggattgcagtaccagtttcgagtttgctaacaaggtgccctgatctacaagatcgttagccatggaatgacagtaaaatgtggttgcagaaggttttgagacattcctgaattgtctgtgtgctgtgctgatgtggcactactgacactctcctaccgcagtgccttggtttctgcggttccttcagcccgaggcacactgccgtccccatctctccacccttcagcaccttgtcagtttatagatcatctcaaaagtgactttttttccacaaggctcttattgatcctcttcaaaatggatattgcttctgccttctcagactcatttatgatacttacatgtcccacttgatatgatgattactgttaacttttgcccaatctggagcaaaatggcatgatgtccacggcagggttatcctggatgtccctgtgtagcccaacacaatcgtgcacatgggagatgcttgttcatttaatagaatagctgttaattctgcgcaccaatccctcttctcatgtttcttgtccttatcctaattgcatataattatttaatgatgttctcagccatttgtaagctatttttagcatggaaaacaaattacctttacagacttttatattagagtaatattaaaaataatagctgccttcgtaagctgttcttcagtttacagaacattttcatacatattatttgatccgcctgtgtagattatgcccatccgtgcccatgactgagaagagggcaagagtctccctttacagattaggaagctgaggcccagataaattaactaatttatccagagttgcatctctggtaaatttcagaagttaaaatcaaacccagatgtcctcaggattctagtacgacttgttccacttatatataatttttcatcaaagttactgagcgctcattgtgaggcttgaatagacacagttaaataaaaccatgactggccctggctctaaggaggccagcgtcctgcaaacacaggcacacggctgttagaaatgaggacgcagccatgttgcctcactgcctggactaacacacaatgaaaaagcaacattcattttcagtaactgagcagattcaataaatgtaatggcatttaatgattatgcagctcgtagcatcttttattcaaaggtcaattccaatgcactgtatagactatttactctttttagagatggcagagataatagattaggagactacctgcatggaagaaacaattggcactggcctgcataaagttggtacttaaaaatgtttattgactaacgccatagtgatttgctctatgtttctgaacttatccttttatggttgacttcttcctctacaaaatgggcaaaaaaaaaacatgcttatgaagtacaattgagaaaatatggcataatatttcatttaaagcagtttcaggcataggctgaacaaattgctcaaatgttttgttccttaattttacaagggatgctccagagaatggaatctgactagatttttccccatttttagttaactttacttataattcaactaccagtactctcaagtcactgataataccaaattgaatggctattttatctataatgttcttttatctcaaatggggaaaagggcacattttcatataaggctgtgggatgtgaacagtgaagggtcgttcttcctctaagcggctctccattgctgcagccacctgctctaccgtacggagctgaggtaattaataagaggtattaacacgtctggtatcaccggggagagggaaaaccgaaatctgttgaatcgctttaactgtgaaacagcaaatgttgatttactcaccatctttcactttaccacccagcttgccatcatttctgcaagatgtaataaaaagtaagctcacaccccagtgtaactttaatgggtttaattacatgtaacttgaaatatgtgtttggctacatggtacgtccagccaccaatccataaccagcatttttggaaaagcacagccagcactcaggagagagatgggaattagaaatgcagactggggaggagagatgaggccttggagccctgagttattgcccatgtggggagcgctgagagcggaagggagacaggcaaagccgccaaacctaggggaatgcctccacgtggggcgggggtggaaacagagaaggaggcaggtgtgaacagtagagaaatagaggcaggctaaagagagggcatcgccacacaaatcaagagggaaattaatttcttgaggatgtggggcttcaggttgcaacggtgagtgaggaagcactgagaaactaggagaagctgtctgagctattttttaatgaagtttaatggtgaatgagaagagctattgggggtgcaaaattgaagagataagaactgaataacgatagaaatttattttgctaacaattgatgagatttgtgagtatctgtgtaggctgaagttaaagactcaatggagaaagaaagtaaagaaaatgtcggtttgtctttgagggataaaagatgctatcggagcgtttcctcttaatgagatccatttccatcaccgtctgtgtagcacaccattaaaaataactaacagacaacgtctttttaaatgacacattattttacttaaatctttacatctgaatcctgttcctgcttattttcctgcacttgttgacaagtcattaggaaaaacagtgtttagttcaatatggcctgtcatctaagagacctgtgtagcttaaataaaaaactgatggattaatagtagttaaaaaacaaaaggcagaatgcgatggatggtcctgtatcttttcacccgccataatatacgcatctttagacatacatacacagagataaaataagcagcaggagggaaataacatatagaaaactagaaaatcaaaatgagatggctagaaacatttgcaaataatttataatcaaaatatagaaataatcattccacaagcctaatttatttaatatatatgtgctgccaaaacataattcttatcttagaatttcataataaatgcaataattaaatcacacagagtagacattgacaaaacagctaatggacttcggatttagcatttttaagatacaggatttcttttatgtgatcctttgcattgatattatttttaaataccatctaatatcctgttatggatttttttagtagactgcttaacaaaatgtcaccaatccatgagagctggcaggaagtcaatgacactttatcacagaggattgctggcatgttcatcataataatgatacctctaatatgcattaacagtttccgtccatttctcaaaactattgagaaactattggatatcagataccaactgaaatgtggccaacttgatattatgacataccagtcatttagagctcttattccctgaccagaaaccatgcatgaaggcagagaacaattatagtctcagagttacaatcctagggaagaagagtttgtggggagcacgtggtgattcaaaataaaattgagtaacagaatgaaataaacatcaccgttgggctatttcaaaacctacagagtagttattaagaaggtcaccaatgcatctatgatatctacaagggctgtgcttggtctctaactgctcgtggaacaacccactggtttcttttgctgcctaatgtatgcttatatttatttccctagggaagaaatctgagaattttttttttattatggggactttacaagcaaaagaaaagagcatatttacctattccttcctgccccccacctatgaaagcaaaactgatcttacgcaattgaaatacatgcgcatacagaagcaaaagttacgaattagtatgaccatgtatacatcagattgaccccacttatcttgtgaaaaaataagattacatgctgaagtgatgtggtaataagcaattaaccaatgaatcagggtggaacttatcctcttaataactgaaatgtggttttactgcatttgagagcagtataatttcaaagagttctatgtaagctctgaggcacaaagttctaagtttttgttttaatcatttctgtattttattttccatagacactgattattttatgccatcctttccacagttgcttgaaaatgtagtctagagaatcaaattgatttttaattatgagttcttgattttagccttcagataaactaaattgaaccagaatattcttaaagcataaacaatggattgtctaaattcccagctctcatttcaagtattcgctaatgtggcattgatcaatctacaattcccagactgagcagaagtgataggaatattggataaaaaatgccgtacaggccagaaagataaattgtttgggttgtctttttgcaagtttgaggtcacgattcattcatcttgttactttgctatatccctttagtggcttcaattgcaggattaaatattgaatggtggcagatcattcaatatataggctctcatagtttggcattagagggcttttcatgcttagaatggagctgtgtgcacacagaatgccaaagataatcgtgctgatgatctagtctgtgagattaatccctcaacaatattatcagacaattcttaacacatggatttgtccctgatatgacacttctgaaacaaatggatatactaagcattttaggagtaacattgagcctcctatacagcctggctttttcaggaaattaacccattaggagatttggccagaaaagtccaacactttatcacaaccagtgtttatgaccacaaaattatataagagtcaattttaagaatcaaaatgcttttagggagtactgattaatagaggattaaaaaataaaaattagtttgggtaaaatgtggccctcagggctaaatatgccaaaggaaagtactaaattaatatactgtcttataagtctaattagcccaagaatattcaatgctgagatattatgtttaaaatgttttaattgttgctctccttatgcactttgataggggagatgctgagccctttaaaagagaaatggaaatgttaaaggttgaaaattcattatttagtcaagagacccggagtcttgaaggataaatgcatatgctttttaaaaataaaatgttttatttataaaacataaaaattaaagtttgacaaggacaaagaggtcattcagtttctcctcctgtttgtgcggaattattttatttcacctttggctgaatggtctgaaatgccccagatgttaatttttcgctctgctctgaaattgctaaaatccagaagttcttcaaggtaaaatcatcttggggtgtttagaggaagagaagaacttgcctaaaattgttttgtcttagaactacctaattcactgtccccaaattgttatttttaataattataatgattccattttatactataagcagttgtataaaatagaattgtcattccatttcagttgtcatatttcattttttttctcaaccgaagcatatttgaattttcctcactttttacaaaagaatttcagctttgagactcaggggtacctgtgcaggtttgttacctgggtgcattgtgtgatgctgttttcttactttctcataagtcagttattctgttgccttcatcgcctgcattcatctctggcttccttccaggctgcccctgtctttctggatgaggctgtctaaatacagttttactatcatgaggaagcctagtatttctagagacagtataaaaaagaatgcaggccttagagtcagccagtcctgatgtcttccacttacagctgtgagactttcatttacttattgaaatcctctgctccttggtttctttctttataaaatggaatgcagctatctacttcacaggttgttgtgattcttaaataaaacaacagtggctggcacaggtaaacaagcaaaaaatagctattattatcattatggtgcacttcttcattgacatgttataaattatttcagattgaggtggaagtcttttactttgatcatttttaaataaaagagattttgtatttgtctatgacttcttttgaatcaagccaggttgggttggattatataaaagaaacaaatcctgaccaggcacggtggttcacacctgtaaactcagcactttgggaggctgaggcgggtggatcgcctgaggtcaggagttcaagaccagcctggccaacatggtgaaaccccgtctctactaaaaatacaaaaattagccaggtgtggtgacaggcatctgtaatcccagctacttgggaggctgaggcaggagaattgcttgtacgcgagagtgggaggttgcagtgagctgaaatcgcaccactgccctccaacctaggtgacagagcgagactctgtctcaaaataaaaaaataaatatatagaataaaataaaataaatctcccactcaatataccaatgaaaagccgtaagtttaataataaaagaatcttggaatcacatgtataatcaaatacaattgcttccatcatcatgttatgaattaggaacagaagagttaactgtgtaaaaaagggaaaaatctataaggatctggacagggagactctgactcagtaagagaaggaaagtgtgagcagagtagggagacaagtaagaagtagtttttaacataaaaaaaaaaatcaaattagctgggtgtggtggcgggtgcctgtaatcccagctacttgggaggctgaggcaggagaatcacttgaaactgggaggtggagggtgcagtgagccgagatcgcaccactgcactgcagcctggtgacagagcgagactccatctaaaaaaaaaaaaaaaaaaaaaaaaaaaaaaatcaaacaagaggtaatgggagagagcagaaaaaggcaatgaatggagagtctaggaggagacagcataattgagcactcactgtatgccagaggccacaggacacatttgtattaagactgtgatgtgccttttatctccactttatggatgagttatcccaggctgagaaaggttagaatcacacttaccggggctactaccgtaacaagcaatggagctggtattaaaacacaggcattcctcacaatatcatgcgctaaaccagtggttctcaaccttcggtgagcacggaatcacctggagggcggctaaaacaaattgctgggcccccttcccccaagtttctgattcggtggctctgggctatgacttgcgaagttgctgatgttgatgctgctggtctggggaccatactatgaggaccactgctccaaatgactgcgctctacttctgtgccgtggtcaataacgatcaagtggcacccctaggttagacgcagtggtgatttcattaggttcttacatgtggcccctccatgtggcaggctttagttctctgtttcggataagtctggcatttaatattagagaagtactttgagtcctggaggaagcagtagcctggacagcccatcaaaatagaaattcaaataaggggactccagttataaggaccctttgtctcaggagcagggcagaagctcatttactacaaagtgaaacaccagattggatcgctcgcgtggaggggacttgatgctggatcctttacgtgttaaactgaagcacattaagtttcttcttactaagggtgagattggctccagatcctggacaggcattaggctgtgagtcctatgcctctagctatgaggagaaccagaatgtaaggacaaggggacacacacacacatgcaccccacacctccactggggttactgtagttactgaacaattaccacaactttttctctatatattcctttatttcagaggtgctgttatatagattccacacagtgtttgttgactgactgcccagtatatattagctgacttaactgtgaatcgctgtgagaggggcatcaaagaaaagtgaaaagtgtctctatgtctttctaacttagtatgctgggttcctaggaatgagtcgcatgcagataggagttgaataaaatctcatctacatacttgattggcagtgacttgaaacaggggtgttacaggcatggaacgtggaggaaaggcagatgccacattttcagtttttattttgctgatagccaattggccaaccagatatagttgtgacaaaagctaagtgtctctctttagggtaaaaggaagtcattacaatagcaccagaaaacatttggtaaggtctttttgaacttggcagcaccttgggttctacgcgaataagtcagaagacctgaactgtgatttgggagttaaaaaatggataattgccaactccttagttcaattcaattcagtgcagttcagttgagttcactcagtaaaatccagcaagtgtctgttgattgcctacttatgtttacactatgcacagtcccgaactcggtcttgtgatggataagtctgggctctgtcgggcgactgaggtaccctgtacacttcaggaggaacgtttcagctttcagatgcattgactaataagcttataaatcattacatacaatccgtagagctaagtggtacctaaaggaattagcagacctcaaatgcccggttcacaccttggctaaactatgagttataaaggtaaatatttttggtaaaatattttggtataggaatgagtgcagacactgttttagaatacttaagtggtacttttttttttcatctttaaaatatcctagactttgtttcttcatagagagaacctcctaactgaattctaaacgtgttaactgtttcctttcagtgaaagctgctgagcagaagctgctagcagtggctacctttgaattcccattatgctgtgacagccagtagtacactgcttaactgggacaatttgtttatgggtacatatttctgcgtgtgaaaattagctatgagttttcttggcattagtgattagtaatatttcaactacctgatcagaagaaacattctaaattctatttgctcctatagacaaagacaaaacaagttttcctctgcaatctctgtgttatgccatggcccatttgagctgtacaacgcactgcttgttcagtttttgttacaaccttcatggaagatgaaaaacataccccaaactgctatgcaataagatcattgctcgcctgccagtttgcagttttatatacagcatgttattgttgtggaatgaagtttatggagagtgagtctctggtagtctgtcacttcacctgactacagtaaaagggtctccaggtaggctgtttgtaactattgtaaatattcctagctttgcagagtcttggtggtgaaatttatgaattaactggcactccttctttgctattttaaaaattgaagtttagtttcaaaggccattacctgttttacttgtgtgtcttggggaaagaggagacagctcttaagatattgaaaatattttcttttattttctgtctccatttttttgttatacttcagagaccttatgtaatgtttaatgtttccatttactgtatgcattttcagctttagtatttgtcatcttgttccaatttaatgaaagcttatttggctatggttttcattggaaagcagaacacacgtacaattttcagcaataatatatatttttccttttctttggatttgaacagccttctaaaattttctctactgaaattctggcagagttatttcttcaacatttggctgagggtttggaatgttttaaacatttgaagtgcctgggatcaattactgtaacctaaaatggataacctttaagacacaaagctcatgtttttcttaatcatctcattacatgacatttttctgtttgtatatcaataaaacactgtatgttggctaaataggctcatttcatttatttccaagtactgttgatattgtaaagctagcatattacatttaacattaaagttatttttaagatataacatctttgtggatgagaaaaataaaatccagaagatggataaacttgaaacaatttagcagtctaacaaagtataataaatagcaaaatcatggatttgaaatgaatctttaaaaaattcacaatgcaagcatatttttaaagctctgtttttctaattaagggagctccaagagctttcttatttattctcactagtgttatttcgttactgaaaagttttttttccactataaaatcactgcttcctctgagagatgcttacttagaagggattatgtaggaatatcctgttatttctatttatcaggttaaccgtggattcatgttatactatgggggtagaaagcaaggcaaggcattgccagcttcaagatttgacttttgataaatataaatgtggagcaaccccgtgctgctggtgcgtagtggatgtgatccatgacgggcagatggctgtagcgatggagagaaatattatagccagaacattcctgcttctgctccactggactcagaatacattaacagggtcctctctcagcttggagtttttttcccgatgatggattagtgataaactcatatgcaggttattccggagttcctctgaaaccttagcttttcatgaatgaaaaggtcctttatacattttctacatcctttaatttttttcccatggaactagattgctttgtacaaatttatatctctgttatcttctttgaaataatagagagcagttgtccagttttaatgccttaattatttgtttggtggtttggagaaactttactgttccttaatgaaatacattacatttagtaaagagagaacttaaaagttgaaattattctttaaaatacaagctaagattctcatgaagccagaagtctccttgctcatttcgtcctaaatgacttttgatataaggccaaactttgtgccagatgtgtggtattttacaataattacatggcacaaacctccagtcatttccactgagaccattcaacatctgttttatcaaaatggctttcagttttttttcaggtccacagatgagtaagaatattaagtgagacactgagtcacttactttattatttcatagtgtgaatttctcttgtatttatctgttttaaattgccacagacctaaagatttcttttaatgactggtcataacagagtttgtttctctgatattttgaggtaaaaattttaaagacattcatttaacatttacactttctattccctttattctgttacacattgtagttccaaatgctgatgaaaacttaataaggaattggtcaggaagtagatgagaagggatggtgcgatccgttattaccatttccactttgagacccctttagcttttgaccagcctacttcactgtaagtcttcttatctgtgctaaacagaatttacaagtatcgactaacaaagacaaatagtcagaggtcataagtggaagggatggcagacccacgtggcagcgtgaaacggttcttactcacctgtgggtgctcccaaagctgcatgaagggccatttgctaatttccctgggctcaggtgaggggatatctctttctgaattcaatacctgctcacgtcactcactttattggaatacccaaatgcacaggtcgtttattttgctattcttaaatattttattcaaaactatacgcggaaagacctttatgttaattatttctatctagatgggcaaaatattatgtttgggaaagtgtgaattccctcagtgacttttgtacagtcgctccacatgcctcaaaatcttgtatactaactggctgctgttacagtaaaaacaaggtcagtgcagctcttcaaaacactgtgctttcccactgacgtttgtacagtagtcagttttctgggccaacgtagacgtagccagccataaaaataaacatgggcacattcatggcccaaaataaatcaaagtggacataatgaaaattttccagtaagcttaaaagaaaatttaatatacttctcttctttttttaggagggtcaagcagttggttcggttttcattggaatttttatgtgggtaaagcttcctgtttgctgcgcttgcctaggattttcttatcccacaactacaatgtgaacaaagagatgagagagaaattatgctaatgcattttggtggatcaaatgagtgtttcatgagacaactcaaatttttgttagctatatggtgttggaatataatttcaaagacaactaagccctaaaataggagatttatttaaaacataacttttccttgaatgaaaggatgtttttgttctttctctgacaaatatgatttgagaataaaaggaaatatataaccatgatggaaatgtatttttgtcccaaagctgatttgtctcagatatttttggtcacagttcaattatttcaaaattatttttaggtttttagattcttgctttggtcacatagcaattttgttccaaagatacgaaaccatgtaatccgaccatttccgaagctgggctcttcaatatttctatctttcagacacagtttggcaaatacggcagctcagtcaagtgaaatgtgctgtaagtcctagggttgattggtcaagaataagatttctccagtaagacatttttacaaaggcacgatgactatactttcatagttcaaacaaacagagcataaggaattattctgaaatataatgatggtacagctgtaacaataaaaaggtctgtaataaataaaagattgtgcatctgttttagaagacctctgactgctataccttgtaacttgccacaggcctgatgcactatatcttaactctaagtacaaatgcaagaatagtgtatatcctacattatgttatgtctcaaagaattttagacagatagggacacactatctgatggtgaagagacggaatcgaagctgaaacatcagactgaattatgtttaagtattatctattcttctgcaaagaaaattagcttttatctgtttttctagaagtagtgatgtgtctctgctaaaagaagcacattcttaccaccgtggaacaattggatgcctttatgaaaccgatgtagtttaatagcaggttcttttgggtgaaaattgttttctagttattttattttattttggggatggggtcaccaggctgtggtgcagtggcatgatcatggctcactgcagccccaacctcctgggctcagatcctccagcctcagccttctaagtagctgggaccacaggcgtgtgccaccacacccagctaatttttaaaaatttctttgtagagaccaggtctccctatgttgcccaggctgatcttgaattcctcgtctcaagaaatcctcctgccttggcttcccgaagtgctgagattacaggcaagaaccactgcaccaagctgtgaaatttgttttcttaattggtaataagaacttgggcttattatcatcgtgctttagaatttgctaattccttttttcaatcactgtcagtacagtctgactccttttaattcctgacatttttgttccccttctcatccagtaaaataagaataaccacagcctttactttctccagtgcagtagggtgtcaggaggactattaaatataaagttcttaacagtttttcagtgtaacctaaatgtgaaaaatctatgaatggttaacagaaagtattcaatctaaatcctccccaaggtcagaaatattattttggaatatgaaaaactacacctacaaaatgaagtaattcatcactttaaaaaacaaatttggagtttttaatagaagccaaactaactcagacatctaagccatcaataaagcttgccagaatttgaagagaatatcacgatgtaactctttttatggatcaagtacaaatgaagttgacagtgtatgcctaatcagagtgcggagaactggaagccgccgacagtatttccgctttctcatgttgacacattgtgtgtgcaggcagcagagccaggctgattaaaaatgtcaagactttgctaatgtgaagcacatgctttcaaaatctgaatttgagttcacgaggccccaatctgcagcgtgtaaataaagtacatttattcattaatgcattcacttatgttgtgttcaagcaggacaactcttaggaaaccacgtccacgttagcttactattgattagaatatacagctcctcatcaaaggagcttgagaactggaaccacacagctgtgagctgaggacaaggccaaggtggaggtgaacaatcattgcattctccttgaatgctctccatcatcgccggtcacagcgctgactctctcccttggaaggcaattgtcttcataaacagtagagagcatcgggaaggtggctgagaatggctgctgaggaactttattgtattgcgggactccttgcactagcttcttacctggcttttttggttaagtgtatgagaaatcaaacccagtacccagaacctgagaaaggtattaggcgtcattactcactactcccagccaaaaggcttcatggacttccatttccctagaacgtccagctggcctcccatgagggaaaatgagctcccagccgccgtcctggaacattccctcacctccccgctacaatctatcgcttctcctgaatgcctccttttgtactcacagtagatgttgcgtaattttggtgagagaaagaacccaaaccaagggctaacgtgatccttacctctctcgtcacttttcctttgtatactgatgagagcgtacctaaggttgtgcattgagcgggaatagattggatgcatgttgagtgtatggaactatgctagacactaaaggagatgacaaatggatagtacccatcatctgtatccttaggggacttgccatataccaaagaaagaattaacaaagaatttgaagtggcacttatccatccgtttatttaacaaacgttcagtgagtacttgtgctgtgtcaagctaggtcctaggtactggggatatcacagtgagtagaagacttggtccctgctcttcctctgtaattgtggattcccaggagagcagtgcaggcaatttatgttgtaggagcatgagagagttgcgctaggcattgaagaaagtgaaatactgatgagtatgttaggatttggaaagaatgaagggaaggcatatttgcttcaggcatggcataaactcagggacagaaggcaggcaagaaagctggagggtatggaggaataaaggagcaccacaagcaggcttgggtcgggagggagcctctgggtttgcaaagatgagccatcactggagatgctggtgtgcgacagtggcataagaagcagtaggttggcatgaataatctggcactattgtgcaggacgaactggactcacactgggcatggtggttcacgcctgtaatcccaccactttgggaggctgaggtgggtggatcacctgcagtcaggagttcaagaccagcctggccaaaatgatgaaaccctgtctctaccaaaaatccaaaactagctgcatgtggtggtgggtgcctgtagtcccagctacttgggaggccgaggcaggagaattgcttgaacctgggagtcagaggttgcagtgagccaagattgcgccactgcactccagcctgggccacagagcgagactccatcaaaaaaaataaaaataaaaataaataaaaaataaggcttttgcagaagcctgggcatgcattaacaggagctatatttgtgacaatagagattagaaaaaagggacagaaggtaaagtatttcaaaagaagaattagtcagcattggtaactaattgtaaatgttaaaaaacaaaaagcaaaaagatgtcttccagatcacatggggaacaatgatggaacacctgccagaaataaggggcttaggagagagggctggccgcctggagaatttagaggacaagtttggctttgtgcttgtcaagttactgtttacagtggatgtctttctgtggtctgtggccctgaaaaagacatttcctccccccagttttaactttcagttaactaattattctctaactccttcacgtgtatctgctttctttcatatctcgctatctataaagtttataatcagctacagatctttgtacatagcagaacattctacagaacgttttgatttttacctccatttccacgaacaaaaataggctgaaatgtctttgattaattatggtttcagacgtttcatgtcctgttcataagaagcagattcgccatctttagatttttaggttagaggagggcaacgaaacgaacttcaatgtaaggcgggaaactaaagaatgctaaccttacgtccagaatgctgtttgctctcattccctatgaaccgattagaattataaagaggtgatttggggaacttttttatccatggttcgactgtaaaataaacaggctgatctgtgatgtgtggccagtggaaatcagttttattacttgttactcatcccgtggagatctcagttcagttctggtggacagagttcgaacgtaaaaacccacctcttcacataaaataaaatcaatgctatgagaaggaataaacttttggttatcattttggaaaaccaattttttacttctaggttgcatcttacccttttgggttgaattttaataagacgtatattcatttaaagtggaatagcgattctcagggtcagctgcttcatttcacagcaactaaatgtatcaaagtatgtcaaaataacatattatagggaagtgtgacccttgaaacctctataaagaaatggctagtagtaagtagttcagatcttttaaataatgtcattctaacaagaaagaaaatgtcacattgtttgtaactttttataacactgtaacctaaatgacactggtgttaggacctgagaccttaagcatttgctgagtgaatgaatgaatgaatgaatgaatgaattttgttacatattgaccttcaataaaaagaaagacttggggcccgaacatattaaagctataaagaatgactctgaattttaaaagttgctgtaatgaaattgacatttgttcaagatatattgcatcatttaaaaaagacatcccaatgaatcattagccaaagacctgcttttccataatatctttgcttctttatgctatcctcaggaattcactcttcattaccaaatcttccttctatttttgtcaaaaagtatattaagtgttaaaatggcaataccaatgcattgaaaatacctttcaaaattgatttgcacataattatatatgcacttaccttgagattttatgtttattccaaactcctgcccaatgttataaacctgaactacagagttcaaatgcacctgtcatttctttctttagtcctgacttactcttactacaagccatccagaagtaaaatcacaaactcttcatgggaaaaaggcacataggaccataatctaacaccccagtgtgcagtaagagatatgatattgaccagggagttttcctttttaggttctgttattagtaaatcattgcaagaatagacataaatatcaacttagttgtatttaaactttttcttccaaattccataaaaaagacaccaatttatcaaccattcctcccagaggccctttcatccatattccttagtcgacagttcttctgtgacaataaaatgtgaataaaatgcaggcagaaatatgtatcatgttctgggcagttagggggtaaggctttgaaagctcattaactggaacggttggttgtgtttccctagagaaaaccttcggaccaactgcaaacatttatcttctgggaacaaaatgggccccatccctgaagaggagaaaaggccagcattcttgacatgagagcatggtaaaggtgggattgcaaggaattagagacaaggctgctagctatggttggttaacatcacctaacactttggctcttgttaaaaaaagaaaaaaatcaaatttaactagcctgattgcagagtttaaaataaagagtcatcctttatagtatacttttcttattaacattcagtggattccgtgtagatgaaatagtattcatccattcgttcaagaagcattcttcctcaaggaggcaggtctctgagccagtgttatttgcgatgcacactcaaaaaatgaatcacatgggatgccccttggggcctttggcagcctccttcccgttaaattatcagtgtgagcattaattcaagatgtgaaacctcaggcatggctgtatcaaggcaacaaagcagcgaagaggcagattacagataacgaggaccagtcaggggttcagacaaacatggcaagcagagtttcagataactaaaaattgctccatccatgctgtggcactctgacaaatgaggtaaacatcgcaaatgagaggaagaacaaggcaagagctagtggctgtggctcctggagacatccactttcagcatcgtagaggtctttctagagatcctttctgtccaggtgaaggccatgcatgcatcaggacatttttggtcttatctcccaaccagaaagctctctcttacctgttggagaacctggcatcccactggggtcatctctcagaagatacgcagggtcctagaaaaatgagaaatgcaatacttctgttataacacaacttctattagaaaatgtagttccttttccagtttgacttacaaggagcatatttcctttcatcccagcagccaaaacagaggcctcctggtctcattttaactgtaatagccccaggagctttggctgcggtattttcccctgtcgggcccagatccaggattgggctagatattccacaacacaaataactgcatcctttccatgtgtacattggtgcaggctctcattaatcacttctggttcttcagcagtcgatgatgaggactctgcctcagccgtctactgacatgggtgatttgtcaaatagatattagctagaggagggcttgttaattttatgtatgtaaatatattctgaggacaatgccataatgagaatattatgatctgcaattaatagacattttctttagttattgacatgtcctcaaaaacatctatatgattatcatattcctttttataattttcttctctttttcttttttcttttttttttttattagacaggatctcactctgtcatgtggctggagtgcagtagtgtgatcatggctcactgcagcctcgtctttctgggctcaggtgatcctcctatctcagcctccagagtagctgagactggctgcagagtagccatcatgcctggctaattttttgtatttctggtagagaaggggtttcaccgtgttgctcaggctggtcttgaactcctggactcaagctgtctgcctgccttgggctcccaaagtgctggggttacaggcatgggccactgcactcagcccctgctttttataattttcagtgtgcagggatcacgttcttctattttaaatccctgctatgtctaatacagaacactagaagctatgaatgctgggaaaatgttggtaatgaagatgacaatagtggtaatgtggttaagtgtataatcactaattaggcaacactgtaattttctggttctgaaaatggcgcagcacattcaggaagactttttgcctagaggcttgtgtggtcctgagtgcacacatacatgcctggacgcatggcccacgcagagcagggcagcagaggcttggcagccaggagtctccttgccctctgtctcccgaggctcacagtatttctctttgcagggcctcgctaaggagtagctctcggctggcaagctgccacacagatttttataaaaaggcattttcctcatataaaataatttggggctttccagttacaccacattgctgtaattaataggagtcactttttacgtagaagatctattagcatcagtgccacatgaaaattaagaagagatgagaggccaacagcagagcaagacaaagatgagaaatcgtcttaaccacgaggaccacagatgaagagcacacgagcaaaaatggaaaaaaaaatcagagttttcctaggttatggaatatttggatatgagcctcacctttagttttgacatatcatattgaattacaagtgagagctggaaaaaaatgtgtattcactctattggaactaaaatatattttgaatattttctccttttcttccttaagatgtacatttcctcctacctgtacattaatgttcatgaaacgagcatatatcatcatttttaattatttgactcatatttcctcccttgtcattgcttcagtgtgctcaaaagcaggtgtaaaggaggaaattaaaatagagcattcacctgctgtgagtccctatcggctgtaatggttggatacgtggacttatccctaagtcccactccagtggtcaagagccattaaccaaagcctgtccctcacagcttccttcactctcgagcccggtgatgccctgtcagtcaccaggtggacaccattgtgattacacagaaagtaatttcttgatagtaactaacaagataacaatttttagcatactttgttgctttaaaggtatttcatggagagtttttgactacaagtgtttactttcctgtatgcagtcaaagtccagctgattgttgcattaaatgccctcactatccctcctgggatcaaatgagagaggacccaagaggttcttagaaacaggactttacaaagaggaggttctgagtatggcattgattctcaaaacttcagtttgcaaaagaaacagctaaaatgcagttaaaaatgcaaactcctggctcccaccctcagatattcacatatgggtaagtctggagggggcccaagaatatgcattttaaatgagtgtttcagatgatgctaatgcaagtgctctgggaaccctggtgtaactaacacaggaggggaggggcgtggaacttttccttctcctaaattcactctgcaagaggagatattttccgtactatgcgttattttgacaggttgccattgaggtgaggaagatagtgaatacttcctgtaaagagggcattatcatgtgagttcatactttcattcatacaccttttgcttcttccttggttctaagtaccagtcacatagataaaatataaaaagggacaaattttaaaacattaatcaaaagcaacttaagtgtgtccatggctaggaataaaccaggaactgaagctgaagtgagggtctactggactctgggtagagaaacagaagcaggtagagtttgcttcctacaggatgatgagggctaacagtacctgatccaacgcctggacccaagtcagcccctgtgtttgaaatcagcagctgggtcgtgactgaaaagtccagagaggaagttgggataaaaagcctgtaagctcctccctagaaagctgggtatctggggttggctggctggagcaaaggcagcctcccagccaagacttgagtgcagatacttccagacttggagactggatgtgtaatacacccaggttcatgacagaacgagagcttcaaggtgccaatacaagatctggttctgggattggggtgcaaggggttaggtgaatgaaggcaaccaaaataccaccaaacagcaagaggtaaatgaagagagacagagtcagggaatatataaaatactattcaaaatgtatatgcaaattaaaattaaatttataaataaaattaatgctgtgaaatcagtgtttggaagatgagttcactgcatatgaaatgaaaatgatgagttttaaaaaagtatgtttgatattctcagagtaataagggaagtaataacatccataaaagaataagaaattatgggctggacacagtggctcacgcctgtaatcccagcactttgggaggccgaggtgggcagatcatgaggtcaggagatcgagactatcctggccaatacagtgaaaccccgtctctactaaaaatacaaaaaattagccgggtgggttagcactcacctgtagtcgcagctactcgggaagcttaggcaggagaatcgcttgaacctgggaggtggaggttgcagtgagccgagatcacaccactgcactccagcctgggtgacagagtgagactctgtctcaaaaaaaaaaaaaagaataagaaattatgaaaacaaatgaaacaaatacagaatatataataaagtactactgaaaattctgaaaaatgattcttgaaatgaaaaacaatagataaaataaactctaggttcaacataattggaaaaaattatgttgacctgacaagtagtgttaaggaattccaccttatacaccttatatataagaaaatgaaaagattgaaaaaatgagagcaaataagaaacatgaaggatgaaatgatagtctacaaagtataatatgaacatcagaaggagccagttacacagaggagaagcagcattcaaggaaataatggttaaggatttttcagaactgatggataggcaggaaaaaaaaagacacttttggtaagaaaatataaaacattagggattcagagaaaaatattacagtaacctgagagaaaagacattatctattatctacaggctgggcacgctggctcatatctgtaatcccagcactttaggaggctgaagcaggtggatcacataacgtcaggagtctgagaacagcctggccaacatggcgaaaccctgtctctactaaaaatacaaaaattagctggacgtggtgtgtgggcctgtattcccagctactcaggtggctgaggcacgataattgcttgagcctgggaagcggaggttgcagtgagtcaagatcatgccactgcactccagcctgggcaacagagtgagactctgtctcaaaaaaaaaaaccacattatctacaaaagaacaactcccaaaccgaagtgttctcatgagcactgatggcaaacagaagattttccccaaatgcttttgacatagagagtaaataagtgccaacctagatttctattcccagctaaactaccacttcaggtataaaattcaagctcctaatggaaaggagtaaaatatcttttatttaataaacagtgcaaggggtgcagatccaagacagttcctatcttagaagacctttcaacctagtgagaacacagtcttgtaaacactaattataacaaatatcttaaatcacatagataatactgtcaatgagaatgtaatttactctgttaccacaaaagtgtactattgttggaatatgttagtatagtgagacaatcatagtagttataacaccatagttgaagatcttgtttattaccttttacacacagagatcatacaatatatttcttccaaatttagtttctagaaaaaattattcttgcaaataaattaatttcttcctttagacagtggcaactatataaaagtaacattttcatttttgctgtagttgctaggaaactcctagtcaaattttatgcctaattgtggtgagtggacttttttgaaatcataccagaccaaaccaggatttattttgctaacagtcatgttctctgctctctgtggatctgtcaaaatttatccctcattgtgtatgttgttaaattttgcaaagtactttaaatctatttggaaggggatactgtgattcatttcttttaaaagaagaactctaagtgaaatctatcattttaataatgagtatagaaaaaatactatgcttcacagaaaaattagtttttaataatttaatttcatgatgtgtgtgcacgaggaaaccgagctttatttttaaatgcatgcaattacatttccaaaaattaccatagcagtttgggtttgaagcaatggattgaagtaaatctttaaaataggaattctgattctaaacttgcatagaaatgtagttcactttaaaatatgtataatattgaactaatctaaggagatgtgtgaaataaatccttataaagtatctcaaagatctattgtgggactatttaaaagctttgctgtttaaataatatatgaaatattcaaaaatctctcacagacacatgcacgtgcacacacatacacacacacaaagataaatgtagataccaaattcacatagagaaaaaaggtacaaagtagatatcagctttacatttaattttgaatcttctatgactgtgacacagtaaaacaattttcagctcttcagttgatttcacttgtgctacttcgctagttttcaaccttcgttattgtgttgtctaaactggtgggtaaattttccaccttgaacactaataggtgacacactgttaatcagcataccatttcgaaatatcttaatgcccattaagtctatttttttccagaagcctatagatttcagatggcctttaacaggagggagaagaaagggcagcttttccttgcttctttagctgtgctttctgaccacagcggttttcaagcctcatggcacatttgaatgcttggttgtgtcatcattctggcactgttatctttgattccaaaagagaatgtagcatttcaaatgtcggaaatgtgctatagattttttggcagtaggaaggaagtcagtttgactttcatgtcttaaagaaatatgtaatgttatgaccaaaattagtactctctgaaattattttgctctgaaattggaaagaggtaatatacatctattaggttgtatacaaaccctttgactggcagccaggtttgaacatttctttttactagaaaccagctcttacatattcatttattcctttggcatgataagagagggagactgggaaggaaaaaaattgcattaaaaattttaaactaatgtaaagtaagctttattagcttagaggcatcatttccctctgttttcatatatgacagtgggtaaacaatcaagtgccagtattctaagtgtgctaaattgccaatatgtcaagaaacagaagagtttaaaatacatcaagatgaaataaattattgcttattgaactttaagaaaattatttcagagtgaaacttgacatgtaatttagctgcagttttttcaattgtgacctgttacgtttctgctttgtttacaccatatagagtgcagttatactgagctacttggagtcgtttaaagcagtttcttggcatgtatatcatcatcctgagacaccttataataaattcaatccccctgcctccccagcatgccatatgttaaattaattaaaaataaaacttttaaccatacttgtaaaagtactaagaaattgtctccactagaaagcacctggagcctatgttttagaatccctatggttagttgctataatatttgtgaaaatttgaataatatgggaaatgggtagtcttaattcacacaccaagatagaagttgctttattctcattgatgtctccatccgcatatccataatatgtttttattttcaacagctgcttaatgtgttattcaagttgagttgaggtatggttaagcttagtgatataaaaccttctgagacatctaggaatgtgatatttctgaccagctgcaaaaatggtaacctcttagaaacaaatgagcataataaaacaaaaagtaggcagtgagtgtattaatcttttttcttccttgtgtttttcctctcatattgctttcttaaaaaaaaaaagaaacctttaatagagctctaacctttaaaagttctttgagtcaagcaatttttcatgatcaagctgtctcatgattgtttttatttcagtttaacatttcttttgattcactacatttttttaaggtatttatgagattttactccagagttcaactgaggttaataactcgtgatttaaataaagtcattgaatatctgcatgtgaccaagtcagtaccactcttggggtcacaattggcttcccaaagtaactataacaaaattattctagatagaatttattgtaaaataatgagtctgtttatacagttatgcaaaacatgctctttcctgttaataataggaaaatatttcattgcttaagaaacaccaaacctgcaacagagtgctttagaaaacaaaccatcggagaggcacacgttgtctgcatcactgcctgcctcacactgggttttgatgttttgtcattcagcatgttgttgatacgaatgacaaaacattgaaatctaaggtggtcaatttacattttctttgttgttgttgtttttttctgagaccgagtctccctctgtcgcccaggctggagtgcggtggtgcgatctcggctcactgcaagctccgcctcccgggttcacgccattctcctgcctcagcctcccgagtagctgggattacaggcgcctgccaccacgcccagctaatttttttttgtatttttagtagagatggggtttcaccgtgtcagccaggatggtctcgatctcctgacctcgtgatccgctcgtctcggcctcccatagtgctgggattacaggcgtgagccaccgagcccggcctccattttcaatacagtatgcagatggaaaacaataatagcaattacattttggaccttgtttctcagtgatctttcatatgtaacattttaatatttattagtttctcactaattaaatataaacatataataccattgtagcaaaaagttatctaacccttttactattgtgaatggtatatccttgtatgacatgctttttctttattttttacttgcattctttttttgtagtttgctaacatcaacttttaggataatgatagaaaaaaattcataaaatacattgattatttaaaaataatgccaggaaggacttagtatctaataaacggctaaaagtcactttgagggggaaaaaattgtcagactggcatcctcaagggtcaagaagcaaagatgaaaataggtattaggacaacaaaagatactttttattcctaaatgatagttacattgttatagtatttaagtgaagagtgaaaatccacctctaggacgaaagctgaagataaagccaggaagagcccatcattttgctattttctttgtttttaacatagctctttgaagatgtagatgattgataacatgtttcatgatttacctaaatgtttgatatctgtacatctctccaaaatgaagatttacatttcaaaagttgaatttatgtctgaagatttatgtgtacgtggttttttaatatccctaattttgaaaaaaattctataatttggccctaaattatactaaaactgaatcatggtatcattacttccaaaacatttatctgtgcaggtgctaacataaaaatgaaagcatactttaagatttgccttggaaacagatgtttttgaaaatactggtgaaaaaaaagcaggccaaaaaagtagggaaacatttcaattcgaatatattgcaggttgagattgttgtagagagtggagtggctagagagagctaagcagtttctttgaggtgcagtttcacttttattttcaaaaagcaagtcagtataacaagtcaaggaagatagaaaacagctgaaaagaacggattctccagtaagcatcgtttatttaaccacggaattcgtaatgtcctttgcttatttagaaaaagtttctggaatttgccagggggtcacagacacagaagtgatcaaacctgcatgattgttggggggtggggtagtgataagaattttacaacctgtttccagcactgggggccctcaggggcaagaggaactgagaaaggatggaaattagatatagtgtttttgtttttgtttgtgtttttgagacgggcctcaccctgttacccagcctggagtgtggtggcactatcacagctcaaggcagcctcgacctccccgtgctcatgtgatcctcccacctcagcctcccacgcagctggggctataggcacccaccacaacaccaagctaattttttgtgtgttttgtagagacagtgtttcgccatgttgcccaggctggtcttgaacccctgggctcaagcaatctgcctgcctcagcctcccgaagtgctgggattacagctgtgtgccaccgtgccaggccaggtcacaggtcttaagagtgggatatgacttgctggggccaaggacagtgccatacctctcaacagacctcagatctgcggcacgttccgtccttagggttatgagtggatacgacaggaaggttataaacagaagatgataaaaatggttttggaaaattagttttcaatgctgacaattcggccttacaaagacattctatatatgaaattatttaagatctttattgttaatagtaattatcatagcaagtaaatacttcctgaacacatgatgcagactctgtactaaatgtgttacccatgatcttattgaacttttatataaactctgtaaaagaaatactgttatttctgacacttctcaaaagaagacatttatgcagccaacagacacatgaaaaaatgctcatcatcactggccatcagagaaatgcaaatcaaaatcacaatgagataccatctcacaccagttcgaatggcaatcattaaaaagtcaggaaacaacaggtgctggagaggatgtggagaaataggaacgcttttacactgttggtgggagtgtaaactagttcaaccattgtggaagtcagtgtggcgattcctcaaggatctagaactagaaatgccatttgacccagccatcccattactgggcatatacccaaaggactataaatcatgctgctataaagacacatgcacacatatgtttattggagcactattcacaatagcaaagacttggaaccaacccaaatgtctatcaatgatagactggattaagaaaatatggcacatatacaccatggaatactatgtagccatgaaaaagaatgagttcttgtcctttgtaaggacatggatgaagctggaaaccatcattctgagcaaactatcgcaaggacagaaaaccaaacaccgcatgttctcactcataggtgggaactgaacaatgagaacacttggacacggggtgaggaacatcacacaccggggcctgtcgtggggtgggggagggggaaggatagcattaggagatatacgtaatgtaaatgacgagttaacaggtgcagcacaccaacatggcacatgtatacatatgtaacaaacatgcatgttgtccacatgtaccctagaacttaaagtataataataataataataaaaagaaatactgttatttccctatttttcagggtgaggacattgaggttaacaaatatattcagttctatctagtaagctatagaaatagaatttgagtaagtctgcctgattgttataattgtgccctatctgtcaagcagcctcctgttttgaaggaatttctaattctcatggatatacatttggtgtttggagaggtagatattcgagttataagacagatgaaaatttgacttaatttaacacatttgtggccatgaaatgaattaatactggacagcggttgatgcagtttcagctactgtcactctgattactgtatgagcgactccagtcatccatagacaataattcattcataactttctctctcagtcaccacacacacacgaactacactggtgaagatttatttttgccgcatacggacataatttgagaggcatggcctccacgactcttctgtgaaatgacaagttttgtcaggaagtttctaggcctttatcagactaaaaatagaacatggctacaatttttccactgtaatacttactcagataaatcagttgaaagagattattaggctcagggccactaagggaaaactttagttcaactctggctgctgtgggggcagaatcctgtggatatgattgtacactcttagcattgacatgaggattgatgaatggatatacaccaaactataggtatgtcaaggtaggggctgttataaaaacatgctgggttagtcataatggcaaaccaataaatcaacagttggaaattctgttttttatttgacgcactcagaagacatatctccatgtggaaagatgaggagttttcttatgtccttatcattaattattccattttggaagccacatgcttattctatacattatcctgatagctaagaattgatatcagtgcaaagaaaaaaaaagtcaaatgccaaagaagtaaatccagttattccagagattgagatggtttcatcactgaacagcttgcagatagccttcagaaagtaatttctgaaatgtatgcaatgtcatcagagatgtgacattttaaaaataaaattgcactgatagactaatcaaaatccacatttctctgagccattgtatctgtcttcattgtcctcaccccctcttcatcttcatcttcaccctcgtcatcaccctttattatctcaccttcttctcattgccaaccacactgagaaaagtagatagagaggacactatctccaaagtaagtgagggcttagagagattaaggatcatccaacgtcactcaagtaagctaatggccaagagagcaataaccacagccctgacaatatatatactctttcctctagatcaacgtttctccccttatttcatgctttaggtatgactttgaaagatgaaataaatgagttgtatagtcttaattcccctttgttgctcagaaatatcctctgagcatttcccaaagaatccagaagagaagacttacttctgttagtaaatgtttagcctctggtcataactatcttcctgttttgtgcaagaagagcaagcaagaaagcaaaatgtgacagggagaatcaaagaaaactcagatttctgctctcacatttatatggatcagatctatttttatatgtattaaggttcttttaaaataaaagaaaataaaatgaaaagagctgtgaaaaaaagaaaaacaatctaaatgctgtctaatcaataaggaatattcaattcttgatttgcaacttagtccataccaactagccaaagtcctcccaaccatgacctcaggggctgaaatggccctttagatctaccaggttcttgctggagctcatcattcgggatgaccattggctgaaggtcaagtcccggggccagctttgcaacttggcttttacattaggcagtttccgtgcgaaatgaatcccactgtggttagaaaaaaaactgttttgagataaattctgaaatatttctggtaaaagacctctcatctccaagctcagtcttcctttttttctgtgttaaaactatttgtaatgtaaatgtgttcctgtgtcttgaaacatctctgaagccacgcaaattcgtatcatccaataaaggtgcttatttatcaacggatagctacacatttttttcactgtttttttttaaaagagtgtagactgtagtgttagaagttctaaagccaagcaagcagtgggctgtagtgctttgaaaacggcatcatgaaatgaagttgcatctttagaaagcaaacacattagctcggtggtgacatggaaggcgtaaccgcgttgttttgacctgttgtcacattgacattccttcttctgttgttggctttgagtaacctcgcaaccaagtccctgctgccttaaaaattaattatgataaggatttcttttcagttcagactgttcaagaatgcctcacgtgcaggctgcaaattatgaagtgtaaattagggcatcactgagcagggaaggtcccaagaaaccaatttaagaattctctccggctttactggggacctggaaatagtcccttctgaaggaagaacttgaaattagaatcgacttgtcattcaatttcactgcatattgggatcaacctttgggaaagaatgtactaaatatatctggacaaaaattttaaaaacttttttttactgcttattgtacagttttcacagctttacttaaaaataatcactaccagttttcagacacccttgtaagcatgccacatgtatattaactcacttttagcaattgtatgaaataggttttattattgttgcccccttcttccagatgaggcaactgaggcatggaaagtctaagttgcggagctcacggagctcgtaggtagcaggttggtctccatccagaggccttgttcctaaccttgaaatgacactgcctcaacaactggactccgtttctgaactcttctttcttccatttacaaaacggatggtagatagatggtttttaagctgtgatccataaaattaatttgttttctaccttccaaaatttgtcaacatctcttttctgctgtcgtggcctttcctgttcggttttgttcttgtgtgtgtacgtgtgtgtatgaattttttaaaatttctttactatcattttcttttcggaggtctgctcaggttgtgtaaagtattttgaaataggactttaggaagagaggtgctggagaagaaaaagaaaatattagtcactccttcacgtctttaaaattcttttttccagatcaccttatgtttgtacaagttaaagttgaatctcaaatgcctctgaatatagtataaaagttttcacagctgtggtcaatatggttgcattattctttccggctctttggtgatgtcctgtattaaggatgtagtgttctgaaaaattgtgctcactcctgagactttaaaaatggagtcaacaaagcccaatgacttttagtcaacaaagaaactaaaagttagaaatgagcactagatgagagaacaatgccactgtaaaatactcttttttaaaaaaatacacgcaaagcttcatatgttaataccccaagctccaagatggccaatttatttttgaaacaagaaacacctgtttattatcaaccataacaataatatgtttaattttgagagaatctttttggcagttgttaataagccatactgtaagatttaaaatagttttaatatattctaatggacttcttataaggcatgagaaaatatatttagatgttttctttgctttcacgtaagttcagcattaaacatatgccttccgttaactttagtcattatttcaccagattgtacttaatgaaaaaaagaaatttaacagttgtgtcactttatcttaccgtgttctgtaactcaagggaaaaactaagacaggattaacagtgacccacaagtacagtatatttttgaaaaagcagttttcacttgtaatgagtataaactaaaacacatgggaagaaaagaatccctataggtaaaaacctaagaatggtcattcaattctacttcacttagttgactggactaattttttctgtattttctttggttgcagtatctacaattaaatttaaaaagctaactaaaatttaaaacacatacacattaaaattagcaattcaactaggagctctttttgaaaaagtgaaaaagcaaaaatataaatgtaatgtttgttataaatttgagcattaaagtaccttaataaatctttaatggcaatttgcattttgatctttcccagatttgagtctttcagttaaagtcactctttctagcatttaccccttagaaagcaaatattgaaggaaattatcttcactgttgattttgattttttacacttttttttttcatttttgactattactatcatctctaggttgggcctatttttttaaaaaaaatgtacatgaccaaaaatatttaatgtaagaatgtttcaagcacatgtttaatatgaggactttgcatcaaccttgccaccatttaaagaaataatgcatggacaaaatcatacaatctgcctaaaacgaactaaattggcctctttttaagttaattccacggaaaagtaagtgtgtttgctagcggcaagatagggtatcaccatctttgtccctcttagttagccacagattattttatgattgttttaaagcaattgaggttaaaagaaattaaaagggagaaagagtagtaatgtagagaaaaatgctgtttttttgaactaattaaattttttgctggcattatgaaatcttaaaattatatttaacctcactagataagccccaattgagtatagaactattacgtaaaaactgacagttctctttgtgatgacatggtgtaatgtagaacaagaaagattttttgagatgtctcctcaaaattgaatacttgcacatcgatccttattttcagattgtatgagaatgtttatttttgcatttgtgactggtattaatgaggaaaatagtccaaggaaaaaactatatgattcattaactctttacttttcactccatcctagctgctgtgctgtttaaaaatggcttcagaagataagcaacagttttaaataatttgggtgattatgttggactccattatagtctctggagcaatatgttcattatttttatttctccaaaaaaagtcaaacaacaacccaaattgttctggttgcttaagacaatgactggaagcatttgtatttcctatatatcctaaatgctgagatctggtctaactcatattaacctcctctgtaaggatcacaaatcttcagataatctcctgtatcttagtaatttattttctgtcaaacatataaaacaaatcatgttaaaacattccattaaaaagggaggggcttggaggaaatttttccgttgtagtatgtgctgccttttctggagttcctgatgaaacacagatgtttcaaaagtgcccacaaggatggttagccatgatcagattgatccctggttactctctgaaacattgtgcttccattctttgtatcaaaatatattgccctctttcgcagaatgaattcaagtgaattttcaaccaaaacttcaattaaaaacactcaaagtgggctgggcatgatggctcccgcctgtaatcccagcgctttcggaggccgaggcaggcggatcacgaggtcaggagatcaagaccagcctgaccaacatggtgaaaccctgtctctactaaaaacacaaaaactagccagacgtcgtggcacacacctgtaatcccagctactcaggggactgaggcaggagaatcacttgaacccgggaagtggaggttgcagtgagctgtgatcgcaccattgcactccagcctaagagacagagcgagagtccatgtcaaaaaaaaaaaaaaaaaaaaaaacactcgaagtagaaattggaggtattagaatttttataatggcttataatgcatttcttcccaaaacgttctaaacataacttgtttgggagtaaatgtctcttttgactttaagcagggccaatatttacatgtgaaccataagttcagctcttgtggatactgtgcaatattctacagtgacaaagaaatcagtttacttgagaaagtaattggttgcgtgggtagctccttccaaaggcccatattggagaagaaccactgagaatgtagtattctatctagtttggaatctttgactttgaaaaactaatgaagaaagtatatgctatactagaaaaattctaaaatcaaagaaacaacctaaagaccattaagatagcttctaaagacaatgacggaggactgccattccatccttgatacttatgcagatctctttgcataaatataaagaaaaatgtgagtgaatgacttttcaaatcatcttgattttcttttcaaatgaccccaattagcaccatacttttattagaagttaaaatcaaattgggactaatctagtcattaatataaaatagttgcatgtatttcagaatatttaaactgtatcacaatatttattgcaatgtctttatatttttagggcccagatcatttcctttagctaatactgtataaaaacctcttattattccattatccagcctgataaggatttttaaatttgatgtgattctgaacctacagttaatactttgacgagtataatttaaatcataactaattgttgaatttatagaataaattcccagtctttccagacagaaattatagtacccctgtgttcattatctgttgaaaaatattgaatttctaaacatgtttccaaaatatttgcctttcagttttgcatacttgtatttctaattttcttccatgctgaggcatctgttcatgatttctagcttattttcaaaatctttttgtgttaatgttttggatttggtattcagattctttatgtgctgagggacttctggagacctactcacaataatgactttttggattcataaatttaactccagtataaacattattacttttttttcacttgggaaaatattcaactttttacttctactcattaaaccaaatctgtgttgttacttttgtttgttttgtctttacactttggacgttaggatatattaatggctgagatcacatttgcagtctctctgaaaattgatttttaaaatacaattctgattccagaatacagagggaaaactttacacgaccaaaagggagcttttgtttgttttagggagggatagtcatattttgagagaaacttatcctttcgaagagcaaggaagctggattccccaggatggaactacttggctctcttttctgcaacagaattgttgcattaaggtaaaagtcaggctgcggttatatgcattttctgttaatttactgaaaaatgctctccttccatttatattctttgtaaactgcaagtctaagagataatatatgttcccatctttatctatggctatagaaaatgacatagataaataccactttgtgctaaaaataagcctatagtaatacagaggtcagtcttgagtcatgcggtacacaaaacagactggattttgagtcatggcatctacacaaaatgcaatactgctgaatttttatattaagaggctttggctgaaggaattcagacacatacacagtatggacccagaaatcttgccaagaaaagttgagttgaaaatgtaggggaactgatccaagaataggccttaaacatgttgcatccattactcgcagctgtgtacatgagaagtgactttttatcccacctcccaaaaccctatccagcactgtcacttttttttttttttgccaacttgctgacctttctgttcccacaaaaggaaaatgtgattatttaaaacatttctgcaacaaaaaatgcatctaatgtatttgctataaatacaacacatttttaaagagaaatttcttataagttcagttttgtgagtaaatagtaattaatcaaaggtgtggagaaaaccaacctggattcagagagctaatggatactgcattaggtgcttttggaaagtaaagatttagaggaactccggttacttaagtgataaggaattattataaaggtacttggcaaagaaagaaaaagccagaaatccatttcagtagacctggaagaaatgaatgtcaatcaagacatgtcaacaattgttcactcaaggaagtgagagagcataaagagatgccataggtacctcactgtagccacctgtctagttcccatgtgctttgcttctcctgcttacgccaccactgctgactgatgttcccattttatctccacgttcactttcccaaagataggatctgatcaatttgatgagtctttatctagtatagagccagatcattttatggatgccaatagttggagttctttggtcagctattgattccgtcagtcaattggcatccaagttacaggagtgatgccatgaagccaagcagaaaatccaaaaaagtggcctttggaaggccttgcttgacttgtgcagcccctatatcttaaccataaatgtatatattagaataataaaaaatatttcgtaaaatataaggtgcattttaaaaataccttattttgttaaaatttcctagcacagtattttaatttctccaagaaataatataaaaaaattaaaagaggaataatttgtatcattgctattttttctgtctctgatggtaactaattcttactgagggtattgtgttgatataattgcttctctgttccagtaagcataatggatttatcctgttttatgtgtgtataaatatgtgtgacatacagggggaaaggtccagtatttcccagtgttaggaaatatctttgtttgtctattgacctaactgatcctaaggtagcttcatccaaagactcccaccatttccattatttttgtgggtgatatgtatttgatgattttagaactgttgataatcacaaacaggagacttacctttttgtctcccacactcaaaaagtgtgatttgccaattcacacacaactaaattgtgacagaaataatgacattattgaattagagaagaatttaggaaccccagaggtaatatcataggactgttaaacattatttggtattattggatataaaaactaactttaatttttatttgtatccatcaaaactgcttaatttttataacttttaaggcagtgtttatttctgctatatttgattgtgaagtttatttgcctacacatataaattgcataagcaatttcttctaaatgtgttgtagatgtttataatacaaatagaaatacttaagtacttattattacttatatcacagctatatttaaaattctttagatccaatattagttttttactaatttattgcctaaaatgactaattgaatttgacatttccattaatgccaaggagtaaaactgttttgccataacaacttaaatgaaattcaaatgattagttttgaagtttggaaaatttctaaatctttattaccatggaatccagtggtcatctaacagctgcagttgtattaaccatggtaattcaaaattgccacaaatttggttcaggtaccaacatttatttactcagtgcttacacatagtaccataagagattgaacgatgaataaaataggaacactgcctttgagatcttactagttcagcactgtaatagctatgttcctaaagtatctcatttaatacaacttaaaacaatccaatgacatgcgtatattactcctattttacagacatatttgaggctcaaaaaagttagttttctgaaaattacacatccagaaagtgtaagaggcagaatttgaactgaagcctgtctgactcctgcgtctgtggtctttagttttcaccattcttcaatgcagtattatcactgagtgacatgacgcagctgtgtttgtggtcgggaggataacataaggcagcaggtggaaaaaacatttgattcatttgcatttgctagtttatcattgtagagaaaaatgttattaggccacttcttctgcaaagaggcaaggtatatttgaggagcagattgtagcacacttaaaaagaacgactgtaggccgggcgcagtggctcacgcctgtaatcccagcactttaggaggccgaggcaggcggatcacgaggtcaggacatcaagaccatcctggctaacacggtgaaacactgtctctagtaaaaatacacaaaattagctgggcgtggtggcaggcacttgttgtcccagctactcgggaggctgaggcaggagaatcacttaaacccgggaaggggaggttgcagtgagccaagattgtgccactgcactccagcctgagcagcagagcaagactccatctcaaacgagaaaaaagagaaagattgtagagtgggttgaagaaaggcagtagattaagattaaaaagaaagtccagtgcctgaaggcacgctgctcatgtgtgtcctcctaaggatattaggtttggctttgtcgatcacaaagcagagatctgagcaggtttgtgtttttgaaagataactttgggctgggcgtggtggctcacgcctgtaatcccagcactgcaggagccgaggcgggcggatcacctgaggtcaggtgtttgagaccagtttgggcaacatggtgaaaccctgtctctactaaaaatacaaaaattaactgggcatggtggtgggcacctgtaatcccagctactcgggaggctaagataggagaatcacttgaacccaggaggtggagattgcagtgagccgagattgtgccattgcactccagcctgggtgacacagcaagactccatctctaaataaataaataaataaataaataaacaaacaaacaaacaaacaaataaataactgactttggtagcatggaaagggggtactgatgaggtgagaaaaggggagacaatgaatatttaggatgctattacaaagaaccaggtataaggtgataagggtctaggtctggatggtgctttcatgaatagaaaaggagggatgaggccgggcgtgggggctcatcctgtaatcccagcactttgggagaccgagacaggcggattatgaggtcaagagttcgagaccatcctggccaacatggtgaaaccccatctctactaaaaatacaaaaattagctgggcgtggtggcacatgcctgtagtcccagctactcaggaggctgaggcagaagaatagcttgaacccgggaggtggagcttgcagtgtgccgagatcgcgccactgcactccagctggcaacaaagcgagactccctctcaatacaaagaaaagaaaagaaaaggatgggtgagattcaagacctaactaaggaacaacagaagcatcaggatttgataatggattttacgtaggacttggaggaaagacaattgaaatttctaccttggttaactagatggagagctatgtgaactgagacactagggacacggggaatgcctgcaggggtcagggtggcaggtggcatttgactttggatgtgtcgcattagaattacttatgagtagccacagtaagcactggacatcatggtgtaatacaatcagaaatgaagagccagggccgggcatagtggtttacacctgtaatcccagcactttggaaggccaaggcaggcagatcacctgaggtcaggagtttgagaccagtctgggcaacatggtgaaaccccatctctactaaaaatagaaaaattacagagggtggtggcgggtgcctgtaatcccagttactcaggaggctgtggcagtagaatcgcttgaacctgggaggtggaggttgcagtgggccgagatccgagatcgcgctactgcactccagcctgggcaacagagaaagtctcaaaaaaaaaaaaaagaaagaaagaaaagaaaagaaaaaaagtaagagccaggggaatacaagagagaaagagattaatgttgattaattggtccaagaaggctttgagaagaagacgacatgaaatgccaaagaatagataaaatttctacgtgtaaaagttgagtaaaaaggcatttaaggtaggctaggaattcacaatgtgttttatgttcactattttgttggacatcaacctaaatttgcacccattttgatatatttttgttataattttctctgacatgcagaagtctttacattggattgtagtcaggttaaatgcttttgtatatgttaaatgctttgcatgatatacaacgttattccaccaacattaaaccaatcatgcttaacaatgtaaattatttttaggacaatatgtacaatgtaataactgctgtgataattatgttttcttcatacagtgaatatatacaaaagccaagtgatgaccaaccttgaggggacaggaaagatttcaggacagaagaggagacatctaagttaaggcatgaaggacaaataggtgttagccaaggaaggatgctcttccagacacagaggagaaatgtcctggccaaagtggtagaaaccacggctgaagccaaaactgcaaggagaggcgaggccacaaaggatcttacaggccctactaaggagcttggatgttatcccaatggcactggggggtcatttacagttttcaaatttttcatcagggaatggatttgggtgtgtgtgtgtgtgttttagtagagatggtttcactatgttggccaggctggtctttaactcctgacctcaggtgatctgcctgccttggcatcccaaagtgctgggattacaggcttgagccactgtgcctggccaggaagtgaataggatcctatttttaaacaggtgtttctgaatgcagtgtgaagaatgtgttggaggaaaacacaaatagaggaaggtatgatactgcattcaagtgaaagataatgattgcattagcagaggtagtgattgtggtgatggaaaatattttgaatctaaccagagggcctgtggatagatttcgcatggtgagtgggggaagacagtgccaataagagaagatgttggagaatggcatctagatattttcctgagcagttaagtggatagagaggtttcattcatggacgcagggaatgcaggatgagatacgagtttgtggaagaggactatttcagctttacaataggtgcttgtgggacatcctacagaagacattaaacaattggatatgagcctggctgaaaaccgaagtcatggaatagcataatttgtgaggtaaaccttggaagatggcagtgattatgaaagtcagagacaaagaaagaaggagacagaagaaagggaggacgagaggaagggcagctaagcaaaggaagtgacgtgatgtacagagggcagaaaaagggtaggggcatgactgagaaaaatcacttcgtcaagtgcaagataaaactcgagtggtctcctgaaataataggctgaggaatgggagttactctcaagtcagtagcattcaatgaggatttgaacatgggaggagcatttgcaaatatgtcattaggaagatttaactagaatatgggttggagtgtgaatacagaggccatgtaatagattattgagatatctaggatagttataatgagatttttgaaggagagtcattttgatggctgggtggcgtgatggctcatgcctgtaatcccagctctttgggagaccaaagtggaggatgacttgaggccaggagtttgagatcagccagtgcaacatagtgggaacccacctctacaaaacattttaaaaattaggctagcatggtggcatgcttgtagtccctgctgctcgggagactgaggcagaaggatcctttgaatttaggagtttgaggtcgcagtgagctaggattgcaccattgcaatctagcctgggtgacagaacaagaggctgcctccattaaaaaaaaaaaaggtagagtagtttcagaagaagtaaaaagaaaacatggatggaacagatcattgtgaaaatagaagtgctacaattacttctcattgaacatggtgaggaccgggaaaggaggtgactgagaatggtgataaccttgagaaaaaaaggcaaaatcagaagcaggacctgtttttggaaatatgtaacttgctctgcatgtagaactttatagttgtacttcatagaattaaaattaaataatagtatagctggctgggtgccatggctcacacctataatcccagtactttgggaggccaagatgggtggatcacctgaggtcaggagttcgagaaaagcctggccaacatggtgaaacaccgtatctactaacaatgcaaaaattagccgagcgtgatggtgggcacctgtagtctcagctactcgggagtctgaggcaggagaatcacttgaacccaggaggcagaagttgcagtgagccaagatcgcaccactgcactccagcctgggagacaaaaaaaaaaaaaccgtatattggtatactttatttttaaggttgcttttttctgcttgagcttatcaaattgcaccccagagattattatcagggtatatttttcttttaccacacactacaagagaaaaaagacttagaaatccattcacaaggaatctccaattagaggaccggtaatctttgccaagggtgatgattggtcatcttggctaggctggacctctacggagaagctgaaagacagccacacagctcagcctggggtctgagcatatcacttcagcagtgatcaacagaacaatgagtacaggaaaggcatggagcatttccacgggaattgccaggacacaagttgttcttttgctggcatctttgaagtctataaaaatataattctggaaatatcccaagaagaatctgatgcaaagtcaaacacatcgagaatgctagatgccatttccatttaagtaactgtccgttctgggggtgaggagaagtgtttgtcatagtctttgctggtggtctctccggttccacggttttatggaagttacggttttgttcagtagagtcaattctccctgccagaccactacagagagctattttccttcaactgtattgcttcagacagtctacaaatatggtgtttattacatgacttcttctatcttaagtgtttatactgcaggtgaattttttttcttctgtgacttgacttgtgagttggttgttattgttttcctttttcagcaagtctttatgccaggaaaaagcgttttgattcccaacaagccaacaagaaaaaagacgggggatcctagcctatagacccaagtgttaagatgctttttaagagaggggcaattggaagctgcttgtaatatggagattagatattctgtctccagcatgggaacagggctggcatcggtgaacaggcaactgcttgcctgcctgcctgccttccttgggccagataaaggcccagaaggagcagctgccagccgggaggaatgtgagaaaataggaaattgatttgaaatagaatagggaaaaaggcacaagaattaatttaagaattttcaaagattccctttttaggcatatgtagttcctgcctctgcagaggaaggtgatctttagctattttctcatgagattaaaaaggcatcaaactcacagttagtacatacataaggaagacctgaagttggtttatttctccataattggaagaaaattgaatatagatttatattttactctttggaaagtcttgttgatccttcagaaaaaaaaaagaaatggcatattataaatattctaactctaggcacaggaaaaatagtgctttttttttctttttactagatacagtgatattaattaaatttcacattaaccagagggggctggacagctttctgtttgactgtgaaggtcgtagggactctcattttctattgacagcagttcctttgctttaacagatgcctttaggcatatcataatgtctctctccacttctttgcttaagggagtatggggagtcatgttaacaatatttaggatcactaataagtaagggagatgtttcccttatccaaacggaccgagttccgagtgcgtaaccctgtgaataggatatcctgggagaacatcatggaaggggcaggattcacaacgactgcagctttgtctgtcttcggggtcatactcaccagctgccctgtgagaaggcaggggattgagcagtaagcttcgagttccttttaggttgcagcatttggtggtgctgcataatctcttctgttaggaaactggtgatgcgctctaacgtgtgtgacacatacaaagagcctcctatttgtggaacgccttatttcaagttgttgataagacaccgaatcattggaaaagagagatcttgcaaagtatgtacaccttcggtaggaagaataaaagcacatgatatggctgtggttagatccttgccaccaccaatttaataaacatatgataatataggtcacacacaccttgttacctctcttgacttctaaaaaatgcaccagtgcaattcttggccaggcatggtggctcacacctgtaatcccagcactttgggaggccaaggcgggcagatcatctgaggtcaggagttcgagaccagcctggccaacatggtgaaaccccatctctactaaaaatacaaaaattagccaggcgtggtggtgggcacctgttatcccagctactagggagtactagggaggctgaggcaggagaattgcttgaacccaggaggcggaggttacagtgagccaagactgtgccattgcactccagcctgggcagcaagaacgaaactccgcctccaaaaaaaaaaaaaaatgcaccagtgctattctcatgaaggaaagaacttctcaacttctcacctcttaaatgcattgaaatgtgcctactatcttaacacaccaaatgttaccatatggggtagaataaagacaaaaatagctgttctctaaatcgtatatgcattaagaagttaacatttggaaatagctgagtgagcttctttaattcattcttcaaaataaacaaaccaaagcttgatctgtaattttatagtggatagataggcaacaaactcaggagggtagaaagggaaaaaccttaagaaaatgaatgaattttaaaatacagctactgaggccagccatcgttgctcactcctgtaatcccagcactttgggaggcagaggtgggagaatcccttgagcctaggagttcaagatcagcctgggcaacatggcaaaaccttgtctctacaaaaaatacaaaaaaaatagctgatggctggctgggtgcggtggctcatgcctgtaatcccaacactttgggaggccaagtgggcagatcactcgaggtcaagagttagagaccagcctggccaacatggtgaaactccatctccactaaaaacataaaaaagttagccagacgtggtggtaggcgcttgtaatcccaactattctggaggctgaggcaggagaatcacttgaacccaggaggcagaggttgcagtgaggtgagatcgcaccaccgcacttcagcctggatgacagagcgagactccgtctaaaaaaaaaaaaaaatatctgggcgggcacctgtagtcccagctactccagaggctgagatgggaggattgcttgagcccaggaagcagtggttgcagtgagccgagatagcaccacagcactccagcctgagcaacagagcgagatcctgtctcaaataaataaataaataaataaagcaacagaaaactattatcctaagacattaaagaaactggaggaacctcctggatggccatttaaaggttgcaagtgatctgagagatttctttttagagggaaaaaatgagacccagataacttaagagttaccaaggttacacagctggtcagaagaataatatcctgaacccaggtttcctgatttctagagaatttatagagaagtagagaaattcttgaagggtgagctgtgatgtttctttgctcctttagtgtgcaaactatttaagctattttgtttcttttaaattattttattttgcagtgagttcatttttatcatcaactgcagtgaccattatttaagtagtctaaagcttaaagatatctgcttgtctgagtttcagccatgcattttcctggcgctggttatgaaactacatgtttttattaaagttggtagaaatcatcatcacgcaatagagtaagcttttttatggcatagatgcccagaaataatttaaggcctttctcactaatcataaattgctgttaatcagaaactgacttgttttttttccagttagaaaattcctcattctagccatccttatgaaaccctgccagaaattccttgaaggtaaatttgcccaacaaccactgtagaatacaaccaaaaaagatgcagttattcaacatacacttgtacctaactttgagaacatttttacttatgctggctgcttatatcatctgtactgaggctatcttagactctgtagttaaggtgacatagtgatatattgatctaatgagtaatattatgaaattaattctaaaatactctaacttcttctgccttaatttttaaaattcatttgaatgatcacattgtacaaagcttttgttgaaaatcttgcaaaggcctttggccaaaaataacatagttctacatatttttacagtggtttctatttcagtcaaatggccaccaaggatgataggctctgaaacatctggatggtccagtgtcaaaatctacacgtggacacttgcctttgtggtcaggatcttcagtttgccatggcctcaggagttacatttaacttgctcagcatcgattaatagatgcccttattttgcctttcaatgactccagatcttttgcaagactcaattccctctgtacagatacatctgtgaagtttgttatcactctgaagctgaaagtccccaggactagacagtaattgagttttccttacctgacagcctctgactctacctgtttttcactctcccttctctcctctttttagagaactctcttctcctatattacttactgtgtatgtttctatgatttcccttaagctgctgaagttgcccctagcaagaccctaagcacattggctttttataaaccaagacagaccctaggtagaaatttgcctaaaagaatttgtatattttttcctacagggtattttaaataatggaaatacggttttctactttagttttaatctagggatgtcctgtgacgattaaacaaggcatttcatgtgaaagaacctaaggtgtttcaggcacataataggcattcaataaatgtgagaggaattcaaatctagaaggtttgaagaaaaaatctggtgtgtaaactagctgtctctatttccccaccatccacttggttttcaatacccattacctctgacattcaccccattattctactagaattattctcctttagatcgaaaattgcttcttcctgccaatttcaagaccttttcttcaatcattagaagtattaatctgtaacatgtatctttgttaaccatcacccacaccattccctgtcccaattcttgaaatctctacttggggcttcttcgtcgttttacactgcagattctctccaacttcccagacggtgccttctgtctccccattgggtgaacttcctctctctggcccctctatgtaagcatccaccaagattccagcttggctggttgctgtcttcgtttactcattgcctctgaaatctcatctgctctcgtaagtatcactgttagggaaccaggttagtaaatctacattatagaacgaaacccccttcttccagctgcaaactcctggtgggcaccttttttttttttttttttgacggagtctcgctctgttgcccaggctggagtgcagccgtgcgatctcggctcactgcaacctccgcctctcgggttcaagcgattctctgcctcagcctcccaagtaactgggactacaggcacgcaccaccacgcccagctaatttttttgtatttttagtagagacggggtgtcaccatcttggccaggctggtcttgaactcctgacctcatgatccacccgcctcggcctcccaaagtgctgggattacaggcgtgagccactgcagctggctctgatgggcacctttaaatacagatagccaaagcaatgctcacttcactccatttcgtttctctacgccatttgtcttatcatagagctttctactcttcctgggcctacatgtctagatctacagcctgatgactcaaaggtgatggttctcagctacctccacccccagtcctacagaggaagttcagagaagagcctttaagaagatgaaagagatgaaaaacagacccatgaggaaatggtagtaataatgagtttaacatgacgatgtggattttaagggaagatttgagaataattatcattaagtatatgaaaggtccttattgagaaaatggtgaccagctgctcctcacttctgcggaagaccgtgcggaaggcattgagcataaattgtagctctagaggtttttttttttttcgacttttatttcaggtttggggatacatgtgaaggtttgttacataagtaaacacgtgtcacggggtttgttgtagatattatcccatcacccaggtattaagcccagttcccgatagttaccttttctgcttaagttagagactcttaaaatagaattgccctcagtaaacaatgtaaaacattgtaatgtattacttggaatggctatggcacggaagggcttttttttaaccaaataaattcatctgtgtgtggtgtaatttagactggattatatctgagagcgatctgggagggtatcacaaaattagatcatgtattaagtttatgttcggttttataatcctgtaatttttataaacaaaaaatgtatgtatagatttttctaaaataatgaccttgaactatcaatggtgctaggtgacattaggtcacagcctctgccctcgtgaggtttatgttagcttaggagtatgtgagagagacacagacagacagacagaaagagaaaaagaaaacaataattacagaatagtgtgatgtatacataggaaagaatcattttaatcagcaagcaattttttaaaatctggattcttcatttccattgacccatccattcatccatccatccactcattcccaaaccagcatttattttatttattattattttttgagatggagtctcgctctgttgcccaggctggagtgcagtggtgcaatctccgctcaccacaacctctgcctcccaggttcaagtgatcctcctgcctcagcctccctagtagctgggactacaggcacgtgccaccacgcccagctaatttttgtatttttagtagagatggggtttcactatgttggccaggctggtcttgaactcctgacctgatgatctgcctgcctcgaactcctgaccttgtgatctgcccacctctgactcccaaagtgctgggattataggcgtgagccactgtacctggcccaaaccagcatttatttggtgtctcttttgtgcaagacactatgccaaatgttaagaaatcagcaaagaaatcgtccctatgctcgtatgttcgtggtctggaaggagctacagacaagtagacagggagcagaatatagtacgatgaaggcaggaaaagagtatttacggagctgaatgggaatgcagaagaggggcccataaactattcttggtgaatcaggcaaggctaaatggaagaactgacttctaagccaagttatgagcaagcagaaattggtcagctaaaatgcagaggtatggagcatgtacttcctctatccacaatgatgcataaatatatgtgcatactcataaatcgtgttcacaaagtcagaaaatcctgaaaaacacattctatatgactatatcatgaaaacacctgaaattaataattattatctaaatttatttgtcaataaagatatgttaaactatttgcaaaaatatcttagtacatatggattcttttgaaatggttgatattataaattgtaaagggttaatataaaagtttgtgtgatttctatgttctgtccactgcataaaggatttgatctatgcacggctattgccactatagacaactacccatctgacaacaccactgcactagtcaccaatgaataattcttcctttctaaacaatcaaaacaaagtacttatagtaatacatttaatttcaaagatttttgacattcaaccaaaaatgcttggtctttttgtttgtttgcttgtttttttagagatagagtcttgctttgtcacccaggctggagtgcagtggcacaatcatggctcactgcaacctccacctccgaggctcaagtgatcctcctgcctcagcctccagactaactgggactacaggcatatgccagcacactcgactaatttgtgtgtgtgtgtgtgtgtgtacatatgtgtgtgtgtgtgtgtgtatatacacatatatatacatatatatacatacatacatatatacacacacacacacacacacacacacacacacatatatatatatatgggttcttttctgtagagatgtagtttcgccatgttgctcaggctggtcttgaactcctgggctcaaatgatccatcatctcagccttccaaagtgttagattacaggcatgagccaccgtgtctggcctgagaaccaacacaagtgttttgggaatgggtgaatggaatgatggttggaaacagatggtccagattgaagaatttgctccataattaaaaacaattcaatcatctttatttatcacacttccatttctttatcttggactgccaaagaatacattcaaaatactccccaaaatgtattcatattatcaaagcctaaaagtcaggtgaaccccaataagttgccaagcatagacacatactgccatccctgggtgggcctaggaattagtgtgtctgcagcccctgaatccaatgtgccagggataagcagcactccctctagcttggccactcctgtccttccctagtcatggaggttactgataaaactaggcttccatatacttctctgtgctatagattgtcttctaacattgttggacacctgatggcttgacttgggttgggtcctcagctcttgctacgtactcagttcctggcatccacagccccagctaactcttgctggccatctggatttctcttgaagctctgccctcctgcctctctcctgctctcaccaccaggtaggaatgatgtccctacctcacccccttccctcctacttggatagttgccaggacaggactgaagctcactaagcctttcgtatacagcacattgcttgactgccccctacaaagagtccagacctcatcacacacacccagatcctgcttcctcctcctccctgcctgcccaggctgtagaggacccagtaggctcctgcccaaggtcatctgaattaggacaaaattaaggaccagtgcttttggcaagcagtggacatgattggatatctaaagaaagagccctaagtcttcatcatgtatcagattccacaaagcatttggtttttggggggtgaaataatttaacacctttaaaagtaaagagaactcacctttagaaatgatttcagatgtgggtcatttattattgtgaaataaatatgtctattgtgggtggatttttccatagggtaaatcaaagaaagaatcacctagctattacactagccttttagatttactgtagacatctgtgaaaaattatgaattggcctttattacaagactttgttttcaaacctttatttctgttccaatgtaaatgataatcgaactttactggagaaaagacccatgattttaaatatagttttatgtcagcttatagttttacatcagagtccatatagctgttagaaagttatgtgctactgacaaaataacagttggcaaaacataagacaaaatctacaattttattcacaggatctaactaatgtaccattattattaccaattgatctcagtgtgctataattttggtaacaatttctttgatatgcttttaaaaatatatatatatttacaaataaaggtataatttttaagagtcagtctaaacagactagattctagagggacagacatatattgacctacgacaatccctaattccggtgtttaggaatgtttgttagccatttttttcctctataagattacagctctcagaggatactaatattggcctatttgtttcctgacctcttgaggtaatttgaaaacacaggagaaatcgaggactatccctttttttattttgctccttctcaaatccacaagttatcaatttttaaatggaatattatgtttccaaatctttggtggggcttatcctgataaattttatttaaacggtgaactacactcctaacaaccagctttcttttttgttgcgatggagttttgctcttcctgcccagctgcccaggctggaatgcaatggcgcgatctgggctcactgcaacctgcaacctccacctcccatgttcaagtgattctcctgccctagcctctcgagtagctgggattacagggggatgccaacacacccggctaattttttgtatttttagtggagatggggtttcactatgttggccaggctggtctcgaactcctgacctcaggtgatccacccacctcggcctcccaaagtgctgggattacaggtgtgagccaccgtgcctggccaataaccagctttaactattgagtcaatactgtctaaatatttagagaaatggttaagcggcaggctcctgagtccatcaaacctggaactgtgtttaggcccaagcactctgtaactatgtgggcacatgattaacttctctaagctccagttcttcatctataaaatgggatgatattactcttctcatatgagattagaaaattaaataaaaatggtgtgtatcaaatgccagtcataaaatgaagtgcttagtgttagctttaatcataatcatctatttagtatagctatgagtgtttgattttgattttgtattagcacctctgacaatgtggatttggtacttaataattagcgggaaaggtaataatctcagtgtcggttacaattcgatttttcttcaaggtttttgtcctaaggagagagaggtcagaagcattcttaatatgaagctaagttggtgccagtttgaagtaacagctcatttgtggactttttatttttttttttaaatacaatttgctttgatttggtttggttcatgcatttttaaaaatcttcctcgtggtgttcggtcattagatttttatgcctaaagaactgaattcagttttaagtaaaattcatttaatattccaagtatgattccacgtggttattcattcacaacataaaatagccacataattcaatatatttgatagtgtctgctcatggaactgtggggaattccgcagatcttagacaagaattgcttaagttatagaaggcgatatccataatgctaattatctctgacatcatcgatatggcaaactatagtagaagaaaacagaagttgaacgtgggcctcattacacgtctctgtggaactctttggtggactcctgtatttaaaagacggcagtgatttaatgtatgcatgggggtgtccacaaaactgtgtatcttttcttgggaagatatatgtggaaaccatccttcacttttcaacaatagaaattgtttaaaaccatgtctcttcctctgcctttgccccatgggctgctactgctactgctcagcttcgttcagtgtaaatccttgattattctcaaaggatcccatctttgtctaatttggaaatacataattagttttgtattcagaaaaggtggaactagatatacatgtagaatactccagtacactccaatataaaattttgcctaacctgtatgtaatacttatatctaattagcattttaaatggaaattttaataaatgctatcaatcagtgaccaatttacatagcattcatctggggaaatgagcaggtcagaggatcagtcttcttgagattcatcttgacccaaacaatggtttaagatcttaaaacctttcattcttccattagtgtgcttatctttctgcattcgaacgttctagtccaagtccagatttgctaacttgtggttgtcaaaaatcaaggagtgcatttttgaagcatagacaagcccccaggtcctagcactttttttttttttttaagagacggagtctccctatattgctcaggttggtcttgaactcctgggctcaagcagtctgcctgcctccatctcccaaaatgctgggattagagacatgagacatgccgcccagcctcttggcaaattttaaccgtgtaatgttctgccaatttaattcttcaaagattccaattgaacaacatcatcttcatcctctgccctagttatatggtgtttatttgcagttacttcaggtgaccccccacccccctcagaagacacatgcattgcattgatttgtgaaatgatccttttcaaaacattaagacttaaggaagatatttgcttaagagcttagaagttttgcagtgcccaacaacatacctattgttctattttttgacccaatttactaaagagaaagaatttcaaaaccctgaaataacttcaaaatttatacagtgtcaaaggaatgtctaaattttaaataaccgccttgtgtttaaataatttctatgatatcttcatagtgtcccaattaaagggtgaatatattgatcattaacggaggaatagacaggctggttgtgacgttgtaatagagtgtgtttgtgagtcacgattttagagacccagagttagtgatagaaaaaaaaaaaaactaaggtgtggagactgcttaaaccctgagcggcgttagatatttccatgtatgaggatggatgtcttagacgtaatggaaaatgagaaagaaaagtatctacaaagaggtagaagagctgtattcatattcttgtagcattgggtataaaaagcgacaaaagtcaaggtaaagctagtatgttcaagaagataaggaaattactgttgttgttgaatcatgggaatgaggaaagcattttgtctttactggaggaaagaccgtgggggaagagagaaattctaattgcagtctgctaatcttactgataaatgaaaagagaacactgatccttcctttcttaaagtattaattttttggtttgggtctgtatttagaaggtagttaaaatatggaatgagagctgataaagatatgttgttgatactggtattgtgatgtaaggtgcttcatgttttccttgtttctttataaaaatgagaggtttggagggattggaagaaagcaccggtgaatctaaaaattcacgaacattcagtcattcaattctcagtttaatggaggaagaggctggaggggatggaatgttctggaagaaaaattaaaggaaggacgttggactggaagcaatgcaaaaataatgataatagtggatctggaggggaaaaaacacaattttttataaaaatttaagtgatgcaatgttgaagtatgttttatttaaaagtaaagctagttagaacaccacatgagctattccggatcagggctgtccagccctggtatatcatggagagtggctcgggccacttgcacacatgccttcagcccctggtaccgtcttctctccccgggtcgcgacactgactcgtcaacgttaatgggggtccgcgactgctgcggggacgagggcgcagagcagcccccgccacgggccggtccacgcaggggccgagaaagtggcggagaggcggtggccgaggcccaggggcgagcgcgggctgagctggtccctgctgcgttcacgagcgacacccaccccttcgctgcggacgccccgcgggcgccaggctgggggccctgcgaccgacccctcccgcccccgaggtaccgccgggcccgcctggcaggcagcgcgtcccgcgagctggagggccgagtttcgcggggccgtggggcgtgtgggtgaaggcgacacctcggatgcgggacgcatgaatggtggcagagcaggggtcgggatccgttcatgggttgggagagagatgcttttgtgagcacgggaaagtagcgctgccggagaacagctctgaggcgggatcaaaagccgccggcgaagccccgccgaggaacacggccgctgcccggggcggctcgcgagcgtgcgtgtgtggaggggaggatgccgccccgcggggtcttcggagggtgccgggagcgggttctcagtgcagttcccccgtcttcgctgggggcacggctgctcacaggccccggcccgcgtgtgtggagcggggcgagggggtgaggcgagggggtgaggcggcggccgagccggggcgctgggcgcggggctggcgggaggcggcggtggcggcccggcgcgaaggggttaagcggcgcaccgccccctcggcggccgggtgtaaacagaggagcctcagcctatcatgtctggccgccgcgcgcagcccgagcccggagccaggcgctgtaacacgatacgctccagacccaggcaacttggcagcgctgggctcggttcctcacggccacagcgagggcgcgccgcggcaaggtgggtgagcggcggcggcggcggcggcctggggcgggctggcggagcgcggctcccggtgaggctccccgcgcggcagggtcgctcgctcgctccggggaccgcggcggtggcggtggcggtggtggcggcggcggcggcggcggctccgctcttctcccttgtggtgtcggaatgggaggaggctcggcgcgggtttgaatcggtgcggaggcaacattcgcatctgagatgaggtggctttttaacccctgagggaccacatttaaggatttcgaagagatggaggctgaactttctcgatgactcttcgtcacccggagtggtgcaggtagccgcggggagaatggagtcttttgttcccggtatttttaattagatggattttttttttatgagtagtgtactgtcctaatccgtgaggcaaagctgcccttttgcctgcattcggtgacttttacgaattcgttgggagctagtcttagcagtagtgattttggataatttatgtctgaaatgtgcaaaaatcggcattgagcttaaattaataagccctttggttccattaactaaaatccatcatactaattgcttaatgggggaaaaggtacaaaataagcttgctcattaaagagcagtcttttgcctgcgaaatacgtagtgtgatttttgtcaggtttaatagagcagtctctcagagaaattcaactttgcagttgtgcttcgatgcaggctactcctgtgcaaagatagttggagatggtttggaaaaacttgtgctgtatctgttgaagtaaaaatcatttgccattgatgtgtgtagttcaataaaacaaagatctgtggcagctgtgggaatgagaaagtcacatttcctccctctcctgtgctggcgtctctgtctctctggaatatcttataaatgatatatacagctatatgtgcctgtgtcacaaagtcattctgtcttctgaaagcctaatataatcaaattcagtgccttaagatggtgtagttgaagatttgatccccttccactaaagtggaaatactttcagtaattgaaagcagattcacgtctggagttgtacaagccaaggttttcatttttaaaataaaccttttgttctctggttttaaatgtttcagagagccatccaaagacctctgtgtgctaattgttaaagtagtacttaagaaaggattgcaaatacccagagaaggcatttaagaaatcagctaacttaactaagcctccctctcagccgaatattttagtgcagcatgtactggtctgtgccccacattgttttgtttttgttttttttttccagcggactcccaggtattaaaatgcgactgcagcgttcaaaacactctaggcagaggccatctgctataagaggttaaaaaacttgagaaatgttggtgttatcccattttatactgtgatttacacaatgtgatgatgaatttgagatccgctataaagtatgtttaatttaaagaggtggtgattatacattaactgagagactgaaactcacaaaaatatgaatgcaggtggttcacctggttcctttctctcatcttcagagactaagtgttaaaaagctttaaaaaattggctgtgaaagactgaaattagggtacattctagacaaagagggagtcacttgatctcttattagctgtgaagatagagaagaatagtgctgtataagagcgttaccttccttcttcaggacatgatatctaaaatgagttgtttaattatgaggaaaaagttaaaagagttgtacttttaacaatgacagttgacatcaggaaaagatagaaaggcgcattccaaatgtttttaatgactagtttcttaacctgttgtattgatcattaataagatgtgaatggacgtatttccagagtatgacatggcagtttgatttcttagaaactgctcggtagccctgcattttaccttgttttcttgccttctcagtagtttatcattgcagcacattatagtaaatatggccataattcaaatgatattcttgttattatgtaaaagccctcttttataaaaaaatatttaaagtattcagcagatttttaattaccaaataaaatcatactaaattttggctgttgcgtcacgtttcttagatagcagtggcctagtgtggggcataatagaatttaattcttctcgaagatttagaaaaagaaaagcgacttcacatggactcttctactgatgtctgaacactgattttcagtgtaatatccttgtctaaacatttaaactaaagctttttgtggcttctatttactgttagtttttatgttcctacatatttttacttggttaaaggggtgcacaggatcttctggcatctggaataatacattcaatttttcacgggactcctttctttcataacgtaggcaagtggcaaaggaggcactgtctaaatacagtgatcctgataattaatgctgtaaaatagattaaaatgctgtatttcaggtattcattcccttaaaagggccaccagaacagcgttgctaagcacccgtcactactgcaagtaacagaaaatgacccaaattaaagaacctgttctaagctgtattcttgcattttctaaagttcatttcaaaagatttaacaagactcattcaattagtggggaaaaaagatctgttttcagctctgatcagcaattaagagactgggctttggaacatcagttctttatgtttataatttatttcgtttggtaggctttactttaaacaattgtgaataaagatttttaacaagccacctttctagcaatccagatgtaaatgctaaatacaggacaatatatttgttttaaatttttattaaaatgagttattttatagtaactttgcctcatttaaagaaagtttaaatttcacactaatatgatatattaatgctttattatggatttcttactctgtgaaaatctatatgtatacatgcacacatacagacatatgtagtttagattaaaggatggctgtaattattctatcttatcatagatgtgagtgctttagcacctaacacttgagaaataggatgttcttccttaaggatatttgaatgttgtgggaaaatggtaccatgaaggagatagaatggtttggtgaagaaagtaaataaataaattattaggagcagaagttttctttttagattttttttttggcaggggacggggggcgggggggtgtccagtaaactgtacccttctgggttagaccagaacttctaagtagttgtggccaaatggttagatctttcagtggcctggttcttagctaacacaactgcagtcacaaatacaagctgcggaacttcctggcagagagaaaggaatgaaaggataagggctattagaggagtgggagagaggagcaggcgggttcccaaaggttcagattaggatcattagtgaaattttttgctggatcactttgatctagacaaatctaaagcatataaatatggattttaagttatgaatgataagtgctattttggctataatcacgtgaagtgattcatatccagaaacattgactgttttaaagcccaagtaacacacttctttattctaaagagatgttttgcattagaaatttattatgcttagatttatcaatttggtatgacagatagttctagcaatagataatgtgcaataaataaaagttgtataactcttgttggagttttgtctgagatgaaaagttattctaatactcatttttgcataaggccttttgacctgaattgagttctcttgttgggtatttggaataccttgtcttctgatatgtccgagtttggttttccctataaagaataacaatgtgtgtactatagagattatttttatatgtgtatatatatatatatatgcatacatatatagcaggtttgaaaggatggtattttcatatttaagaaaccagttgttttaggattgttgtttatacattgatttttgttacagacccagctcttcagttgaaatcctatgtatttaagttttgaaatgtctactcttaatttttactgttgaaagtaaaaattttactattggcagttgttttgcaggttgaaaaccactacctttttggtctcccagaaacagtttatgccacagatgttatgttggtacgatggtaaattcattttacaagggaggaataataattgaaaagtacacgcaaatatttgtgggcatgtcacatttaaataatagttaaatttgggaaacgacatactatagtatttaaaagaaaaacagagtttctctcttaaatgttatcattcccctcacttaatattaaatagtgtttgacataaatgtcttggtttgtacattgaggaggcagaatatattacaaaatgtaacaaaatgactaatatgggactaacataaaaaacactttagtcttttgtggttatatatattaacttaaaatttgtaaaaaattaaaacgatgtgtggaagtttcagtgagttgttttcatcctggtttgtgcacagtgcctttttttccttaaccttaaactgcagggagagatggggcctgctgtctagagacctgtaaaatgtaatctggatctctttttatgccttttcttttaaataaaacaaaattaccttatataacaagtttaacattgttaaccttttataattatctaaccattatttcattttacctcctgcttcaaagttgtaaccttttataattatttaaccattatttcattttaccttctgcttcaaagttgtacattagcggagtagacacctggctgagctcttaaaagtttatttggctttcaattcctgtgatagtagggggcagtacatctccttaattatctttgttcagggaaatgctgaaaggccagggtagttaaacaaggccatttggatttgtgaggtcgaagtcagatgcaaggaaagtggttaaatgcattatcatcttattgagcccatcatcagtaaagtgaccttgatggaggtggaaaaagccatttggctattttatgacagccacccctgcttgttttatcatttacacatttttacatatggctttatcatattctttcttttcgttttcaaatattatttcctctgattgtagatcgtcagaatgaaggtgaaaattaaaattagtttctttttaatgatagttagagtttctttcataagtgtgtttcatacatcgatttatatggaaataccccttcattaaaaatgaaggtgatcaggttagctaaccattctgtatttgcttttaagggtcttttaatgatgatgattagtctttttgcaaagaagctgcaattctgctacttttcaaactgtttttaagctagtaagaggaaagacttgccaacctcgattttagcagtgggaataatgtttgttttaacaagtgcctaagtatgtttacttgaaagttattcaagttttagtagttctattgctgccgttctggagtcatcacttccattacgaaattaaaacaaagtcataagatttatagtttatatttcttaactttatggccaagattttccttgtgatgtattttatatcaactccaataaaatggcattcttgcttatatgtttgaacaagtattgttcaataagaggaagagttttattaaacgcagtacaagagctaacgtttttggaaactccagttaaagcaattaagtgctgcatacaagatttttgttttcctaggcaaagctgtgaaacattactgattggagtttagcgtatgcttcactttatactgaattctcttttgttacaattaatgggagctgagtatgaatctttttatcatatgaaagaaaaaactggcccattaccaaaatacctaaaataatatttcatactttattggagatatctccttatcatcatgctatgaattatgtaacactaaaatctcagggactcaagatcatcaaaaatagttcgttcaggagagagtcacattttcttgatcagaaaggacttatttgtttaagaatcatttatttaaagaacaaattggatcaaaaggtgtttaaaatgaagtataaactctcattcccccactctgttcccaccatcagggcccaaattcaagctctcttcagttctccttagactaagctttccatttgggttgccctgccttctgcctgtcttttctttaatccagcctccacactgtcgtcacagttgtcattctgagttgtgttttatcagtcccttggtgaccatacctcaccctctactgctcctccactcccaccttcgcaccagtattttcgctggtcggtgctgcctgtgccccttccttgcatctcacagagtttccaagagctgacttgcatggtatttcttttttttttttttttttttttttttgagaccgagtctcactaggctgaccaggctggagtgcagtggcatgatctcgcctcactgcagcctccgcctcccgggttcaagcgattctcctgcctcagcctcccgagtagctgggattacaggcgtgcaccaacacacccagctaattttgtgtattttagtagagacagggtctcaccatgttggccaggctggtctcgaactcctgacctcaggtgatccacccgcctcagcctcccaaagtgctgggatgataggcatgagccaccgcacccggccttgcacagcatttcttgtggctcctcctcctctcgggcttccttagcacctgattcttatttctgtgagcacttaacacattatcctgtagtcatttgtttacatttctgtctcccccactagggggacaggttctttcagaaaaccactttgtctcattcgtccttacataccagcactaagcatgatgctaagaaaatagttattccataagtctcgaatgcttattggatgagtacactaaatataatttaattttgtggtgatggaaggtcattacaaacatcagttattttattgttctgtgtgaaaatataatggcttacataggagctgataaggctgagtatccctgtctaactggcctgtccgtgctgtcagctttcacttcttactactgctctgtcatcaaacaacacaggttattttgttgttgttattgtaatgtatgaatgaaataagaacagaaaggttctgagtaaagactcagagctaatttcattaacttcattagttttggcttctctgaagaccttttggcttaatgcctccatttctttgcattttctgttgggtgagattttggggtagctaagttccgataggtgttaggtgtttaggtgaagcaaaatgttaatttccacaatgaaaagaagttcattgaagcctaacagtaagtttgagtaagaaaaaaatgttaacttacatgtacagttaacttgaaatgtatatacattgataaagatactcatgattataattttttaaaaactggtaaacatcatatctaatgcaactctctttggatgactaaagtagggaagagataatctttaagatgataatttagaacaagaatcagtacaccttccgtgattgtgttaccagaagattaataggtgaggaatgttggaaggactgacaaatgttttgccgtcgagagatttacaggtgaggagtactagaagaagaggaaaagaaactccgtatttctgctctcttgctccatcttcatctaccttaagaacaaaaacagctgggcccggcatggtggctcatgcctgtaatcccagcacattgggaggccgaggcaagtggatcacctcaggtcaggagttcaagaccagcctggccaacatggagaaacctggtctttactaaaaatacgaacaaattagccgggcgtggtgacatgcgcctgtaatcccagctactcggaaggctgaggcaggagaatctcttgcacctgggaggcggaggttgcagtgagccgagattgtgccactgcactccaacctgggtgacagagcaagactctgtctctcaaaaaaaaaaaaaaaagaacaaaaaccccacaatactctaaaaaccaattttactttttcctgagaaaatgaatagaattagagacttttagaactgaagataatcttcaaaattatgtaatccagactggacattttctaagaagagaagccaaggcctaataatagctgacatttattatttactgaaagataagcatctgtgttaaacccattatatatgatttcatctcatcttcagaacaactcatgaaattaaatacttttatgatctctattttaaagatatggaaactaagtcatagaacagttaagttggttgttagtgagaggtttgaacccagacatgcaaatacctaaatcatgtatatctttttttttttttttttgaggatagaccttgtctcgatacctagactggagtgcattggcatgaacacggctcaccacagcctccaactcctaggcacaagtgatcctctcacctcagccttgccaatggttgggaccacaggtgtgtgccaccatgcccagctaattttttaaatattgttttgtagaaaaagggtcccaccatattgcctagactagtttcctagctccttggctcacgcagtcctcctgcctcggcctcctaagtgttggattacaggcgcgagccaccacatccggcctgtctttcttcattactgaattctgcatccagtgcagttgtcaaattaggttttgttttgattttagtcctaaattttgctttacatgtaagttctatttcctattctagaatagaaatatgataccagtctataacttttcataaacgttgtaaccattggatgttacaaacattctcatatttgctcaaggcaaatcatttaatttatcaagtgcttattgaggcaatatatgttttgtattgttctcctgtttttgtttttaattcagattttttaaatgaggtgtgatcatctatggtatagctaatgtccactctctgattaatatctagcaaggattagcatcattgatttgaaaattaatagattatgcttttattgacatttctattccccattgaatggcttgtttatttaattgatggctaatgtttttactattaaaggctattaacacatcagaatggtttttattgaacctggcaaaatgatagattatgtttgtgtttactcctttgtgcctaaggctaattattggtggtctttttatggttttggtcaactaaaaccttccggttaggaagttgagtaaattagcaaacttatctggtggtgtgaccttggaaaagtcgctggacttttctggattgctacctgtaaaaggagggaagtgaaccagatcaatgattttgaacagcgtagcttcttgtagaagttctgtagagtttcttcaattctctgattcagaattcttaaaaaaaaatcaaactaaagtggtaataaaacataatgtgaacaaataaaatagatactaaatgtttacatttgctactgggttagtttatttttccatacatgtcctgctttctttgtgtatgtatttgtactttttgtggtattttggtgaatgcagcttgcctaaggaataagaagtgacagcatcctctgcagagaaatcctaggaaaaaaggagtgtgcttactcaccagcttccagggaaatggttgtgctatggactgcatatgcctgccacttttggtatttggtcgtaatagagattctaaaaatgaagggggttgtccttattatgaatagattgttacttttccaatgttccgttatagtaccattcaccaaacttttttgaaactacttttttgaaattgcgtttatttccaagtcacagataaaaatagttcttgttattataggcattcctcattttgatgaaataccaatttaactagtttgattgcttgccttccttcacaggcttgactaaccagcatttcaaaaaaattagatctattcccgagagagtatttaccacagttaattatattcagaaaaaaataatgctaaaagcctgtgaggccttttcaaaagagaaatttctcagtattatattgagaaatgacttctgaaaaaggcaacaactcctgtgttgaccactttgaaagcaatagtattcatctcggtgaattctggagtttttaagagttgagtgacaatacattatagccctttcacgtgtcatgattaagggctgaaccagaatggtgtctttaatgggtagaacaattaaattttggaattcagaatctaaggctttatacattagttatttttaatgtgcaattgtttgttttaaacaagattcgtggccttttttaaactatgaaggtctgtgaatgtatgataatatgtttgatttctttaaagtatatttaaatttcatgcatattacatttcatacaaaggcaaagctcagtcttcacttctgtgcttccagttaggaataggagattcaaagtacaaagtctttcaaaaattgaaaaaaaaattatttgctttcatgctgagatatcagtataaacacccgatttattcaaatacttatttatctattaatattagtcattaatactgattaatacttgagtttttcaggagttgggcatcagaattgtaaacttaaagtatttgtctcacttcagttgaggcagaatgaatagaattaaatattcaagatttcaaaaatatatttattaaaaaagttgatagtatcttttcagttaaaaataacctccttgtgtattttttgtaaaattcatcgccagcccccatttccaggaatatctcaattagcaataaggggatgtctccttctaaatgcctgtggtgtactttaaattctaacgaggtaccttgttggaaggagaccacttgaaggttttattaacctctgcagtgtgaaagtgaaaacacgctgaaacgagacagctagttctacattctgataaaacaatagatcatcatcatgaccctaggacagaggacgtaaaaattgaataaagaaaggtacatttgaaacaatacattgaattatttatctatgtcttaagctcacatagaatataattctatgtatattagacttatctgtttaagacaatttattttatatgacttagccataatctgataacatgacaatgtcccagagcctgattcacatggtaccagaatatatgtccgtcacaaaaataaacctgcttctatcatgggggaaaacatttggggtggcaagctgaagtacacagtaaatgtactagagttctgtgagtgagaaaatatataccagctatacactagcggttgcctgtgaaaggatggaaagaaacaaaatgaaggagagacaagagaggggtgatagtggtgtttagctgtctctaaattttatttttttaaataaagcaggatatctaatgtaaacaacagtctgtgacattatttcatatgctatttaacacacaacagctacttctcataaatgtaagagcacaaacccatttatatatttcggtgatgttattaactagtattgcactttatttctttttaaaatgatgcttaacccagtaatcactgaattttagttgtacttagtcatgattagtgtaaaaatgtttttctataaaataagaattaatatgtaatatttaactgcagtctattttaggaacttactaatttcttaaggaaaattaattcataaatttaaaaagggaatttacgcagcatttgttgaaaacctactatttgctacctagtaagcgctttatcatcctattcataatcatataattttgagtccatttagactaatttctttccacttacatagtcaatccataatcaacagctactgactctaaaaaccagattttttggatctgtttattataatgcaatcacaatcataatttataatatcttcattcactttcctgccttaaacttttctctttaatccaaaaaagcaaattatcttgcttgggcatcacctgatcttctctctcccctgctcagaaagtcagtgtcatatcaagaagatgcttgagtctgattgaagtacaggtaggcttatggacaagtgacaggagaaggcttttcaggtggagaggcacatgagcaagttttaaaaggtggggtatgaaaagtatattggagaaaatatcaaatgacctacttcgagcatgaagttcacgaaagagaattttggaagataaggttagaaaagtgggttggaaccagaacatggaggaccatgaatttcagatcaaaaggtttaaatgtacctttgagatccctgggaatttagcatagaaaacaatcacacagtagtacggtgtgtttgggggaagatctctctggtagatgctgttagatgaattataaaagcaaggtagtattaatagaagtagagaaacccatttggactcttcctactattactttcaattcatgacttcttcttaaacttattaagaacagtttaccaaagtaaacttcacaaaggcaggggacttctgttcactctggtatcttcagagcctagaacagtgcctggcactggttgatgctcagcgggtacttgttgaattgaatgaatgagacccagaaagaccaagtgactgttttgaattcacacagctaagatagggacagatccaggcctaaaaattgcactcccagtttgctgttttcttgacatgctaggctgtcgtacaggtcattactattagcgtggctttttctttgtcaactcttgtcaactcttaccctaaattcttctgaactcttcttgcaagtgattgcaaactgcctcatatcttacatactcatcacagcctcctctgagctttttttttttttttccaaattgagacagggtctctgtcatccaggctgcagtacagtggtgcaatcatagcttactgtaacctttaacttccaggctgtaatgatcctcctgcctcagcctccagtctggcccacacattgccacacctggccaatttttaaattttcagtaaagactgagtctcgctacgttgcccaaggctggtctcaaactcctgggctcaaacaatcctcccacctcaacctcccaaagtgctgggattacaggcatgagccactgctcccggcctaggatcttaataggttgcttttatctacagacttaatgggttgaattgtttattgttacttttttcagatggtaaatcccaggtcagagactgtcttctgcttgttttatttttcagcagccctcctctctgaacagccgcactcagaacgcctttgagtgcagaagctggttgactgattgcccagcctccaagtctgtcttttagttcaagttcttatggcattacaaatatgtagttaaaactgtttttgtcagattggtaaaggaccacttaaatttacttgatatggccaggtggacggatcacctgaggtcaggagttggcgaccaggctggccaacatggtgaaaccctgactctactaaaaatacaaaaattagctgggtgtggtggtgggcgcctgtgatcccagctacttggaaggctgaggcaggagaatcactagaacctgggaggcagaggttgcagtgagctgagaccgcaccaccgcactccagcctgagtgacagggtgagactccatctcaaaaaaaaaaggaaaaatttacttgataattttgtaatactgatcactctgtataggcagggcattggttccaggactcccctcctcctacaccaaaatccatgtatactaaaggcctgcagtcatcctacacaacccacatctagtcagccctccccgtgtgcaggttctgcatcccataattttgatctgcgtttggttgaaacaatcctcgtgtacatggtcccagctggttcaagcctgtgttgttcaagggtcaaccgtagttgaaacaaatagaaaaatgaaaattttaatttttttaagctctctactgaaagtaatagtcttgtgagcctaaattatttatcattttgcaacttaaaagaaaaaaaaaactcggtgttactctgtttgattctgtgagatcaccttgaaataagataccacgtaatgagaactattgtgtgaaaccactacaaaaactgtgagatggccactgtcatttattgtgtagattttacctagtaagatcattagtcagtgtgttgctttatttcagtaggaaagtgcaatgggtgcaatactttagaccatgtagtatcactttttttttttttcttgagatggaatctcactctgtcgcccaggctggagtgcagtggtgcgatctctgctcactgcaaactccacctcccgagttcaagcgattcgaatcaagtagctgggattacaggcgcctgccactgcgcctggctaatttttttttttttttgagacagagttttgctcttgctgcccaggctggagtgcagtggcgcaatctcggctcaccgcaacctcggcctcctgggttcaagtgattctcctgcctcagccttccgagtagctgggattacaggcatgcgccaccatgcccagctaattttgtatttttagtaaatatggggtttctccatgttggtcaggctggtctcgaactccgacctcaggtgatccacccgcctcggcctcccaaggtgctgagattacaggtgtgagccaccgtgcccagccgtagtatcacttttgtgtgtattttgttataatttctttccctgaaaaaaaactattcattaaatgtaacagaggctcttattaagattaatacaatagtaaggaataaatgctcttaaatagaccaagaaattgctacacttttataaacatatataattgttcatgaatcattaacctttaaatttagagatgtttccctcacagttgaaaggagaaaagctaaaaatactgtattaatgatatagtgactttctctacaatatgaactattcagctatgagtcaaagaagtcgatattattataacttatcagatttaacattaaaaaattatacagtacttctttttttgagacagaatctcactctgtcacccaggctagagtgcagtggtgcaatcttggctcactgcaacctccgcctcccgggttcaagtgattctcctgactcagcctcccgagtagctgggattacagtcgcctgctgccatgtccagctaatttttgtatttttagtagagacagggtttcaccatgttggccagcctggtctccaactcctgacctcaggtgatccgcccatctctgcctcccaaagtgctgggattacaggcgtgagccaccacgccaggcctgttacaatacttttaatctcaaaatgaattaaaaatactagagtatgaactaggtttatattaaatatgacagtaatatgtagttctagaaggtatcgatttagtattttaaaggttatgaagttacaaaataaaaatttttaggcttttcatgctatggaaagagatgatatcagagaaatatgtttatgttttctgtgagataggttttgtgagagaaccatagttctgtattgtactggtttttacttataacctattaccttataaactgttgttttgtacataataaataagactaataaaatttttttgcttattcaattagaaggtttttaaatatgtcccttctcaccccctaatgatcagtattcccttcctgtgttcattcttttgatgtttactgctgaattaaccaggtttttgtctttaaaggttctttggcatattatagaaacaacttctgtgataatgtcattgaggtactttttgcagagtggggcaagggaagggtatgttgattaataactcttaggagagttgcataaaatattttctcaacctattgaagttagtttctagtaatgtctttcttaaggaaagagtttgagcacagtaaaataaatatttgcactgggtttatataaattactaagatcaaacattaaaatggtcagaatgcttgtgtcctcctaaaatttgtatgttgaaacctaatcctcactgggagggtatgaggagcttggaaccttgggaggtgattaggtcccgaggacttcaggaaggggactggtccatgatgaaaaaggaggctcctttgccccggctgctgtgtggagggagactcagggagcacacggctgtgtctgaatgaggaaacatgccttagtagacactgaatctcctggcaccttgaacgtggatttccagcccgttagaactgtgagataaaaatttctgttgtttgtaacccaccccgtttatggaattttttttatagcggccggatctaaaatatggggcaaataaataaatgattttaccaaagtcttagggaattagaatactccccccagctatttataaaaaaagtatactgctagagtcttcaattcaatttaataagtatttactgagtacctactatgtttctgacatcggtgctttattattaataatataagatacaggaaattcactactaaccatatacactgttgtaagaaagtaaaagcaacagtttttataatactgtaactcatataatttaataaatattgaccagttgcatataaaataaaatgtctttaaagtttttttagttttaacatttttattgagaatgttttcttctatttttttaatataagaggccaaagtacacccaagtctcatttctctattaagcttgactaaacatagataaacctgaactattattgaaggctgaaaccaaagtacgttatggtttattaggctgttaggctgatggattagtttaaacctcaatgtaaatcaccaaagaatacatgaagacaaaacaaaagcactgtatgggtgcaagaaagatgtaattcttcattcactgggtttttatgcatttaagggtatgattgttccctagggctcccataatgaattgctcagtctgagtggcttaaaacaacagaattgtagtctctcacagttttagaggctagacatccaaaatcaaggtgttgacacagccatgcttcctctgaatactctagggaagaatcctcccctgctttttccaacttctggttgcccagacattctttggcttgtacctgcatcattttacctccattttcatgtggacttctttcttctgtgtctctgtgaggctcaggtgatcctcccacctcagcctcccaggtagctgggactgcaggtgtgtgccaccatgcctggctaattttttttatattttttgtggaggtggggtctccctatattgctgaggctggtcttgactcctgggctcaagcgatcctcctgccttggcctcccaaagtgctgggattacaggtgtgagccagtttccagcctctgcgtgtccatttatcttataagaaccctgtctttggatttagagctgctctaatccagaatgacctcatcttaaccaattatacgccaaggaccatatttccaaataaggtcacattccgagcttcttggtggccatgaattttgagggcacgctttccaacttactacagaggaaaaggatacaagaaggtaaaaaaatgcttctctttgctgtcttcagttttttttttttttcctttcccattccttagggggtttagatacgttagaattgagcattcttgccttcacactcctattctttaaagatattttatctgccaaaactgacttatgtttcttttctcccaagagtctcacattatgggaagtgctagtaagccagccatagaattttgaatgtttgctattcaatcataggggaaattaaaatttagtttttatgctttttttatttcagaattttaaaaactagaaacaaaaattctggagactgccatactctagttgtggcactcaaaatgtagttataaaccttctggtggtaaattaagcatcttagagtatcctagtcattagttataataaactttatgtgagtatggtctgttgcctcaatttctctttaaggtttaaacttacaaactttttaatgtaaaagagaaatgatataagtgaactttatgattgtcaacaaagctgatttgtaatttattttgaaaattatctttggctttcagttttaagtggcaaaactgataccataaataccaaaactgatatccataaatatacataaagcatattttgataaacacatgacgtatttatctgtaagaatgaagggatatctaggccaggaatttcaagaggtttgtcatcatttttcaagacaataaatgatatcctgggatctaaagtgttatgttcccgaggaatgatgcatgagatccttttctgagagcagctattggttaattagatatgggaaagccctttcagagaagtggacttaaggaggccacagagaagagaagagcctcaggcacacactgtgtctggcctacaactccactttgggtcacccctgccagtaggagagtctatatatgaactataatgacatggaatatagtttaaacccatctttatgaacacgcaccctgtaaagatccaatctggtaattagagtgttagagtggtttatgcctttttaggggagcaggatagaggtggaggatgggaaggggttctaaatcagggacttcaatctgatattttgtagtgtttgtaaatgggtgtcatctactgagattcctcattcaggcataagagaatgtcctcctttcctcaggttgcacaggaagaggagaaagaatgggtgatgatcttacctatgaaacttaaattcataataatatgaataggcattacatttatgaaaaccttttgccagtttaaaaatgttttaggccgggcctggtggctcatgcctgtaatcccagcacttggggagtctgaggtgggaggatcgcttgagcccaggagtttgagaccaacctgggtaatgtaggggagactgtctctacaaaaaaatgcaaactattaaaaaggcattacataacaaaagttactttgttaacttgtttttatacaaaattaggatgctccgtatatttgacagtggtcagatttccgctgtgggtggggctgtgtggtttaagctcaaggtaaggtatatatgctgtgctggatgccagaagacatgagtcctgatctgtgctcagctaccaactacatgacttgggctggataacaaaaccctaacagacgcctcaaagaccttcaaaagcaatggtttggattttttttagttctgaaattcttccgttatccttttatttaaactaacacataacatctgcatttcaggtgtctgttagtattgatcagaattgtattgtttgtctactactacctggaaatgttcctgatgatgaaaataaaacattcccttgttatgatctgcttttttggttctgttgatttgtttagcagaatagcagcttggcatcatactacttttaggagactttccttcaatactatgttaggctctgtacccataagttctttcattatttttcaggagtcttcaagtaaattgaaaataaaaaaaatcctgtgtgcttgtgtgtgtgtgtgtgtgtgtgtgtgtgtgtgtgtgtgtgtgtgtgtatgtgcatgttgattaggctattaacatcgtgtcttcttttttccaatactaataatcactaatttatctatattttgaactattggccagttactctgagttaaagaaaaaattaatctctatatggatttaaaacaaagatcagtaaatcaatgacgatgagatgattttaggatcttttttacttagccagaagggtcatcaactgatttttgaaagttatgtttgtttgtgcatctccaatggaaacattatttgtgattagtttatttttattcttaagtattcttgataagcatctgaatgtctgcctgaatgaatttgaaaaactaaaacaagctgagatttaatgtctctgttttagtgttagtctctgctatcatatgccccaatttcataattttattgtaataaaattaaagcattaattgctgcatttttagttcacgtaattcatatttcatatattaaagttcagaagagttatttgtaactctagatagagaaggacttaaccaagatcttgaggaaatgaagacccaaagaagtgaagagatttaggccaagcacggtggctcatgcttgcagtcccaacactttgggaggctgaggcaggcatatcacttgaggtcaggagttcaagaccagcctggccaacatggcgaaaccctgtctcaactaaaaatgcaaaatgagccgggcatggtggcgctcacctgtagtcccaggtactcaggaggctgaggcaagagaattgcttgaacctgggaggcggaggttgcagtgagcagagatcatgccactgcactccagcttgggcaacagagcgagactctgtctcaaaaaaaaaaaaaaaagagaactggaagccagctttctggatgcttaaccagtattctctccattataccaatagtttgttaaaataatggcatttgctttagagaaattcaagtagctttctggtctgtgtgatatctatgtaaaatcctgttttataacataaatgtaaacagtgattttaatgatatttttttctgttgtctcagatatcccaggacatctggaagagttcctataaattttagttttttaattacaaaatatccagcggggacagggccattttagaaatgagtaatgaaatcatagagttagaaagaatcccaagtgaccgtgaatgctaacttgtcccttgggtaaggtcatcatttaaaaaagtacgaaaccattttatatgctgtagaaactggcttcgtaatgggcccctaaagtcatttatctgtttgtactgtcctaagcaagtcatttattaactagtgaaaataatatgtaagtgttctgttgtaaatgtgatgatcaaaaactatagtaaacagagaaaggcaacccctaatttatgtaaacctgtattttagaagtttgtttataattcagaaagtattttctcacaatatcttagtttcccagggtaatccatacattctatttaaccccgtttaacatatgaatgataagaaggaccatcccgaaattcttgttctcaattctagttctgaatgccaagaacacagctcctttggttaagcatctggacttcaacctgaccacttgcactagaccatagaataggatgtatgtagaatttcaaaatgaggaaaggagagggaaaaacatacattaatggctgctaagagaagagaaaagggtcatatccttggttactctttgccaaaaataaaaataaaacacattgtaaggaccaccatgcttttgagctcctgtagacaccaggcaaggatttgccataggacatttgtgtcagttagggtgtatccattatgtagaaagctctaaaacttcaccatgggaatgtgggaatgggtctgttctgagaccttttcaatgttgtaagtcattagagaactagcctcaaaccaaaactctccatgattcccaggtaaattgcaacacatttagttgcatagctctgaaacttttccatttgaatacaacaattaccgggtgttcaggaaattagatttgttgcaatattttaagtgatttaaatgaagatcagtattattttttagtatagaaatcttctagtaacagagtttaccacgtccgtcaatgtgaatacaattatatttgcctcgaattttatttgcatttgtttttctgcctattttcttgtggaaattttaatgagcagtgaaatgaccaaaagctgggccacggagaggaaaataaagataatctaaaacatgtttaattatcctcagcataatacacacttcactgtaatagggataatgcaagaacattcagattatctaaacacatttaaaaatggccttccagtgttaggagcataagtatgccactatgaattgtgtgtgtatgatgaactttcttacacagtcatgtgttgcctaaagacatggatgcagtctaagaaaatctcattgttaggtgatgtcattgtagtgctacgatcactgagtgtacttacacaaaccaagatggtatagcctactgcatacttaggctgtatggtatagcctgttactcctaggctgcaaacctgtacagcagagtactctactgaataccttaggcagttgtagcacaatggtatgtattggtgtatctaagcagaaaagatacagtaaaaatataatattacaatcttatgagaccagcatcatcatatatgtggttcatcattgaaatgttatgtggcacatgcctctgtgtgtgtgtgtgtgtgtgtgtgtaagtatatgtttataacatgtataaatgcttttacttataaagtaattatattataaaataaacatgtcatgaaatagtgtacttaagaaataatccgaggtgaatagattatttaagcactattccttaggatagcacagtacatcatatgtcttattcacctgttttcttaaaaattgtattcagaagtcaacttttattttaaaacctcattaaatcatccttataagcaaaggtaattaagatggtgtcatttcattttagtgagttatagttctctggactctccctctgtcactgtttccaattagaatttctctaaaagttacaagagtagttaattttaattactaaaaatacctagggggaaatttgttgagtggactcttgaatttcaagggatttttgtcttgcaagtaaattatagagcagaggctataaattagttctccattctttttagaccttgaactttttattattctgcctaaatgtaactgtaacttccattttctcatcttaaaatttgcaaatttatgttctctatatttctttcatgattagcaagaggtctctgtcttacatattttttgaaccttactttctcaatttactaatttgtaatttctactctaatctttattaatccccttctttttcttagacataattatggctattaatatgctgctaaatgcaactttgtccccattccatgtgtaggtgttctttttaaaattgttctgtgtacattttgtgattgaatatttgattttctagacattttgatttttactatttaaaactttctaggtttaattcattgataacagaaaatgtggcttggatatgtaagctttttaaagatttgtaagggttttctttgcctcttacatagtgatcttcaaactttttgcttacatactcactaaaagaatttgatgaactcaataccctcctacacattttaaagttgaagtcaaatacttttcatcacaagtaaaaataattgcaaaggattaatttccagtgtatgacaaatattgatattttaaataaattgttatatcacaatttttttttaagagagtctcgttctgttgctaggctggagtgcaatggcatgatcatagctcattacagctttgacctcctgggatcaagctatcctctcacctcagcctcccaagtagctaggactaaaggtgcatgccatcatgcccggttaattgtatcattttgttgttgttgtggagacagagtcttgctatgttgttcaggctggtctggaactgctggcctctattatatcatgactattcagtgtccattgataattataaacaaatactatatgctcttccaatcggatgctcaccatcaggtatttattaataatttacgaaactcctcaacactagaatattttacattatttcttctctttgaaatttgtattttcattccacatttcctggaatattttaatataatatacctttattcttgaaattcctttattgttcaacttactgtacccttctgcaacaaatgcagccatatatatatttggaaaatgtctatggcttcaaggtcctaagagatagaaacaaagatcttctttgaatttcagaaacaaatgctcttctttgagttccaaatactgttataatctgtacacacttgatccaaaaccaaacatgtacgctctaataaaaaattattgtttataaaaactggccgggtgccgtggctcatgcctgtaatcccagcactttgggaggccaaggcgggtggatcacgaagtcaggagatcgagaccatgctggctaacacagtgaaaccccgtctctactaaaaatacaaaaaattagccaggcgtggtggcgggtgcctgtagtcccagctactcgggaggctgaggcaagtgaatggcgtgaactagggaggcggagcttgcagtgagccgagatcgcgccgctgcactccagcctgggcgacagagcgagacttcatctaaaaaaaaataaaataaaataaaaaatttgtggccaggcactgtggctccgcaattttggaggccgaggtgggaggattgcttaaggccaggggtttgggcaacatatgagaccctgtctctacaaaaaataagaatattagcaaggtatgttggcaccacctgtagtcccagctactctggaggctgaggctggaggatagcttgaactcaggagttcaaggttgcagtgagctatgattgtgccactgcactccagcctgggccacaaagtgagaccctgtctccaaaaataattttaaatataaataaataaaattgtattggaaatgtatctcctgatgagatgaggtggtaattataattgttcgtggctctttgatttgctgctctagaatgggcattgcctcatggtaagtttctaggtagatgagaaaagaagctcttctgtaggtaccagatcagccaagtcaatataagggcctgaaatgaattcctttgcaactgttcaggcttacctaccccttagaaattttttactcacaggattatagataccatggcttgaagaccactggtctaatagatggtacatttttatgtatgatcatattatgattattaatgcacttgaaaatattcttatttgtaggcatcagcatttgctctctatgcattcaaccatatttaaatgtatgatttagatgagtgagtgtaattcagctagggcactatttagcattgtggatgggataattcctctttttgagaaactgtctcttatattttagggacatcacttagtctaagtatccttagaggctaacagacattgtggcaactcaaaaacttcacaccccgtttccagacattctcaggcaatgagaactgtcccagattgaaaattaccgacataaatcccaaacatcctttttaagcctgtttgcttctttagaggtttaaaagacctgttaaactgttttgtttctgttctttgtgtgcatatttcttactgttttgctttattgacacatagagttcatgcctattatattttcattgtaggctgtaaccttaatatatatccttttttatctaagtgaatgctttcttctatcataattctattttatttgatattaatattgtatccccttctttttaattgaacttacctggtttatgtgtgcctctagctttgcatttaaccttcccattatcgctgctccctaatgctgttgtcctcttgtgcataatggttgcaagtcacattgtcccatctctctgagacctactcgtatctacacacttcagctcttcaaaagagttgatgttagtcatgcttcattaaaatttcccccatataagtcctctgaactgcaagggcttctgaagatgggcagtgcacacttattggaggtaccttccttccactagtcacaactgctgtggatccagcagaaattcctcactatttctggaataggaggactcctttagtggtaggttaccccctggtttggtatctttaagtcgtttcatttcatattagaacggaagactgttagatgcctatgcctaagttgccgtcttatttgaaagttggttattttttaaaaaattattctttttaaaatatatcagtgattatcaaattatgtaaatacaaaactggtcgtggaatggagaatgggtgtgtctactattggtgtatattacttatttaaaactgatcaatttttttttttctgggtcagttttgtgaaagtgtaacttactcaacagaatgacttgatggaagttgtagtgaacaaatcatatcattgatgacgggggtgtgtttttatatgcctaataatgttagactgaaatgccataatactagaggaaatttagaaagcattttgtagctcttaaaagattgatactttggtagcttgcattattagaaaccagaacatctatctgcatacatatacatacttctttattcagttcataaatttaacttgtgaaaatgacaagtagtagcaagctcacactcgggatttaatcttcactgactaattcatcagacattttacctttctgtagtcacagatggttttaatgtctgtctgtattgaacaatcactcagatgtgtccatcttcgtctttattggataaataataattcagtatccctcaagtgactatgataattggattccagaagagaattcaaggcttctaggtactatcatattcaaaatttgatctctgtgttccagtctctctcgtacatttgaatattttccagcttaagtggaatatatgggacagtagtattttgtgtaaattacttagaatagattttgtagagaagccctaagtgtaacctctttgctttttaaaaatggcatttgccattccaaagtaagtccctggtggtgttacttgactcattccaaaatgacctacacttgattaagtgaagtctcatctaatagctgaaactccccagagatttttagtggctgtttaaaatgaatgtctgtatttaaacccattttagtctatagccaacctttatttcctctatatccagaggcagaaaacagatgtatttcttttttcatctcttgttggtaaaaacagatagatgttgtggcagtggttatgtgtatgacttttaattgtttgggtttggagagaagaaaaacctgatagcatattaaagtatttaagacaggcttgatgatttctgtgatgctggagaaatgtatatttttattgtcaatgttttgaagagttagaaaatgtttatttttaaagaatggtactaagagcataaaatttcagcagtccattctatgttttcaagatttatgtatattatatatagaaacatacatgtgtgtatatgtatctatatatttggacacacatatatttcatttctcaagtttttattgctgtaattctctgaatttactcatgctttccttaggagcctctatatcaactgcagaagtgaacttttaggtctgacagtgagctgaacaatacttccacggataaagtacatggtcttgaagatcagctgctgtaaatgttataagaacttattatcgatgggagaagctgaagaataccatctctcctgttgtctcacaggaggtcattactgacattggttttgacatacttgaatcttcagaaaggttattattgtccacttcttaaagtttagtctgaacaggcttgttctacttctaaacccaattgaaatgagtctgtgttcaacactgtttataaggttctccatgccagaggacagccgctatctatagcagaatgaagatgaggcagaactatttccgtgagatatttttacttcaaatatttatttcaaggattgtgccacagttagtattttaatttgtttttagtagtgaccttggctgctgtgtatattggtacagtgtgctagaggcagcacttttcactgtccattttcttcaaaatctacgatttgatcaaaaccttcaagcactttacagtctagaacctttgaaatgactagagagttgtatagggattgttaccttgggtagaaagagccttgtatgagcatcctgggtgactgttttctgagttttacccggaaggaagtgtgaagacactgtcttccgtcttttgccgtcatcagcgttccaccttcattgagaccctgcaagaccctggcagccttggcttccaggcatggtttacaccatgtgaaagcaaacaagtaaacacaaatatcaagcctaaatttattttttatggtcacagagttcctaaaggttaaaaactttcagaatgggtctgcatagggccctcccaccggcctcctgaatccctcctccagtgactttcctgtcaggtttataatgtcttttcgttctttatttcttgattgcattctatgattttcccctaagacaagctgtatgattaaattacccaagtttccaggattatacttttctttacatagcacaagctgtttaatacattttgtatctgagatgcaacaaatcacatctgagatacacagataaacagcagttcatctactttattttttaatacttatttttaataatcaaataaaatcatactttatgtctttaaatcatatttttaattacagaaagtgaatattgaaaaacaaagtaaaaaataatgaataaaattatgcagatgctctggaaaatacctggagagaacctgtgactaatttggtacaaagcagaacaaatgttaatttagttatagattatatatacttttatatcataccaattgtcaattttacacatagtgagaactgtttcaactgtaaaatgtctttcaggaacaaatctgaatattaatttagcttacttgtttctgtggaacttaaacacttttgcacttttctttagaattttgaattttaaaaaattaaaaataacttttgtaattgaggtaataatcctcatttgtagtgttgaaaatattattttcatactactctcattctttaaaaataaacactaaaaataaccagtccagtaaaattaaagaattagtcaaattttttctaatgtcatgtgaaaatttattgactattttattttttgaaatattagtgccattgtagtgccagttaaaatatttaatggttgatgtacggtactttgctaatattcattctgcttatgtcattcttataatatttttaggaaaaaaatttgagtttcatatgtagagttttttttttaataattaatctcctgtaaagaagtgtgccatatggtgtaaaattttgctgtactatttttcaagatttttttgtagccctcaccgtgagtcttcccaatcacaggctttcatccttatacagtgacttgactctttgccactagagggcagtaaaaaaatttatatgttaataaatataccattgtagcatttttttaggcttttgtactattgttctagaatatcaaccctggaaagtttatctagatgtctgctcttcaaccagaaaggaaatacacaaacctgggtaaatttatcttcaaatctttatggattatacttaaattttgtgttggttatattaaaactagttatgatattatagataaaatattatttaatcatgcagagtttctagaaatgtatggttttaaagtactccttttgttttattagggtggggattattttaggaatggaagacttttatgattgatggttgttggctaaattttattggatagattcttatttggtacattttatttactagtatattttacttgaaggaatgtttgtcttttaaaatgtttttcaattttttgaaaattgtagttggaaactaaaagattcagtacgtaaaatactttggacccaatacttgtcataattttccttaacaatatagttaagtgttcagtttagtttcctgttagacacaaaatacagtcttttagcttggcaagttaaaagtctgtaattttcagaagtgggtagaattactgagggatagaaatgttaaaattttctaatgatactatacatgtttataatttatttagttctgtgatgaaataccaaagaccacttttatggattagtcaggctacgtttttatattaacttacctttttatttattttattttaatataaataaattcatgaatttgacgattataaatatatttattatagtcagcccatcatccccagaacactgcagcctaaactcaggcttatgagtacttaattactaaattggaaagtgtagcatcttgttaaaacagcaaggcttatgatatcgaatgtgtaattttgaagaaatgaggaatgccatttgtttttattaagctgggatttgagtgtttgaagaaagcattgagggaggcatttctttagaaactgaagtaataatcctcatttgtagtgttgaaaatactatttttacagtactctgactctttataaataaccataggatctactgataaattgttttttgtcattttccattctatggagaattctacgtaacttcaaaattagaagtaaatatttttgatctcttaatggagtataattttcttgtgagggaaaacccaatatatattgatttaggatttctgagatataagaaccttttttatgatattgatattctgtaaaaacaaataaacggatggaattataaagtctttttccctgaagtgttgcctgcacgtttagaaaataaatgtatttagaaaagacaaaagtaaagaatagttattttttttcacataatctattaatatattgtattcttccttgggtatgatggatagcaacaggaagtatttgattatagtttcaaaaattgtatcaacagtattctgttttgagaattacgatctatattattgtagaattttaaaagtggttttccagatatcacatttttaatctctctgagctgtgtggaagattcacttattttggtcatgctaagcttccttagtgaaattggcactaaaaataaaaccaataataataatttaacaagtaaaatcttgagtggagtctagaattttacagtaatttagcaagatatcttaagtttcactctcccagtctttcaaactgaagccttttgcaaatatagctgctggaggctcttggtatcgttaattgtttgctaaaatatcctagaaacacagcaggccagttttctaatgatgtttttcaaaatcacaatttccttttgccaaagtgtgaaagaattgtttttgaaatacagtttttaagtttgcttgtaggccttaagtaactaatatattaacacatttgctttaaattcatatatatgcatatatatttaattttaaaaagtgtcttcgtaaagatgaaaagttaaaatttggttctaattctatttggaactctgtatctttgaaaacagtactatttaatgaacaattggttgtatcattttaatttttcttttttttgaaaaatcaaagcatatagatattttatgaaattttcttaggcttcttgtattttaactctgaatttatgtggtggatctctagacacaatatgaattttctgtcaatgactaaaatatggttttattatgtcaaatctgaactgacatatttttaggcaattgtttcagggaacagagaattgggtatttgattttgagatatacggagtcattttattgagtttgaaaggcacaagtagttgagagagtttcctttttttctgttaaatactagtctatttgaagagtcgttttcttttctttctttctttcttttttaatataatcctcttatctattgcttggggttagaagttgagaaattgcattttgccaaagtgaataattgagaatttgtaacacagactctgaaaaataattcagagagaggccaagagagtttctataacaagtcgtaaatatattttttaaagaaacagactgaaaaactaatttctaaatcaagatttaaatgtaacaataaacaaggagttaaagagaaagtccagatataaacctaaaagttaaatcgcttttctttatcttgaactttgtgacaataaagaagacacctcattttctcttttactttaccttgacttttctgaaattcttatgaaataagtatagctcctgttagttatctgttttaaacaatcttttgtgcttaaagattcattattcagtagggtaaatcctcacctttacacttacgttgagatttttttaaaattatttttctactttaaaatatgattataggccgggcacggtggctcacacctgtaatcccagcactttgggaggccgaagcagacggattgcctgagctcaggcgttcacgaccggcctgagcaacacggtgaaaccccgtctctactaaaatacacaaaattagccaggcatggctgtgtgcacctgtagtcccagctactgggaaggctgaggcaggagaattgtttgagcccaggaggcaagggtttcagtgagccgagatggtgccactgcactgcagcctgggcaacagagtgagactcttgtctcaaaaatcaatcactcactcaatacaataaaatacaatacaattataatttacttctaacaataacttaatgattttttgctttatatcaaaatttaagaagtgatattttctttgttactttctttcatttctggttattgtaatggaaggcaaaatatgacataccaaagaagtaaatttctctagacagtgcacaacactgaagtaaatgcagatactgtatcttaattgagtatatttaaatgcaatgttaattaaacttatacttcagtttttacctatgaacctaaaacaaaagccaccaattatacattgaattttattaaatattgtatctataacttataaaaataatgtaaattcagtgattttcattgagacatgctgacctagaatcactcactgaaaaataggttttgaagggtaactcttattttactataaatacgtttggcttaattacaataatgcttttcaatttatggttccttttctttcaaaataaggataaagtaaacctagttattaatatgcttatatctatattgtagattttttgtatgttcctatgaacataatacatacattgattttatttgccttttaataacatgggcagaatgtaatgtggaaggtaccaccactaattgtgattttaaaaaaattacccttcagtgtaatcctgcaactattattgtggaatatatcaatatgattaaattttggcattgcagaacagaatcttcactgcactgtaggttagaatacaagaaaaattgaaaataaaatgagaaaatttctttcttaaccttttgcaattttagtataattttgctaacctgtgaaaatgtctacacataggcattgtcttgtacatggcaagacagcattgtctctgacacacctgcattatttgagatgtatgcattcatgtcagttcttttcagaaacagtaggtaggtattacacaggaatatggtctatttttatggccttctcccataagatgccttctttgtaacatatcacagtgtacttaaaagaggtcattaaaattaaaaagatccaaggaagcagttacgagtgtagaccttcaatatatgaattaattttggatttcagattccttttagatttgttttagctctctacatgtcatatacttaaagttttcattgaaattaagaatattacccaaattttcatattgctttaggaatatttacaggaaaagaaaaagaacatgtttgttcttcagctatttttttctttacggagcatatcatcaccacaatttcatattcaagctttaaagcagaactcattaatgcatgtttcatatgcgttgccaaaaatacaaaattgttttcttgctttatctagtgctgagatttttagctggactaacaacattgtgtttgtctctatggcacattatcaacgtgtctctgtagcagaaatagtagatggttggaataaatagtagacgtgcactggtgtgtgtttatgtttatgtaacagtaccattttccagagctatcatttaataccagcactttatgccatattgaaggacagttgcaagccaatgacttgatgctagtttgtagtcacatagttaatgtaagagcctaaaggatcaagcaactcagcttctcaaatattagggtcatttgataccagttctcctagatgtgatttaaccattgtttctagaaattagaaatggaactactatactaataacaaaaggagcaatgtgtgatcccatatatctcaacaatgaggtatgtctaggaaggtatagcaatataacaagattgtcagtatatccattagtatgtctgtgtattagtctgttctcacattgctataaaaaaactacctgatactggtagtttttctttataaagaaaaggggtttcattggctcacagttccacaggctgtacaggaagtatggctggggaggcctcaagagacttagaatcatggtaggaggcaaagaggaatgaggcatgtcttacatagccagagcaggaggaagagagtgaagggagaagtgctacccattcttaaccagatctcgcgagaactcactcactatcacaagaacgacaaggaagtcctcccccatgagccagtcacctcccactaggcttctcctccagcactcagggttacaattctgcatgagatctgtgtggggacacaaacccgaaccacatcggcctgttactttcatgagagcgggactcatgctttcttactatcaagttatttctagcatttatgacaatgactagacacccacacagtagcaaataagtgatgatagcagcaaacatcaagtgccaggtactgttctaagtactctgcatagatgagtgtatttaatccttacaccaatccgataaaataggtactatttttaccacccattttacaagaaatgaggtgaaaaagagatgaagtaactggcctgaggtcatgcagctagtcagttgtggagctaggatttgaacccaggcagtgtggcttaacacttaatgctccgaatcattaccatacttctcatgtgtatagagtgcactattaccaatcaattttataggctctgtttccttgttttccctttcacagctgacagaacagtggtaatactttaccttatttgttccatgtggttatttttaatacatggggaaaacgagaaagttttagaagttggttgatatgaattaccctttgaatacgattaattttgaatgattgtgtgcctacctatgagaattgtttgttaaaattttgtatgtcaggaaagattcaggaatattaatattaaataaattaatgataaagaaaagctgtcgtgttatttctgaactggagtacccatttcaaaatgtattaaaagttatgcaaattggtccttcttagagttactgataattgtgtgatttactgttaatgatcatgaaagctacttgagttgatactatgtctgaattaatttatttatggaattataagacaaaattaacttgttaaaaaattcagtacagtagataatgcaaatattatcatttaatatacactactaaattaatagttctctaatggccacagatactccgtgttttaagccatgttagacattttatgatgtttcattttaacttagaaagatacatagtacctttattataaatctgtttttcatagtttattaataattcaaaaactttcaagaagacattttatcttatacctcctataaataaaggtataccatgttccttgcaggcactgaaaaattgtggtatggtatataaatcagtattttctggtaatggatgtgcaaatggctttcacagccctgtcctcgtttgtatttttaggagtgacataagtgtatatataacattttccccttcattacaaatgcatcagcaaaactgctgatactggagttgtaagagtattaactggttaattttaaaagagtgacagagatccctttgtctaatggcaactttatggaaatgaacatttcagatgacttcacaaatttttttttcagactccaaaacaaaggatattatatatcaatttatcatcctcatccagtaacatgcaattatacccaatttcaatcctgaccaagcaatcaataaatttaaccaagtaactataaatacatttgtctcacatactgtatgtgacacatatatgcatacatacagtatgtttataaatacatactggagtctcactaaatttttcaatatttgatactttgctttagaggtaaatagtgaacatagaagcaaaaaagtgtgatggagtttgatatgatttatctgtgggtttctggaatttggtattttaaactaaaatctgaaaaaccagtatttcggtaatattttattgagcaaatgctggtgttaggtgtaccatgtgagctgttgggatccaatgctgagaaagacagcatccctgttctcaaggtgtttatagtcgattcagaaatgcagtcaaggaaacaggagattgtagagtatgacactggttttatacagttttatgtacaggattcaatggtagcacagaagatgggcagctaacccaccttaggggattctatagagacctactggaggaaatcacgtttaagctgatacctgagcaatgaagagaaggaaagctgagctagggacatatgtggtgtcggttttgcagagtaggtagcatgtccaaagctggagccggaagacagtgtcagggagctgcacatagattaaaaccatcagagtgcaggtgtggaagaataaccataaagatggaaaccaaactgagatatttggactttatctggaagtagatggaaagccactggaagatttttaagcatccaggcttttaaaaacccttttaaataaacttttaaaaagatttaaaaaagaaaaaggttctactttgttacctttcattcttaagaagtattttaattgtgtgtgggggggagggtgggtgggtggtcatccctatgggaaatatgagctactataataaataaactttaaaatatagggaaacaaggaactatattaactggctggatggccacatcccagagacacctcctttgtaggaatggggagcatgattttattaacagtttatagctgccaatcactgacacaactagttacctaaaatagtcaatgctgttctcatataatgaacagttacttgcaaaaagaattaagctgatcaaagtaaatcaacaaaaatcttggtaatagaaattttatgtaaggtccaggatcacaaaagccacagaaaaatgcagagctagaacccccatatgctgcacttttattgcaggagagcctgaagagtttccatctggactgtgtcttaccttctcagacaagggcatgagggtgatccagttgtggtccagattgtcttattgtaaagggctaagcttaatatagataaccctcaatatacactgccttggccttaaggaaactgaaatttctaaaatggttttaagatgagtctagtcccttgggggtcttccagatgatgttagttatctaagctagaaagacatccagttcctggcaaaagaaacggaacaaagcattgtattacatgacgagaccccctgttttctcttttctcttcctctatgtgagtcatctagtaccacatctcactcggtatcataactttgttctgaatgtcagcagtgttaaaggagctccacagcggacatttcctttaacccgctaattcttgcacgtggtttctagaatttggtgagtcaccagagtgtgggatacaatgtggaagagaaacagccatagctagccctttttatgactgctgcaaactagtgttgtaatatagttttatgttcctcttatctgataccaaagttacctgtatggaaagcccgggatgaagtgtgaaactggtgattattatggttactattattttgtgtacttgtctctttatcgttgaattactatagataacagattaactgtatttaactatcgcatatcaaggttgtgtagattacaaattaaaatttttgaaaaagaataatagagtaatttcattttcataatgcaaaataatgtgcatttggttagggcggtagaattaataaacccagttctggtttcattatttggaaccttggtgtattaagtataccactgaaaataattttgatgggccagtgcagtttaggtcttcagtctaacactctcccaactgagctacttaggctactctggccagtgcagtttaataagtgcccttttaacgctaagcatgctggctagatgttcatattttacaaaatgtaaaatatgatttttctctaccctcaaggagttgatgcaggtaacataatcacatgatagatgcttgcgatatctttaaaatgagacctaaataaaatttaagggattcattcaaacatttattctcaggtccagtgggtgaacatagtacgtatctcataaatatttattaaatgcagtgaagcagtttttgtagtgcaaacagagcctttaaatggttgggcaaattataacaggaattctagaatatggtgggttaaaataggaagttatgtatggcaataatgagttttaaaccaggtttgcaagaagtagagataaacatttatacagatgatgaggaagtgcatgtattttggataagatggcaaaagcaaggacataaaaataatgattaattgcttgcaagtgatgacaaacatctgcaacacaagtggataatgatgggcaagacggtgctgacaagcacaaaggaataggatttgccacttgaagggggtcattgttgaaacagtttggtttgagagaccagaatcagagaggcaggaaaggagtctaggcttgaagcaattagcatagtggctgtccaaatcgaaagagggttctaaaaaatacataccagcagaaaaaaacaaagtatcatgatttggtgatgtatttaatttccaagaaggagttcttttagatggtgtcactgaggagggggagatgagtgactaaatatagcaggaaataaagagctttgaaattaagacttgctaagttatctatataattttgttctgcatacaaatagagatattaaacatagtgctggagagcatggccaaacctgggaatgtcaatttcattttgttcttttacttatatcttgtatagaaagccatataaggagtcaagccaagaaaacaaaggaagaaaatcatcagttcaaggggaaataagaagctggtagttaatgaataccacggaaagaagtcagagacaggacaactgaaagcctaatgtcatcgaatactaagatagaaacaatttcaagaggaaggttttcattttagttgagggatctagaatgaagactatataaaattatgtaataggtaatgtaatttacgtgtgtttatgaaaccagaacgcattagtaatttaaaagttctaggagaatgctgggacagaagccagtggaggtgggaagcggaggtagcaaggggtgaggaactgaaggacctgggcctaacagtcatttgcagctgctgaaaaaaatgattcattttcactcttaaatgagtaattacataatgttattcaagagttaaaagatgactttctactcttcatttttaaatgattttattactttcttgaaaagtgagtatacatgcttttctggacataagatacttggcagtcttgacaggtttttatttgtgcagtggaaagaatttgatcgttaagggagactcttaaattgttaagtaaacatattcacttttggagccagaattttattttgaacgcatgaagccttatgagaaatagtacattttataatgtgctctaataaagggaaaatgtgtcctctcaaaataattgaatttcttctctaattttttatgtatatgtgatctctaaagctacagttttataattattcttaccagacaaatattactctgacctaaaatgatttagagtagaaatttccaaaccagtttagtatctttttaggaacagtgaaataacctttggttattttagtagtaaattaaatattcagggtttgtgtggatttataggacgggggtaaacatgccaagtcacatagtgggcatgtgtaaaatatttagactttaatagaaagaaaaaccaacctgtattgagttataaaaacaccatactgttgaaatgattgatggttttctcatcacatgtaacagactaacataatttcatgaaacctttgcttaccgcttacaaattatccaaaattcttttgcagtaaagctaacagtatgtgctccttaagcaaaacattgcctatttcttttcttttctcctctttcttccttactccttcccttccctccttattccttccattcccctctcctcctctcgccctgttccttccctccctcccttcctttcttcctccctccttccttttcttcccttcctcccttcctcccttcctctttctttcctcctctctcccccttctgggatgttgccttaatagaaataacagtctactagagaaactcaaaacatgtaaaaaatattatacaaggtagaaaatgataaaatgtgtaagaggagtaaagaccaaattctgttggagaaagcagaaactctcagctgggaagattaggaagggctttagtagagacacatttcaaaggtgtgaatgtcttaattctcactatattcctctagaaactcatgaccaccgttcggacaatgtagtattataaattgttaatagcgagggctgtatctttgtaatgatgatgttgttacgtgagatacttggccttttgaataaccataggtattcaaatatttcagtaataaataagagtgtttctcaaagatgagctatagctttgtttttgtcatgtttaactagccatgataaccagctgagattgacaggagttacttaggttatcctgtgatcaatttttggatgtggaatcatatgaggtcattggtactatctttaaaattctgcccttttttgccttgatgagggacagtgctgggtgacagtatcctcagtgctctcctctgctgggcgttgtgagtcaggagctcaccaaacaataaatcatattgtagtgcgtgcatacagatgtcagattccaggggaaaaaatggttataatttttgacttcatggaaaagtgaatgggatggagtgctcaaagtgttgcatgacgtaaaataccccgttatctatgttagttgtgcgaaaaattgcatgaaaaatacatttaaagtgacgttgtgaatgacagagtttctgagatggtaccttatgaagggacttggcaaccttggtggtatcttaggcatcgtatcaagcttaaacttgctaactcttggcctggggagcaccagctcacactggatgctgaactgcacacttgtcatttcatgacctctcccagccgctgcagttgtgtttcatgcctgcttgtgtttttgttaccttgcctcttgccttcccaggatagggcacatagtagatacaggaacatttttgagaataaaaaggtaatttaacctacacagatgtacatagtacttcatatctactatttcagaacactgtagcaaatcaagaactttaaattattttcctgaactcagttttgaggcagtcagcctgctcctggtttttaaatactgtgttttgcaaacaaaaatgtataatgaggtttttctctgaatacagtgtggtcagtactttttaattaataaagtaaacgttaaggcaaaaaactacctccacaaaaccattaacagacaaatattttatgtaaaccttaggagatgtttattaatcgtggttcggcttggggcacataggatgtttgtcaggttagtgaataaatttccctaatgtatgtcactgaatattgttaaacaatactctacctgcttaattccattactttaaaaattgcagtgaaatttatgtgtgtgtgtgtgtgtcttttgtagaaaagttattacaatttacgatcaaactcactagccataaatgtttttgattaatttatataaacatgatactgtggtagttttggtatgtagaatatttatatttatatttttgtcagtatatttcattaatgttcaaatggtagtggcggatagtgttttcaaatttgttgaaggattgcgttgaaattcttgaaacatggtagtgaaaattgcattttttccagtcttttcttttaaaggtgaattatattcagttgattataagaagtcccaaggaagtactttttactagctttaaactgttcaccatagatgttaatgtgggacacctacagaatccacttttgacatggggcaggttgcaatagtattgcattacactgtcagcaggtgctgccatggacattggtgtaaagtaagaaggaagggattgggatgcagaacagtaattggaaagagagaaataaatccttctctttcagttgcttcactgattcccaatgttccaggtaaagtgcacctgctgagtgcctgagaagaacaggtacatgctagccctccattaatttcagaggaatggcagtggactgcatctacccagcaggtgtgctgagctgaaggaagaagatggatggggacagagtatagaaaagaaagcaggtagcccagatagggtggttctcaaaataagagacaataagggtaggatctctccttataagcttgaatttatcctcctctaattcctagtggcactatacattttaatagtatttgaagccacgttagaattatgacagcatatgttaaaattgtgcaagtggttcagtaatataagctaacatttcctgaaatgatttaaaaatctggcagactgcaaagttatcctgataaggaacttggttttgattacagtaatgagatatacgggatggtgtcagaaactgtcttccagttgacacaataatccataatttatagattggcttaaaaattaaaagacaaagtcaattataactaattatgatgctacatttgctcgaggagttactatatcctttgggataaaggaagtaatattcatgtcagtcaggaatctttagctacagtttcctggttctatcttaagaatttttcagtttcgtttcatgagaatcctaagccactgaaagcctgaaaccctgctatttttagaaatactgtagtagcttctgtgtatcactgcacatttgttcctattctgaacttcttatctgtgccaaatcttcagagaggttactggaagttttgctcgatgactgctgaatcagtcagaagtgaattttaaattatgcaggagaaaataacaataaactgagttacagcatcaagatatcattgttatttctgttgatactggtttcatcacttgataggatttaaatacccagactattgcatatttactaaagttttatttcatcatgtcaacatttttttttttttacagtcaaaagccaaattgtcagcaaaggatattacaaggataggtatttttagcatcttttcaagaagtgaaaggaaggagtggtttatatttttctataattttatgccatgagacgtgacaattttccatcttaagaaggacaattagttcttagaaggaaagaaaaatgcattcttatataaacttcctagaaaatttagtgagttgataaattcctagctgcatatcaactttctactcttgtggccttcttttgtgtgagctttgatcatcaagcagtttctaagtgtttttgaagcacatgtgttgcatgtgtggagcaggccacagtgcatatatgtagcatgggcttcttccagaaaaaaagcattctgagagtaccattgagggaatatgtattcaaaggagacaagctgcaataaactagttgtttaagtaatattataaattgttatcctttttagatatttaggatttcattttgttggaaagctttcaaagggtgacccagtacgtgtgccaatgacaaaagctccttggaacaattcagagcatgctttatgccttatgaaatgggattgtaaaaatcctctcaaaaatgacatccaaaatagcattaaaacacaatttcctttgataaggctttacggcactcatatgaaaagtgataccactttgagtgagactgtgtcagcattatgtgatgttgtgttgctcataactgacactaatccattaagggtgtgagggtcatttatttttcttatgaagtcattaaatacagttattgatttctgttcagttagattgtaccttcatttaatgatcgctatatacattaatgctaagacttgatttcatgcactttaaacaaatagatattgtatttggagtttaaaataaagttaatgacaattattaaaaagaaattgtcattgattcactaacccaagatcatgttgacctagaactgtaaaaataatattggttttttaaaaatttataaccatcttcagtgtatttgctaaatagaacagatgacttttatttcttaaattaataaagtaaaattaataaaactagtatgcaggtctatgtagtattcccctcttactgctactgtttttataactagttgtattattttctgctgatttgcagatgggtttcgtgcattttctaatttcctattttttgccaagtaaatgaaaaaagagtaaatacctaaccaaaatcctttttcttgagtgtgttaagcaagaaactgggaaaggaaaatgaaaagacatcagtgtatgatattctgttctggaaacgtagatgaatattactagggaccagatgtgttttggtatatacagtagtcccccctgatcacttttggcagtttcagttacccatggtaaaccacggtttgaaaataaagtgcatacagtacagtgaggtactttgtgagagagaaaccacattcacataacttttgttagttatactgttataattgttctattttattactggttattgttgttcatctcttactgcctaatttataaatcaaacctttcctaggtgtatttaaggacaaagcaagtatatatagcgttcagtttcaggtatccactgggggtcttggaaggtatttcttgcaaataaggggcgactaatgtaatctattttatattaaattgcttgtttaattggaatcatgcagaattgatgtttctgtacattcccttgaaataattttgtcaaaagaaacagcagtataaagacttctgtaatttcagatttctgtcatttattaagaccagtcattttttccctgattgaatatattatatttgtgttttactcgaaggtatgccttaatagtaccaggaacttctaaactttcatagtttggcaatgttttaaattatttcttttacctatccttttggaatttgatgcagaaattattggtctatgcaatagtgagatgacgtttattagatcacctttcacatgggaagtactattggaggtctttagcctctagtgcagtagcaccaagtggtaccaagttcattacagcagcatctttggagatgttgtatgctcagcactttttcataggcatcttgcctggctcattgaaggaaacctgggcaaggctgtgatattaatgaattatgacaagccttttgcctgtcaagcagaggttcccgccttcctcctttaagacaaaaacttaatggaagatgctcagatgcgcgagctctctgatgataccccttaagtgctcttctctttctgatgcgaatattcagagagccgtgaagctgcaagtggcagcatttaatattgcctttctcataatgcctgaataattttccagagactgatctctgcagctgctgtgaacatggttatttgtttatttttcaccttggtcctggtggaatgctgacctagccaatcttcaggactcacagggaaaatggtttcagattcatagctctcatcttttctttcaaataaacacaaaactgaagcttgtgacgttgagtaacagaaaaataagagggactgtttctttagtttcctttaaaagtgaaaaaaaaaatgactgtatgaatgaagaatttatttggtgaaaaatgaagactctcttgcatatttttaatggatatttgtgagaggaaaggagaaagcataggctgttgtggtaagctatagaatgttttcaagatttccccccgtagtgctgctcattatgttaaacagtctagcttttagctactgtagttttcgttttatgtgtattggccttcatttgctgaaatgcttcaagttcacagtactaaagtcattttgaaaacgggatgtaattacaaaggtatcttatgcttaccaacagcttttttggatcaatttaattatcattacttgtggatactgtaaattgaatatcccgtccctaattacattaaactcaggggttagctgcttaaacgtctaaatgagaaaagttcatcctttgctataaataggagaattgttctcttatttagactgaccttggaagctaagcattttacatgatattgtcaggtgagcattataaagacagcctgtaatgagatctgtaatgaggaactaaggtatagtagccctttgaaaagttaatttattcagcattttcttattgcatgatagaattaaagtttgtgtatatgtccggacccctttttaaaggggccagtctcactgttcttggtttactcatattctgccagtagtttgaagtgggttagtattactattccaccttaatggaagtcaccattaaagtagtgaattcatcttgcccttttaaacagagctaatttatttagggagtaggaatgttattttccctaccttctcctcacttccttttacagaaatgatatatcagaatttattcaaaccactttaagcatacattttcctgagaggaaaaaaaaaatgcctttagacatcaataaactggaacggcatttccctgttctggaaaatcagcctttaattagttgatgtgtgtgtcttgggttagtatttgttgtctgttcagctcaagtgatttttgtgctttataagaaaacggattgttctggtgggagatttgattgatttctgcttgttatagtcattgtaaattttagtgccatgcatagctacttgcttttatttactttgttttctttgtcaattgtagcttcattaaaaatctcttatctgttcacagtggaaactcttaaaaatgtaagcgtaactacttatttccatagaacagctcctgctgagtgtgctttacgatttatcataaaaacctgtaaggacaaattgaggctggatgtgctaggaaatgaagccgtccctgggatcactagaagagatttctattatgcaaaagaagtagctaaaatgattgattttgagacttcagtcaaaacataccctgaatgttttctggattttctaatgagacatattgtagaatacaccagaataacgtgaaaaatgtagacttagtagcataaataattaacaagtggttttgggctctggggtttccaaagcaattccatgttatactaagtatactgggagccatccacttacagctttttttttttttgagacggagtcttgctctgtcgccaggctggaatgcagtggcacgatctcagctcactgtaacctccgcctcccgggttcaagcgattcccctgcctcagcctcccaagtagctgggactcaggcacgcgccaccatgcccggccaattttttttttattttagtagacggggtttcaccatgttggccaagatggccttgatctcctgacctagtgatctgtccgcctctacctccaaaagtgctgggattacaggcgtgagccacggcacccggcctcacttacagcttttaaaaatattttcaaccatactaaattccagaaatttacttttagtgtgctatactaaataacaaaacaacaattctagaaaacttgaatttaagtatagtgtgtcttttaatatcttttaaaactagttttctaaaaatatggaacattttacacatatcactttagtggttaaagttatgaaattgaatgttcatacaactggcagttttcctcatcaattcaaacaggcagtgagctttggatgaaactacatttctaatattagaggactaatcataggcaacctaactttttaaaaacaggcaacaattttatgcttccgatacaattagatacagttaccaatcatatcagtccattagctgtcaagttttattcttcttcataaaaagcaatcagaggtagacatttaaacatagattatgtagacacgtgatgtatatatatatgtagcatataccccatctctactaaaaatacatatatatatatatatatatatatatatatatatatctcaacctagatgtatatagattagataggaatttcacaaagccttgtacatgtaactcctccagaaaatgagtcttggtaagaatacttagatatcagttgttgagtaatgaaaactcaggatcatgaaaagtaagaattgttagaaggtgatttggggcatcagtgcatatgatgcttttcctattcaaaattaagtagagaaagcatttttgtggaagatggagagtggttatcttcattagcatatagatgcctcatagttaaaaaagagttgacgttctcagtccagagtttgtgggaccaaaatatatctaagacataggcttcttggaaggaaggctgactcgtaatttctttaacacctagtgaaacacccagatgtaagtgttttgatgttggtaatgataattgacacacactaaatttagctcagaaattaaggcctattaggaaaactgcacttcatcattcgtcttcacctcttgagaaatttgtgtacattgtggaatatttatgctgttctccatgttcagttaatagtgtcacgatccattcccatcactctaattaggtttcaccgagatggtacccaattgggcagttttgtgaacacttttcttccattagctttttcagtggcttcctatgtaccctcagattctattaaaatttttctcaggatcttggccgggcgtggtgtctcacgcctgtaatcccagcactttgtgaggccgaggcaggcagatcacctgaggtcaggagtttgagaccagcctggcaaacatggtgaaaccccgtctctactaaaaatacagaaaattagccgggcgtggtggcgtgtgcctgtaatcccagctactccagaggctgaggcaggagagttgctcgaaccctggaggcggaggttgcagtgagttgagattgtgccattgcactccatcttaggcagcaagagtgaaactccatctaaaaaaaaaaaaaattctcagcgtcttattaagagtcagttttaaaatacttctagacttcagtgcacaggatggtttataaagcagcatttgtgaaaagtttgccattaggcaagtttctaaagagatctcaggagtcttaagttatatcaagtatttgccaaaacttggaggtgctcagtagtataattctggtagaagcctgaaaataaaggcatagagtttttactttgcacagtttgtggtcattcaatgtacttcaacagtggtaggactgtgaaatgatttgatttggtagtagaaacattcctctggtaaggaagaagtgaatgaggttatctaatccagggtgatctgaacaatgtcactaaaattggaggttaaagaactcaatatttagggtaacaaaaaagaaaataaattacagcctcaattgcaaaagatacctgaacatgtaatttttacaattacgctctgaagtgttggtcccactttgcagatggcttagcttagtctcacaggagttctagcagaggccttccccaacaacacagaactgagaaggagactgtctggtatttgaacccaggtttatgtcactgcagaggctttcagtgaaaagctgcctacccaactctattagagcccatgggtttggctggcagtataaagacaaagaagaaatactgagaaagagaaacccttcccctcctgcctcttttcctgttccttttttgtgagtcccttgcatcacagcctaccaccagattaatttcccatcatcttcattacttgtcctaaactcatagcaaattaaaaagttctagtactttcattgctcacagcacctaagaactaaaagaaatagacaactgatgacagaatatgaagtttaatagcattttctaacgaactgaaaattgaataaacccaaccacaagccagattcccagctactaaaatctccactacccttctcccaaaatctattttttctttataacatttacagactataataatgctgtatacataaacattgagtagtaaatgtcatcataaagtatttatgtgattttaaggggaaatgtacaaaagctttttccatcatgtacctcctgaattagcaatagggccaaaatccaaacgagtgaaaagtaattgtttaagacacttatacgacttctggtttatataaccatcaaaatattgcttctaagtgttagaagttgttctgctgtgtgtctgaagcatgggatcccagaagcaaatactcaagtagctaaggcataatgggcccaagtaaatttttgggattgatcaatgaattaattgagaaatactgagaaaatacacgataacttgacaaagaagagctttaaaaagaagctttagaaagagacaagtaaatgagttcatggtaagtatgagagagggtcagtattcttaatatataaagagctcttacagatcagtaaatttaaaaagggacaatagaaaaatgaggaatttgtaagggacatggatagctaacaacgagaaaaatggtcagcattattaatgattaatgaaattgaagagcagtgagatatatttcatttttcacattgccaaagattttaaaagattgctaacatcactgtcatatgcttctgatgggatttgtttactggtgaatgctttaagcacaatttagcagtatatgtttaaaattttttaaagcaagaatatatcatctgacttaggaatttgtatttgaaattcaggaatttaagtaaataattagaaaacgtgtacacaaacatattgtaagagagacaaatgtatggggagagaaatgcatacatgcaaacacatgagaacatttatcagcactgtttgtaattgccaaaaaaagaaaatctcaatggccaacaggatagaggattgattaaataaagtacacggtttcacatgataatcctagaaagttctgatatagatttatatgatctctaataattattaagataatttagggtatattaagaagaaaaattggttataggagatgtttttatttaatatatactctgcatatttgagtggaaaaagtacaacctaatatttctgggtggagagagttggagagatttcctttatttctttatttagtcttgatttctttgactcttctaacttttctagaatggtgagcatgtcttatgtatgtacaaagtgaggagaaagccacacagcattggtcatcgaatgatttaatccactcttaaaattctagaaaaagttatatcaaacaaatacttgtcttgcttgggtagtaagagccaaataatacaggtatctttagttcaacagcggcaccttctgtgttcagtagagtgcttaattagcacagtcatcctgataacatgaaatcaatccataaacaggcaataagaaatgtaaaatgaaaagagaaaaatttagagttcaaaagtgctcttgaggttaaaaaaatagttaaagctatgtctaaaagtgggggggggggttggcaattaatcttattactacatgacatcttaggtatattaacagtgttttatccagaatttataaatatcctgagttgagtcatattttagagtatttgttttttcataaatttttaaaaattaaagtcatttggatacatagtaaatcaaatagcattgaaaggtccatcaggaagaatgtactgtcaccccatcccatttccttatccagaagcaactactcagcaattttagctgttcatttgatagttacatccattttacctgaagatatatcattatttcttaatgtttcattttaaatattatctgttgacatcttgtaacatgaggacccatctttattataagcttgtctgcatacttttctccattctggcgatatagttatatgactttttttagtcattaagtgtatattgttaactttaaagccatagattgtactcaaattgtatttattcttttcattcagctctttgatttttcttcttttacttgagcatgttcttgagtcttaatttacttcctctaagggaagtaaattttctgagtccttaagtatctaaagtaaactttttttctgcccctacatttgttggatcacttgtatggaaaccacttgtgtgaaatcatttgctgtcagaattgtgaactgtggaaatcacttgtatggaaactcacttgtctgaaaatcatttgctctcagaattgtgaaggcactgctccattgtcttttactgtctgctactgttgttgaaatgtctactgccattgtcattcttccttgattatattctgcttaaaccctaccaccctgcacctcaaggaagcgtttaggatggcgactttgttccaggagttgtggcctttcatgaggatgctgggggcggcagaggcggtgctgtgtacttcattcattgtgctgagtactctgtgggtgttttaaagttggaaactcacaccctctgttatggtaaattttcttagagtatttcgttggtaattttttccttctattttgcagttttctctttctggacctcacattcattggatattggactccctttgttgattctccagtttacagttttcttctttcacattttctccttttcaagttttcattgtacattctcagagatcactcatcttttgtttctgatttttactgaattttcttttattttgacatgatgtttttaattttcaagacctctttttttattatttatttgtcataacatgctggttttgtacttggataccgtatcctcttttaactctgagaatgttaccatttttggttcttcaatttaagtttttctgttccctgcattatccatctatttttggtctcttttatgccaatattttctttcctcatatgtcagatgatccttggttattcatgtgtattaaattgtgggatgctaagggttaatttgtagctctgtgggcatgggttggagcttttaattggtgggcttcactgttttgtgattggatgaagtcagccttttttttttttttttttttttttttacttacctgcatatgtctgtatgtgaatgtcctttatctgaaactggtttatttcttcttaaaataatcttctgctctcttgtccaaagtttagacaatccatctgctaatgagattgagaaagggaattattggttcaactattccttatttcaagctacagttcatttcacctctgccttccagtaagtccccaaatctccctcattctttttctccagcaaatacaccagtggtttcttgctttgggtgaggactggggagagtgtatacatgtggctgctggaattctttacatttagatgggcatggttttatatttagactttcaacctgtcccaaacttctcttctgccatttgtcttacagggacattcagtctttagcgtctccagggactcaggtttcttctcattgcttcagtgggttcagttggcagactctgcccctcagttattcctctccagttttgctggccccttgcttatttgtgtgtataggttagacatacttctgctgcagggtctttgcattcatgaaatgcacttactacatatatactcatttttttctgccccaagtaacaatccccaaatctgaagaatttgtattacttaaggattgcaggttggcagtggcattcctgggattggcaggctcaggtccacacatctcatttcaagatccaggtaatttttctggattagatggttttcacggtagagggcagaaactcaagggaggacagagccaaatttagccaatgcacttaaagcttctgtgtagctgtgacacaccctgtgagcccatattccataggtcaagacaaattgcatgggaaatatgatgaggaaagaaaaaataatgagtaattcaacctactacaccccagatatccacgagacttactccttacttccttcaaatctttgttctaatatcaccatctctgtgatgccctccctaattccaccctatttaaagttttattactcttctattttctgtttcccttccctgatttatttttgttcctaacacttcatactatctgacatattatctaatttacatatatatatatttttattttatttactgcctttcccaactagaatatttgtaagcaccacaagcccagagatgttggtttttgtttattactgtgtactcagtacccagaatagtgcctgacgcccggaaactgctcaaacatatctaaatatcccttccttcccatggaacttttttttttttcttaaattttaaaatcactcatcccctgatgaatctgcatccattttctttggtttttgtggtttataccttcactattattaaaggctctgtgcagagagagacgtaaatgctttttatcaaattagccattcttaactacaaatctgacttcttaaatatttattaaataaagaaagactcttgatttaatgtgctggctttcatacaaattaccaaatacagatttgattgggatgtttctccagagttaagtcctctgtaaaagtgttggagtaaatgaattacttagcataatagctatacaagatatgttttggttggtgatgccaccctctgtgaataggtgatttcttgtttgtccttcatttgaaaaagtaacataatagtcaacctacttgaaagcgaattagttcttattcgcatgcgaatgaagaggcctaggtgggattaaaagcattttctattactgaatacatatggcgttcgtaatttgtattcaaagacctgtttgctatttttggcatggcttccaacctcataaatgcaaaaagcagctccacttcttatagcaatatgccagcctggtctgtcaactacagttatttcccatcagttattcatagtcttagactttgtttcagtaaattgttctgcattgtttactgccctcactacttattatctccccagcccaggtcataatacaacagatacttgggtatcatgatgttatatattcttttccaactcagcatggtgatattgggagggtgatcttattcctgtttttcatatgggagattgatgaaacttgtttttcattttttattacatcataatacttatttgctgacaaactcatcaggactctgagggagccataaatttgtatcagtataatcaatattgatggaaacactttgaaactcctcctgtagaattagagtcagcttacaagccacattacaatggtcttatgattatataccagactcttagttctatgttaatttagtatgaatgtctatataccctagcatttttttactccaaataatgtttatttcccaaaataaatttcattctgcaaagatgaaaatctgtatcacacctaaaattgtgcaatacagatcttaaaactgccagatagcattccaaagtgcttactttggaaggaaaataattaaatgtctaaattattatacatttttttaaagatttctttattgctgtaattcttactgcttcctctgcttttccttttattttattttattttactattactattatttttttgagacagagtttcacccttattgcccaggctggagtgcaatggcgcaacctcagctcactgcaacctccacctcccaggttcaagcgattctcctgcctcagcctcccgagtagctgggattacaggcacccactaccacgcccggctatttttttttattttcagtagagacggggtttcaccatgttggccaggctggtctcaaactcttggccttccaaggtgctgggattacaggcgtgagccaccacacccggcctgcttttctttttcaaacccaaatcttagattcagtttcctcatgacattgtcaccaccttgatataaatcattcctttgttgacattgtcatcatgtgcttactgaaacatgccctacataacaaggtagaaagagacaggcttcggatttcttcctgttaaagcaaagcattaattttctctaaggaaaggtagatgttgagtgtgaaataaacttaaaagaggatgcatcacatataaaatcccagaatgttacaagtggaggggacctaagatgattgcaaataaagataaatgcaacagctgtggtctagaaggaggcacaaattattaagagctcagcaagacggagtcaaggaaaaattctgactgagcatgaacagtgtgttgcttaatagttacttaccatcggcttcactttagccctgtgcatatgaccccgaaaccatgtttataatgtgtaagcccctttgattgtttttgtttttgttctgaagacgcttgctacttttgaaatgttttccatatttagagataatacggtgtggtcgaaagagggcatattttggagtcagaaaacttgaagttcaatcttgtcattaccttaagctaaatttctccatctgtaaaatgggagtagtaacatttaaataacgattaaataataaggagaagtaacgtaggaagagattcaagcactggcctggcacatggtgcttaaaaagtgtcttgctctttctctctcccttctttattatttaataaaatttgtctggtatgtgtattataatttgtacatcttgatcttatatactgtattaaaattaaaaaatagtcaaaagctgaatgcctggtctcaaatattttaaattctggttgggatgtaacataagtacatgtactccaaatatatttacagagtaggttttattaaatgaactaatagatattgtacataaaagattaaagtgaaagaatgatcaggttgtaaggagtatggagtaggtgaacttggcgctgtatacgaaaaccttccatggaagagctcgagacatctttttgaacttccttaactctgttttgatagtacttaaacggtcaattcgatggttcttcataccttaaagatcactggcctttattatcctgatagtagtgaatataagcatgttaaggttatcttatctgtgtttaatcttcataggcacatactatggaacatctttatctgtcatattcatgatccgtgaagcctcttttgaagtcaggttgcatactgcaaaaaagtagagctctaaagtaggtcacagtcctaagagagacactggaatcaacatctgaaattgaaaagctattctccattcgtattaagtttttaggttatcactaaggaaaaaaaaagcacactaaaattagatgaagtaaaagaagcccgagttattcaaaatgtaaagaccttagaatgaatgctaacatttttcttttgccctttttcttccatcattatgtctaaagattgaagttagtctaaataacattaggtcccataatctctgagaatttaccagctttactgttttctttttctttctgttccaagtacatctgcccttatgccattactcttgtcagaaactcattgccaagtgtctttaaaaatcagttactgtggagttacctatttcaaaacagaactaacccctcagtttgatttttcaggagtcattctttcataggcaattccgtcagaattttttttatataaatcagtgtgaaagcattggattttcttaatacagtcttgtccaggaagctgttaaagctttttccccattgaagagagaacactaaattgtcagtatgtactcattctatgggagaagttttgaaagcagaggtttataaattttcaacttagagaacgagattctttgcaaaagatttggtcaaatatctggaagtcttccacttttgaaatacagggcttccaaacacatttcttcaaatgtcttctatatagttactgtcttttattttggcaagttatgccaaagagacgaaatagatcttagagaccttagaatattaatatccttaggttacattcttatagagtatccactaattatttcacatacttaagtgatgaatatattagtatcttaaattctagtttggtcatagagatttgtgctttcatgggtcctggagcagatggttgctgtcccccgagtggttcatactcaggctctggtatcaggtttcctgggatggaatcctagttctgtcactaactaactgggtggactgaaacagttcatttaaccctgataggcctcgtctttgtaaaatggggataaatactacctatcttgttgagctgttataaggatgagacataccacatgtaatattgacaatgcctggctcacagtaaatgctccataaatgttagccatcattattgttgttattgatgatggtttttggaaggctcacttgaattttctcagttataaatattgtgtagggcaaggtctgtgaaccttggtttcattaaagtaactattcctataagagtatgctccgctgtgattatggttgtataaatctcatttggcaattgagtaccaataatacgatagtcatagattaggtataactatctaaattgaactgctgtcaacaactactgaaagagcattttgcaataattatcactatcatcattatttcaacttcatgaaatccatgaaatatttatctttccttatatctaatcagaatgatatactcttagatatcacataggtgagtaataaatgatagaatggggtccctttcttctgatagatgcatattagtatattctgatataatgatatgcagggtactaattagtgtgcaattaactgtcagactttgtgcaattgagtgagaaagattttgtgcagttaaataaatgatgaaatgggtcctttcttctttcctttgaatcacagtgacaacctaacttagactttcaattaagctttccagcttcctacctgtgttcttgtattggtttcttaggcaggaatattttctctgcatggacagaaacagttgataaactcaactccaacagagaaataaattacatgccagctataatgagatatgaacgtccagtaaattttcttttgcatgtaaaaatgtggcagtatgaagtaagagtcaataattatttattgttaattccctaatgtttgcttctgatgcacatgtaaattgtgatgtgactaaattgaatggaattatccgttatttttaacatattcactctaatgcacatggatgaaaatgactgtgataatctagcagggatcctttgtgttttggtgaagcatgtaggtccgcatcctgcagtctagtataaatggatttcaaaccgaatttaatgaaaattacctttgctgacagtgagcctgagacacagatggtcactgtatcctcagatgtgtttaactccatttcagtggggccacctttgttgtttataacttctaggtatagattcttgtgggagttccaagatttgttttaagcagtttttcctttcttaacaaaaatagtaagcaccatataatgcttgcttcgtttcagtgatattttttcattcttcactctctcttgcacatttatttgatgctcaagtgatgatatacaaatcactgagaatattatttcctagttttctggaatattagaaggacaatattacatagaattttactttcacatatataattatttcaataatgttgccagaagaattgagtatctcttctgaacaaatgccgtgtctaagaacaagaaggatagaattaaatcaatgaggggatggaaagtaaaaaatgggtcagacgcagtggctcacacctgtaatcccagcactttgggaggccaagacaggcggatcacctgaagttgggagttcaagaccagcctgaccaacatagagaaaccccatctctactaaaaatacaaaactagctgggggtggtggcgcatgcctgtaatcccagctacttgggaggctgaggcaaaagaatcacttgaacccaggaggcagaggttgccatgagccgagactgcgccattgcactccaacctggacaacaagagcaaaactctgtctcaaaaaaaaaaaaaaaaaaaaatgtagggagatacaggtatattgtttgtaattcagatctaagattatttctgaacctgaaccagaagatagacatttgaaacagaaattcacactgtcagttaagatcttagttgtgtttttgccaaatactgtaagattaaaacaaattctccaccaagttttagcctccagtttactgctaccaccatagttcagtcccttcagttggattatttttgttttgttttctaataaaatggccagattaatctagtttacattgctttatcaatcactgtgtttcttagaaaactacaaaagtatcctcatttcctctccatcagtactacctgttttcttctgcgcaagccttttttgctctagctcgcctctagccctctagccttattttctctactctgaagacaaaccccttggctttggttagctcctttacaatgtgattatgtcatgtcccacttgcctaaaagacttctcactataatccttagttttgaaatcctctttatcttttaagggttaacctctagaattgattaattttctagttattccagttctgattggcaattctatgctgttaagttctcttatacatacatgtagcatttaattatattatggataatgtgaatcttacaatcaatgacatttccctatttgtccttaccactaggaagtgcagggctgagttatcggccagtctttagttactgtagagaatcttcgacatgtatttctgcctatgaacttcccctatagcattgtcttaaccataaagcttcttttttgcaacatttttttctaatgttataatcttattatatattctatcttcttgtaagccacatcaaatccttattaggagaggcagtcttccatgggatctgagcgcatcctgcacacccttgctggccttgccaaaaatgtaagtccctgactgctctttacccaggagatttctcaggatggtttgtagcaagaaaccttgagagatgaggcattagccaagagcaggcttgttactacttactgtcaaacagtggattccccaagctcagtgttcctcagctgtgacaagcccattgtgtgcatagcatccatttgggcctgccagagttggggaacaaagggaccaacgtacaatccaatactcatgctgcttgctgtgctatgccatgagtttttgccccttacccaggagttttgtgtcaccatttatgacagcaggaggctgtagtaggctgtaattaggataaaatcaaatactatactaatactcatttatggaagatagaaactgttccataaattaataaaaataaacgtgttttgagcctttcaaaccaacccactgtgcatatcactatcctgaacatgctgaacatgtaattagatgtcagtgtatacttattatgctttgaagaacttagcttttatggaatcatggcagctgcaagagtaattaaattgataatttcttggaattatgttgagaagacttaagatattaaaactggctggatttgtctgcttcaactaaaaagatgaatagagaatatgtttaacttcaccttgcctctgagaggtttctgaagagaacttcagtgtaaaatttagtgtcttatttagttatctaccttagtctgtgttctctctcctttcatcagttgtgttgcttttttccatttttaaatttcattctcactggaattttgagaatgtagcatttgtaaatgtgaagaaaaatcagtaacataattttcaatttgtttaggttttttaaaactatggccttaaaagataaaattaggatcatataaataaatgacatatgacctctgaaggactgggtagaaaaaaattaatatttattgattaactagcaagtgctaagttcttttaaggtgctttacatgtattatatcattaaatctgccaataatctaagagttaagtattattaaaagaataaactagactattagaaaatgacactaattagatttaggtaactagcccaagttcatactgtaagtagcaaaagaagactctacccaggtagatcagacattctcatcaaaggcatggttcttaaccaggaactctcatctcctgggatagtgaaagtaaaggaggatgtggaagagactatttcatattaccagaacctatttttctgtcttccttgataaggctacatttcccagccctccccactcccttgcacgtaggtatggacatgtggctagttctctacaatggaatgtgaatggaagtgaggtaccaggccgaaaatgggccttctccatggtctctttttatttgctaaacggtaaaagcaaaggacctcagggaccgtagaagatgacagagtcaccagatgggaagagcccacgtctgagttaccacgtggaaagttgtcccattgaacaccagcattagactaaggttagaatgagaaagaaaagcttttgtcatgttacatcactaatatttcagggtttatttattaaaacagctcacattaccttaccaaaatagatgggtatgatcaaatgtcactactaggagcattagaggattttaaatatttgatgaaatcattatgacattagttatttttgagacttctaaaacatttgattattaccttgaatatatgaacgaaaagtattgtaattgctttataagaagaaaaaacactctgaaaataagagcatattgggagtgatatccagatagtcgtgacctggtccttgaactgcctctgtttaatctggggcaaatgacttaatccctctgagcctccctctcctaatgtgtaacatgaaacaatctaacctctttagggtggcagtaaaattgctataggctaagagtatacagaaacacagtagtttgtatactccttgaagatcaaaatagtgtccagtttatacgtctatactggtactgttttagcacataagaagtgtcagtaaatattgaatgaatttttggtggaataggacatgatatccttttagaaaacgttttggcattttgagtcaaaagccataaatatatatattcttgttgtcccagtattaatgcttaggatatttatgaataatccatgggaaggaagaagtgaggataggatagggttgcagaagcctcatttcaacctttggaaatagtctcagtgtttaactacagtggagtaatttggtaaattttcataaacttcacttgctgcaaagttttcctgctattaaaaggcaagtaagaaaaaccatattcgtacggtgaaagtttatactagaaaactatcagaagcataaaatacaaaacagctacatctttactaaaagcctggaaaaattaaatgtatactcagtaaagaattagaaggaaacatacatagaaaatggaaaacagtttgatatattagtgataggattatggaattatttttttctttcagttgcatttgcaaacaagatgggagaagaagctggaaaagaacataggctacctatttaaagatcctgaatgaaaaaaaaaaaaacctttgtgtttcattttgtaaggtttttaaaaaatagatctgggattaaatctggcttttagaaagataatttgtagtaagagagttagtaatagggagatggattagaatattactgcaataattcaggtgacagatgtggaggaactgtgtttcttatttcctgcgttttgttgctgtgacatctggggccttgctgaccctggagggactgcccctcctagtgtttgccagttctagagataataaataactcgcccacaagtgcacttttccaaaacaaatgaatcaacccagagcgcacacctcaaccatctcctttagtgggctttcacactctggtccattatccacctgccctgatcaccccagggccaggtacagagagctcttgtgcctcagagccaattgaaaatatctaaactaccaatcctaatgctttttactctgttttgcccatttcttcccaaggaaaccacaataaaggcttgtttagggtttcccctctctccctctgcctcctaaccaaccctgatgcttctttttgtggccctgttggggcggcatgccccctcctcttgggaaccgtgagtaacaagctgtattgtcagtggcagtcaccttctactctgctggccttactacacctcagagcttccactagtacactatatttttaaactaaatgttgtgcgcctaaatgaaagcagtgaaaatggggatgaggagaaacattcagagatgtgtaggagtgagaattacaggtttttgatggtgttaggatatgaagagtagggaaatggaaggagcagatgactactgacagatttctagcttgacagtattaactgtgagaaaacagactaagaaaaagaggtttcaaaggggaaagataataaattcgatttggaacctgcagagtttaggtgcctgaaagacatccatgtagaaatatctagtgagcagttatgaagatgtgtcctgaacagtggttttgaaacttttatgactatgaaacacagcaacaagtccattttacatccggccctatatgaagatatgatttcatatttcacagaacaatacgcctttcttagtgtgatgtagtctgatagtttctgtctgtgccattcattttgtttcattttttgtgtgtgctgtaagccactaaattgagttcatgaactactaaaagggcacaactcactctttggaaaacactgatctggagcattaaaaaaaaactcagacttggagagatttagaagtcataaatatacagatgttagtttaagctatgggatattttctaggggctgagatgcagatcaagaaaattgcccagattattgctccatagaataccaagcatttaaaatttttaaagcttacagagagagaggaagcagcaagagagagtgagaaacaatagtacatcctaatagtagactcagtcaattaatattgagaaaccaagaaaggagaacatttcaaagagggaataatcagcagtgtcaaatgccaataatgcacaataattttttatccagactaagaagacaatttatcatttaagccgtcactgatgataagtgaaaaagcaatttcagtagtgttctgggggagaataggttgcaatgggtgggaaaaatgaatcggaagtgaggaaagtgaggcaaagaagttagactgctttttcagagagtttggccttaaagggaaaatatattgatgtgggtgacagtcactaagtgaggcgcagaaaaaatccaagtgaaaactttggaacagggtggtttgtcaaggatgcatgttaaagacagaataattgtttgctgaatttttttgaaaaaaatagatgagagtgatgaacaggtggaaaaacagtaggaacaattaaaataagattacagccatttcagttatttagcttagaaatggacagcctagaaactgatagcaagaatcatctaataactgtagccctagattagaaagatgaaaaagtagtctgttgtatatatatatgaatacataaatgtatgtacatatgtacacaatatgtattttattaattactgtatataatatttcttaggtgtaaattagtttggagagacttaatatcaacctccttaagcagaaggatgaggtttaatgtaaggagaggagacttctgtaatacatatttttaatacatattttggatgatttagaatcagtcacctaagagaaatggaataaattactactgtaagttatttacaattctatgagtttgtgatgtctgtgatacagtaaaagtctaatacccatttaaaaggtttaaatagaatctgctacataaacttttcacattttacattagaaaaccttgtgattccacacacagctctaagaagcagctctataatgaccacattttcaccctacattaatctgcaatttcaagtcatagcgtggttatgctacagcaaaaagtttattgttgagtccaggagaagagcatgtcaatgcaaaagtcttaacatgatgctattttatcacaaatttaaccatgccattggtcagctgtgaccctaggcagagagttgactaaaaatccccacataatttgttgtgggagaatgcagtggttaattaatgtgagtgagtagaaatagcactggactgtgagttaggaactattcattctgcaaaacatcaaataagtcaatctcatctttaaattgaatgggaaatacctgtacttctatctcacaggcttttgattattattcaatgagataatgagtgtcgaaatcctttaaaaagttaacaaatgtataaacgtaagttggtagtattgtggttgtcatggttatatctactgaaagcactactctcagatttgcttaaaacagaaagttccagggtgctttggctaaatcccaatggtacttttataatgcctttattagttccctacctcacggccaaacactttttattagggttctttttcaaagttattacgaattttttttagagttggctgtactttcccattatttcataaagtctgtaacgtgtaagcagatgaattatgcctgtaaggccaggcgtaatggctcatgcctgtaatcccagcactttgggaggctgaggcgagtggatcactttaggtcaggagttctagactagcctggccaacatggtgaaaccccatctcctctaaaaatataaaaattagctgggcgtgatggcacacaccagtagtcccaactacatgggaggctgagacaggagaatcgcttgaacccaggaggcagaggttgcagtgagctgagatcatgccactgcactccagcttgggcaacagagcaagacccagtctcaaaaaaaaaaaaaatgtaggattattgtatatcacatgaaaaaaaccagagagttgttcatgttttctctggggtacatcctctttggagtaggaagaatgagtgtatttcatataagaaaaaaaataaggaatttcaaggcaggtaattcctattggattataaaatatgagacctgtgactgattcttagattttcaacagaaaaaaagataaaggaatagaaactctgcattttgaaagaacttctttcatcacttttactatggagccagaagcaaagatatgtccaaacccagccgagaatataaaaaacatagttggagacgcttatggaaacggccaaaaccataatctaaaagtagggaaaaggcttctgaagtgtcgtgattgttgtctcagagcttcacggtagcactagaattcagcaggctcttcggcctcttttctgtagtctgttatttggtttaaaaaaaaacaaagttcattcttttttttttttttttttttttgagacggagtctcgctctgtcgcccaggctggagtgcagtggtgcgatctcggctcgctgcaagctccgcctcccgggttcacgccattctcctgcctcagcctcccgagtagctgggactacaggcgcccgctaccacgcccggctaattttttgtatttttagtagagacggggtttcaccgtgttagccaggatggtctcgatctcctgacctcgtgatccgcccgcctcggcctcccaaagtgctgggattacaggcgtgagccaccgcgcccggccaaacaaagttcattctaacataatagataatagtcaacatagtatggttctaggagaagagattgaagtttagccaatttttataccttatttgcatacctatacttaacattcatcttcaattatttcaaaataatgtgttgcaaatactcatagtacactgaaaaagctgtaattctactaatgcatataaaacaaatttagaagtatataaccatgagtgaaaccacacgttaatctacctggaaacaaatacaaatagtcccctacatgtccaaacagtgctgcctctgcttgcttcaccaacaccactacttgatgaagactccctagatcctctttttcttgatctttttccttctcttttctttttcttgttctttttgtttctgaagccttggaagccttcaattcatattcataggagtctactgtgttcatggtgcctgggacctcatagtaataaaagtctttgggaatcttattggaatcaggtacaccctggaaacactcaaatcatcaggaaacaccagacagtataatagaaggtgactgtgataggcagaattccaagatggcccccaagattcccacccctgggtgcgcccattctgtatgaatcgtgactgtgagtgggatctgtgaatatgatggaatatcactccagtgagtatcttatgttatatgggaaaggggtttgtaagcataattaaggtccctaatcagttgactctgcattcatctagtgggagatcatcttgggtgggccagacctaattgaaagagcccttaaaaaagataagaagcagcagcagatgctttccagttagcctaaaaaaaaaaaatagcaaactgctgtgttatgaagctgctgttagagagaggtggcctctagggcctgagggcctcagtcccatagctgcaaggaagtgagttctgccaacgacctggatgaattgcaaggaaatccccaaactctagatgagaactgcagctcagctgacaccttgatttcaacctggtaagatcctgaatagaggaccagtaactcagacctggaccttcctgacccctgcaaactgtaagatcataaatttgttgttctaactggctaagattaaatggtaatttgttacttagcaataaaaaattaatatagctacacagagaataaaatcaaagagtacctgagaatcccaaacctattaaggaaaacaactaataataacttatttatttagtacctgctgtgtacggggcatatactggaagttttttctaattctcactgcaggttttatgaacaaaactaagactcagtaaaatgttgaaacttacccaagttccttcccagtccacccattacactgtccagtgtggtaaccagtagccaatgtagccatcaagcacttgcatagtgtccaagctgaattgagatgaactgcaagtgtgaaataaacactgcattttgaagctttagtgccaaaaaaaaaaatgtaaaatatgtcaattattgttatgtattgattccatgctaaaattaatattttggatctctcatattaagtaaactgcattattcaaattaatttcacctgcttttaaaaacttttaaatgtgggtattaaaaagttacgattatgtgtgtggttcatttatatctctgttggaaagagaagaatttgaaaaacaagaaagaaaatgaaactcacatcccactactcagaaataagcattgttaatattttcatatactcccgttctgttatttttaaggtagaaatttttctttccctctccacagtttatttcagtatctcaggaaacatttgtaggggcaagagaaagcaaccccaggaaagcttaaaatgcttgcctgagacgttacatttgttaagtgaaggagctgaaatccaatcccatgtctttctgagaattccacttctatttgcttccaagacctgtgctctttctgctgtagcacagtacatctcttcaaaaacctttacaagaaaaattaaaagatgacttacagtattacataatccaaagtattgagcagaaaagaaaactcatcagggcctgaagttttacatttttatggatagttttatttgggaaggaaatatttctatatttcagaatttctaacggaatttctaaacattggtgactacttatgtttatacagttgttgtatttgggaaaaaacctctgtatttcaaaatttctaagtgaatggctaaacattggtgactaccaatgtttataggattgtttgtaatttttttcctaaaatttattgaagaggtataggtgggcaggggatgctggatatagttaatgttggctgttaatgctagcaattattaataggtatgtatagaattaagcaaataattgctttagagataattttttaaaaatgaaatttgaaggaaaagaaagatacagataggaaggaagaacgaaaattgtcttcgtttgcagactacatgatcttgtcttagaaaatcttaaggaatctttaaaaaaaaatttctggttgagcaaggtcataagatacaagaccagtataaaaaaatcaattgtatttctacattgtagcaacaaacagtctgaaaacaaaattaagaaagtagtcaatcaatagtaaatctagtctctgcattagcaggttcatttccaccagaggcaaatagaatccttggtgtctagacaagcccatagatgtgtatgtatttagggtgtttggtctcaacttcaaagatttcatattgcttttgtttcagaatatatattagtaagttttgagcactcatttctgaattttactgaaagtatctcgtttcacatattagctttttcaaaaagcagatacaaaagagttttgcattaaattattcctgctaagtgtatgagctggcacaacagcttggctgctgcttttatggtacaacagatgttggcatttcaaaataaacataaacttttttccctagaagtaaatttccttctttataaattagttctggacaagttagtataggcttgtatcttctagagagtttgtgatttattagttttataacaaaatggcttaaaagaaaaataattatagtaccatatgaaattcatacatcagctctttccttctctcatgggccatagttctaattattttttctaatggtaattgataaccaggtgaattcccttgccgttgcagctttatagaatttttttgctcttagctttcttgggaataatagaaaatctccaagttcaaatatatgtcagactgatgtgctccttctgtacatagataataactttattcagaagcctgttaaagatggctttcattttttatttcagatttgcatcagaaaggtaatgacagctcattagcccttgaagcatctaaaacttagaaaatatatttcacaattcaaggttaaatgggtcatcatcagttatgaaaggaagtatcatgcactctgtagaatgtttcacatatttcaaagtgttatctttacagggaaacacgtcaccattcttcttcagagaagcaacttgatgataggaagatctatcccatcttatcctttcatatatttatcaagatttggctatgtagacttttcctgagggaagtctcacactgactttagtagttgtctttggtactaaaacattagatgaaaaggattgtacagttataaattatcatgctttgtttgtgcttttggaacaatgctttttcatactgcaatatttgcatgtagagttttaattaagagataactgtctccacaggttggctgcagaaggctgcaatctccagcagggagataaatgccagtgccaagtcatacaggttgggtagcaaatgggggggtcgctaagataaaatgggcttgaaattaaaagcatgagagtcacttctttgtactttaatgaaaagtataaaatatttttgatgtattcatttatttttaaataattccctatttttaatgcgtttcaagagtatcctgaatgttgctgcctcagtaggatatttttaaaaaatttcagcatatggcttatttttctaagcaattattatttaactctcaaccaggaacgttatagtccatgacagtttttttccttgtttttccctgattcgttagagtcaagattctcttcccatgttcacaaacgaatttttcttacaagtgacctagatcaaacagaaaatagtctttattgactctagaaaaatcattcagaaaagagacttatatgacgttctaactcagattggctcttaagaactagtggctaggaatgtttcatacaggaagggaaaaaaatttaaacattttttattgatagagctgtacgtgtttttaagtacatgtgatattttgatgcatgtgtacaatgtgtaaatgatctaatcagggtaattgggatatccagcaccttaaacattaatttttttctttgtgttgggaacattataattcttctcttctagctattttggaatatacagtgaattattattaactatcatttccccattgtactatcaaatatagaacttaatcctcctgtctcactgtattttcatgtccatcaaccaaattatcttgatctttttctcccgctttcactttgcagccactggcaactgccattctcccctctacctccatgagatccacttttctcagtcccacgtatgaatgagaacatgaactatgtgtcttcctgtgcctggcttatttcatttcacacaatgacctccacctccatccatgttgttgcaaatgacaggatttcattcttatggctgagtaatattccactgtgtatatataccacgttttctttcttttttaaaaaatttatttgttttaaattttactttaagttctaggatacatgtgtagaacatgcaggttggttacataggttacgtaggtagacatctgccgtggtgtataccacattgtctttatccacttatctgttgatggacaattaggttaattccaaatcttggctctcgtgaataattctgtagtacacgtgggagtacagatatgtctgacatactgactcctcttggatatccagcagagggattgctggatcatatggtagttctatttttagttttttgaggaaccttcctactgttttccataacggctgcactactttacattcctaccaacagtgtgtgagcatttcccttccttcgcatcctcaccagaattttttgtttttttgtctttttggtataacagccattttcatgggtgagatggtctctttggggttttcatttgtattttcctgatgcttcatgatgttgagcatttttttatatacatgttggccatctgtctctcttgagaaatgtctgttcaggccgtttgtccatttttaaattgaataatttggcgggttttgttttttgtttttgtgtgtgtgtgtgtggttttgttgttgttgttgttgttgttgttgttttgctgttgagtaggcacatgttaagtaatgcttaattgagacctccacttccagtccagacacagttcatagaccaaagggagaatgctgttgccaccaaggctgtacttctgatcaagactcactgtttctcctttctgcttttaccctgtcaaccaattaattatgtctgctttgtcctcggttatgttagccaattataaccttttttggaacatgtaaggttcctttgtgcataatgtgatgggtaggggcaaccttccattccctgttctcatagtaaattagtgggtactgagaagagaagagaattgctgtattgtagtatgacatagcataatatagcataatataacatgacatgtcataacatcgtggaataatctaccttctccattaagtattaaaaattagagaaaatgttattccccaagaagaagctctgggcaatttgaagctgcttgtgttagtgacagtataggttctgatgtcttttattactgtttgtttcttggttgaagattttctacatatatatcacttacagcatacctggattggaaggggcaagatttgagtcaactccccttattttcctatttaaaaataattattatttcggagagacaaattgaataattgaagagaatagaaacaatacattttactttattactttcttttataatatcatataaagattctataggatatttactttcctcatatgtatcataacatactacaaaggaatataaccagtttagagggaagaattttccgtaggaaaaaaaagagctagaaatctgacatttcatgcagtccctttcatatcactccttcccattacctctgttattcgtcactttcctgtaacttggatgcagtcatcctctttttacgtttaaagtccagtctattagaagacaatagttgctgaagtttatttggaaaaaaggaagaacgtgctcacaacaggagagcaaaagtcaaattgtacaattaattattttgccaaatacttgaatgggttatcatttcaaattggtgacatgtcaaaaatcttgcattgagaaccactataccatcttttaattcattcagaatggtgggttaatatacctccacactgatgagctttttttttttttttttttttttttttgagtcagagtctctctctgtcacccaggccagagtgcagtggcatgaccacggttcactctatccaccacctcccaggctcaagcaatctttctcaagcctctcaagcagctgtggctacaggtgtgcaccaccatgcctggctattttattttatttttttgtagaggcagagttttgctatgttgccagagctgatctcaaactcctgggctcaagtgatcctcctgtctcggcctcccaaagtactgggattacagacttgaaccgtcacacccgacctgacaaacctcttttaaaaccaaactcatatttgtaaatccaaactcagagtcattgctttttaagacaagagggggccaggcacagtggctcatacctgtaatcctaaactttgggaggccaaagtggatggatcccttaccccctggagtttgagacatagtaaaactctgtctctacaaaaaaaaaaaaaaagaaaagaaaagaaaattaaactacctgggcctggtggcgcgcacctgtggtacggtcccagctacacaggaggctgaagtggaaggattgcttgaacccaagaagtggaagttgcagggagccaagatcacaccactgcactccagccttggcgacagagtgagaccctgtctcaacaacaacaacaaaaaagaccagagggaataaaatttcatgtgaggaaacaaagacccaggaggtgcacagtaattttcatagtcacagaggtgggccctagtgtccttgagtttagcatctgtacctgccgattccctgcctctgccttgagtaaggaacgaatttagtagtcaggaaatttatgaaagaattgcccatagggctgttccacaaagtggactccatagtctattaaaaatatgatcttaaaaattaaaaacaaaaacaagctatagcagctgctggttgcagacataaatttaatcctcacagccatgctgttggatgcatattatctccagttttacagattaggatccagagacttggagaggttagttaggtgattaacccaaagtcatacagtaatagttgccaaaacataaaattcagcctatctgacttcaaagaccaaacactttccatcacactatgctttctctcctttatacttttcaaaaaatccatttctgatgaagcaaagcacatgtatgtgacttacgaatgtaatgctgctatagagttgtccagaactgtgtgtatgtacacccgtccctctgacatctgccacgtttgggagttgtagtaaggaatttctgttgcccttcgagttctattgtccccatgtgtattgattgcctgcaggagtttagttgtcaaattacttgcctctttgtcagttaacagcattgtttgcttgagtggagtaccatactcaaaatgaagccagcaagatttccaaataaaggaaagacattctgataagtaatatggaaatattcaagcctcatgagaggacataatcaggaaaacactgaacaactcattactgatttagattattttctgcagtttccaatgcctgacacaggttttcctattgcattagcctctttctttctttccttttttgtttttgtttttttgagacagggtcgtgctctgtcgcccaggctggagtgcagtggtgcgatctcggcttactgcaagctctgcctcgcaggttcacgccgttctcctgcctcagcctccccagtagctgggattacaggcacgtgccaccacgcccggctgatttttttgtatttttagtagagacggggtttcacagtgttagccaggatgggctcgatctcctgacctcgtgatccacccacctcagcctcccaaagtgctgggattacaggcgtgagccaccgcgcccagctacatttgccgctttcttatgtatctcgtagaggcagtccctaactatcccatttcaagtgcaccgcccctctcactgtcctgttgtgattggtcgtcccctcagtagtgctgtacatagtctaatcgtatgacattccccttcttttttcactttccttttgccaaatcaaacacacgactctctcttcttcctttagtgggactctatacctgacatcgttgtcaggtatagacatgcactcaaagttaaaggaaattaaaatgggaaaagaaaatagtgggaaggaagaatattactttgtttagtgtctgcaaccctcactagaatgtaaactccatgaaggtcgagctgtaattgtgttttgttcacctctcaaacagagaacacatttgctgaatgaccgactgaataaatgaattgcactaatttactgtggagcctcaatagctgctcatttctcttaactattttacttgctaacggatttagcatggtagtacatctttattcattaacatagacaggtagctaccgttctcatgctggcttgttgaattgtgtgatgatagtcctgaatctatgtgatgatagtcttgaggctgtattcactactatatgtaatattattggttacttgtctctcttttaccttcttgaaactaattagccctttcgctcctttctgagttctttaatttttttttttctgagctcctaatatggaaatctgctggtatgtataatacatctgacaaatgaaatgtggataattatattgtttttctttagagatataatgagttgtctaaagtattagacttgaaagcaaatatttcaattaaagaagtcaaaagtagttaacaatcaaaggaggtaatacagtcaaataaaaagttaggcaacagcttcttaacatacatttgctatttgttgcctaccttatttcctccaattttgaaacatacttttgttttttaactttctgaaattgggatgtatttccaaaaagaaacttgcttgctgccaggtaagaggaataaattatgacgcggttgtcaccatggtgctatacctaattacagatgatcaagtcattcagaagaatcgttagactttaaatgaaggaaaggctcgtgattgtgttactaaaacaaaccaaaaaaaagggtatttaattatgtagattaaggggaactattatctgttggtttaaaaaaaaaaaaacctaatgatgtacctgtatgtatacattaacgtggcattttaccctgtgtaagatgtaattaaatggatgattaatgatgttacaattcatgatctcacagatagaagaaatatagtgatcgtgtgaatttggataggtcacttaacctttctaaacattgattttctcacctgtgtaaataaggagttaagtcaaagtttgttttttttggttgttgttgtttttgttttttttgtttttgagatggagtctcgctctgtcaccaggctggagtacagcggcacaatctcggctcactgcaacctctgcctccggggttcaagcagatcttctgcctcagcctcctgagtagctgggactacaggcacatgctgccacgcccggctaatttttgtatttttagtagagacgaagtttcaccatgttggccaggatggtctccatctcttgacctcgtgatctgctggcctcagcctcccaaagtgctgggattacaggcatgagccaccaggcccggtctaggccagagatttttaaaaatcctttccaaccctaatattcttgtgttcttatgttgaaaatgaatcttgaaaacttagcaagattttaaaagtttgtttttttattttttgagacagtctcactctgtcgccaaggctggagtgcagtgtcacgatcttggctctcggcaacctcctcctcctgggttcaagcaactctcctgcctcaccctcccgagtagctgagattatagacatgcaccaccacgtccagctaatttttgtatttttagtagagacagggtttcacagtgtcggccaggctgtaagttttaatcactacttaaaatcacattctctgtggcgcaggggtttctccagtgcctgctcctagaatcagtttagtagaggaagatatacaaatactgtattataaaacatttaatgaaattacagaattctgaagaaaaaataggctatttctctgatctatgtatgtgttttaggggaagagtgattcttttttatcagcaaagaccttaaaccaaaatctgagaacaaacaggagtctcatttattcatgcaaaaatgcttcttttattacaacagtttattacggtaaattatgcattaaacaaaccaattttgtattactatgaatcactcagtatggtgaatttggatcatttaaactgcagggttgtccagtcttttggcttccctgggccacattggaagaattgccttgagccgcacataagaggcactaacagtagtagcccataagttttaaaaaatagcaaaaatatctcataatgttttaagaaagtttatgaatctgtgttgggccacattcacagctgtcctgggttgcatgtggcctgcggcccagaggccacaggttggacaagctggatttaaaagattgtactttgattgtagaagttcagagttcgtatttactctgtaccttaagtacttaacgcatgatcgttctctgcttacctgtgtcaacgtttagctgcggtaacaaatttttgtgatttctatgcttgcgacaaactcactttggcttatgaacttgtcaatttctattcctatcattctgaagagatttccaagtagattatagttttcaatattttcatatagaaaggaagaacgtcttatatactgggctagtgccataattgaacctgaaaggagttgggagggagggcggagaacattaggaacgctggtgttctaaagaggaaccctaagatgaaccaaaatgtatcacttggtctgaaaagattatcactgtggcttattttgtgtcttatcgataaattatggtggactttcaagtataaaaagtgttcaacatcgatttttcattaactttcttatcacttaggagttccagggtataatagagataatcatctggaaagacaggccttttctctctgctttgcccccactaacttttagtgtttgtctagggttgtgaatccaggatgagtttttagcttccatttcattcttcttcctttcttctacgtagtataaattttttccactccaccccatttggttcaggggcctagatagtactaaaggcctaccataaccttctccctgtaataaccagggagcactcctttttcctatccatctattccttcattcatttgttcatttattccttgacatatgattttaacaaatatttgttcaacaccaatttatgggctaaggtgttccgtatataaatcccagttagccactgacaccaaagtcatggtttacagtgtagttacagagaaaagtcaacaattaccatacagtgtgataaatacagtaagtagacttgtgtacacgtgccaaatgatttaaattgggctctagtgaggagagaccaatattgttttaagcctttgctctatccttgccagtgggtttttatgtggtagctggtttgagtatatatgtaagcgaggtatcttgataccaagtagtaaaggaaaattactttttgaaataactgggaatttcagactggtctgtgagaatttgtttctgttttaaaattaaattgtagatgtggccaacatctcatccacaacttgttcacaaacatattcatctcatagtcagagacttgtttataaatttttttggaacatgaggaaaaaaatattaggcattgaaactcagaccgcaggctcatattttctttttgtcattggaattatctctaaattttatgcacgccacacattttcaacaggctgcctctccaaagtattgtgtttcgaaacactgcagattttagttgaactttgcctttccctgtttgtagtatttctattttacttatattgccctgttccagaaactactcctgaaagtagttcagaaggatacgtgaaacagaaggggaatgtacacattaaagctagaagcaagtaagtgctgcagcactctgtattgcttggtctcgagtagagttcctcgtcttagtactagcgacatttcgagcccacaggtatttattgtggggctgtgctgtgcgttttaggatgtttagcaccatctctgacctctacctactagatgctggtagcaccctcctagtcatgacaaccaaaaatgtctccagacgttttctaatgtccccgggggaaaaattgctcccagttgagaactgctagcctggagcatagttgcagagaaatggatctgttttggaggtagaattagtaggacttgtttatggattccctgtgaaggttgagaaaaaggaaagagctcgaagtgaatcttagatgtttggcttacatgcccagtggagtttggtgccatttactgaaatggggaagactgtgggaggacaggtgataaaggggactgggcaggtggaaatcaaatcgtttttgttgacttggacatagcaagtttaaatccaaaagagatgtcaaatgggcagctgttgagtctgttgctcaagggagagtattttaaagcagagtctggagagagtgtagatggaggagaaaagagtggtctcgaaaccaagctctgggagtggttggaggagaatggaccagtgaagaaggctgggtgagaagaaatcaaggagcctgtgctatcgtggaaatcaagaaaggaaagtgtgtcaaggaggagtattcacttttgttaaatacttccgagacattcaataagaaatgctaacactgttttgttataaataactgaaattaattttagctgtgaaaaaattaggtcctaaagtaaataaaaagatagtaatggggacataaaataggctgtgaaatgaatttaaaatgccaaaagttacaaatcccaaagacataacccttgctctggatgtgctacagatcttggctgtggacattctaaaagccattagaaagccttcagtcacttccagtattcacaatgaccataaagtaaaaggggtccccaagaccaccccaggctagatgatttgctgggaggactcacaggactcaatatgttagtcatactcacaagtaagatttactagagtgagaggaactacagcaaagtcagcaaaaggaaaagacatgtggggtgaagtctgcaggaaaccaggcacaagcttccaagacctctcctgtgtgtgtctgccacaggacagtccattcctgtggcagtgagttatgacagcatgtgtgaaatgtgttctgccagggaagctcgtaagagactccgtgggcaggtttttactgggactggtcatggaggcaccctctgcccggcatgtaccaaaatcccaggctcacagaaggaaagcggattcagcataaactgcactgtgtgcataaacagtttaaacatggtgagctgctctcattagtctgagaatggtgggaaccttccggaaatctgggttcccagacaccagccacggctagccttgcaagcaggccttttaaagccgtctcgggactgctatgtgaactctgttttttgtaaacaggccaaagcccaaggaaaatacaagcatagttggcactatgactacatcagaatttctctggaatgggcatttgtttaataaactgtttctaacatattctaaatcatttggatagctagtaagctaaaatttttgtctgtatgtattgggaggcagtctagcatataataaaataatcatagactgtgaaatttgacaaatatggcttctctagtcatggctcagctgcatactctctctgtacctccatttctggtaataaaacctaccattttgaagattcagtgatatatgcatatagtacctagaatagtgactgacacgtggtggccattcagaaatactggtggcattgatgttaataattgcaacaagagttgttttattattgtctttcttgtgttagacatgccattacttttcctggattaatcgattgtaatatccactctcctgtattttcactaaatggctttcagtttttcaattaaactttcagttgaacagtatcagaggcattttaataaaaaattttactgagcttgattagttgatgagaagtaaattgctcgtttttgattaccacattaactctttctggccattagggtaccatttagtaaattacttctctttttgtacagtactcaaaatgttacccaagtgaccagaaagagttaataatgcaccaacaggctgaacacttgactacctccttactattagatcagtctcattatattaaatgtttcccttcctataattgtcattttctttaaaaaatgaaatattggatacagttatttatttttaatagaccttataagctcaatgaaaagtatgctgagttcactcatataccttctaaggggatttaaagtatcggtactcactatataatatgcaaaatcaatccgatgtggataataaatgcacctttcacagtgcgcaagaagggcattatttcccaagggtacaagtgattccccgattatgatctgagtactaaggagtcatattattatgcctccctaagtgcttgagcactaaagagagttgtgcctcatggcattgtagcaggtaaactttcatgtgggcaggaatcctgccttttaaatgtatacattatcagtactcctgtggatgtgtttttatggctaattctaatacagcttttaattattcaggagtactctttactttcttatgaataggggtctgcaatctattcttaaaattacatcttttgctgggcacggtggctcatgcctgtagtcccaagcactttgagaggctgaggtgggaggattgctttagcccaggagtttaagactagccagagcaatattgagacccctgtctctacagaaaatttaaaaatcagccaggcatggtggtgcatgcctgtagtcccaactaatgtggaaggatcacttgagcccaggaagtcgaggctgcagtgagccgtgatcacaccactgcactcctgcctgggcaatagaggaagaccctatctcaaaaaaaaaaaaaaaaaaaatctctagtcaaatatttttccaggtcacctgggaaaattgttgttactctcttggaaagaatattcgactcctgaagtactagtttttgcaatataaaaggttgtctttcactttgggaggccaaggcaggtggatcacggggtcaggagttcgagaccagcctggccaagatagtgaaaccccgtctctacagaaaatacaaaaattagctgggtgtggtggcaggcatctgtaaacccatctacttgggaggctgaggcagagaattgcttgaatgtgggagggggaggttgcagtgagccaagatccactgcaccccagcctgggcgacagagcaagactccatctccaaaaaaaaaagattgtcttttcattgatatagtatagtccaataatccatgagccacttagtgtttactgagttgtcactgaatgtgtaacattaagtgctttcagtgatacaaaactaatatatgactggcttgctcattgattcagtagatgcttgcttagagagctatgtgctatgtactctaagaatacaaaacatcaaagaaattgaagtctgttgggggagatgattaatgatgacatcatagtacaataccattgcagctgtaaacatgcattcagaggaacatgcccagctacttcagcatgtcagagggagaaccgacccagaatggaaggagtcagggttatttacctccaagagatgaggctgagctcaatcttacaggataaataggagtcatctggctatttgtaccccagaggacaatataaagatacaaagttgagaaaaaagatgacgggcagagggctagtgctataatagtctcttgttgtttatttcatgtgcaaagcagaaagcaaggctgagtaagtagagagacatcaggttagggatatgccatggtttaaatttgctgagttttttgtaacctaattagaaaaaggagagtaatgtgtgtgtacacagtggagacagtaaacacatggtcactggagttcattattttatacattcttccccagaatccatatggggcatagtattatttttcctgttttatatataagagcttgtttcttcgaaatattaagcaaattgcctaaggattcagagaagataagcgatggagatagaattcacttctacagaattccaaaatccaaacttgcagagatattgaacaacttgcccaggattatacagtgagtaagcacttaaaaacgtggatttggaaagtgggatcagattatgttttctggttataactggattaattgaaaatgaggacgatcactgatttcacagtgctttattcttagagatgtgccagattacaaaatggatcttttttcctcttatactatgtagcaccttgtccaagcaagctgaaacttggtggatggtttttgttttataacatactttcttggatgattaagagtcaggattgctgtggtactgacttgcaccctcctcctcaaattagcccagtgcagagatgtagccttttaatacatacaggtggaaaggtagcgtggattataataagaaaacaacaaccaagctgtacattttccttagatgattagatctgcctcaggaaatcctgcagagtttcaaatagaaatgtgttcatctttcctatggaaaataaattctcagtgagactgcttacttattttcaaactctgaccctcacgtacatattttggtcaattttgatacttgttctgaaattcttgttggtatttctattgaaaaaatgaactattgtgattattgtattcttctcatagactctgaggcaaggcagaatactgcttaggccaggatttgggcagagagggagtctttttttcataaagaatttttattgtggctgggagtggtggctcatgcctgtcatcccagtgatttgcgaagatgaggtggaaggatcacttgagcccaggagttgaagaccatcctgggcaacatagtgagacccccatctctacaaaaataaaaactaaaaaattagccaggtgtggtggcatgcacctgccgtcctactactccagagactgaggtaggagggttacttgagcccaggagttcgaggctgaagtgagctatgatcgcgccactgcactccaccctgggtgacaaagtgagaccctatgtcaaaaaaaaaaaaaacacagaatttttttgtaatggcatttaatctgtaatgaattatgataaacattattacattattatatgttaataatacctacctctcaggattagtgtgagaattaaatgagtaaatatatgttaacatatgtgaaatgtttagaacagttactggcacacaataacctctatacaagtatttgttattattacacattttttattttattttatatttagattatctattttaatattgtatatgtattggccttacaacaatgaagaattccgtccaatatgtaggaaactccaaatgggaattgagataaatgccacgaacaaatatggtgtatttttatttactttaaatttgcacagattaactagattgttgtttctgctgttagtagtaatatttttattttctgtttatagcaagtctttcttcttcatagatcaagtttgtaacttgcaattatgttggggcaaccagtgtcaactggcactgtccagagaaaatccgttgagatttgtaagccattcttataaaattaacatgcaaatagcctctcaagtctttcttctatcagtgtggccatgttctagcagtaggactgaagaccattgaataggaatgttacaactaatgcctctactgggcgccggagcaaaatagctgccaataggcatgccatgctttttagcttcagtgaaattccagttagaaatcttgagaggtttcttagtggctgatggcagctcacaagtgggtcagaggatcacatcctggccgccgcaaaaagtacacacttttttttctttccttctgccaagaccaaaatcactgacttgctggaaagaaataagcagatgtgactgctgctcatcttcaggccagcctcctatgttttcctgctttgatggcttggcggaacgctgggcacatataaatattttatattggtttaggcttcattcctcagcatggagcctgtttctgctagctcatggtgaacgtttctgtgaagtcactccttcttaccccatatccatgaaaatctcatctgttgcctctcctggtgtcagaaagctgaagtttaattcatgtaatattagatatttcatttgtttgtcagatggaatgtttattaaatagttttttactctatgtcaggggttcttttttttcccttgtttgctttttatgcattcaatgattattcactaaaagcctgacagctggcaagatatcgatacactaggtactttgaaggagtgtccagaagaatgaaagacataaatacagttaactgtgtgtttcagttagggaaaaataaggatttcaaggaagtacagtgtgaatgaagtgttaggagctctgataatatctgccatttctctgctctagaatatcttgtctgatttcttatctttctcctgtttcatcctttttgcattctctcgtcatcctgtggaactcttacataaatcagtgtcattggtggtttcttgactcagttttcaaaaaggctagctcctgcagtcatttcatcatgaactacagtctgtaattgcaggatctaaactcttggtttataaatatcattgccgtctctttctcttctatgtaagatctctctcttgtctagttcaatcttctaattacgtacttcgaggtcttttaccaattgtttgcaccagctactttatctttctgtttcgtgctccattactccctaaaccaaattctcagcttcagtcaagtaaactatttatttaccattcccggagcaggcactttgctttctgctatttcttggcctctatacttgcaaatgcttaacatttgcatgtagaatgctctccttccttctcaccatgaaaacgtcttctgccctttttcaaaagttttctatgacaccgtctgcataatctcattgcctctagtaattctacattttccacatgtgtttaattatttagccatgactagttacttgacgttaattttctatcaggtttctgtggatacgtttgtgtccctgtctctgtgttttgttcatgctgcagcgtgttaagtttccaggtaccccatacagtgttctgtgaatgtgcacagatgcaaactgaaatatatttatatgaccatggaagatgattgattcatcttgctgctcactgactgctattttggagagtgcattgtttgtaatcttcccagtgatttaactgtttttattaagtgagggctttaaagcacttaccatttgcttttggctgttctttttgaacaggagtaaaaatgctcatagtgcttggcaattgaatgcttaaatatatacattaattagtctaatataagcttttagatagtgttttttatgttcacgttttgggcaagtattcaggcatccgcacgtctcttctgtttaccaaaggtgtacccaggaagagtttgaagaaacaatgttattaacaattatttatggagttcccagaggcacaaggcatttggctaaatgcttagaatacaatagtaggcaaattcagaaaagggagtttacaagctaacaaggcatattaatgaaatgatcacacaaataaatgtcaagtcaccactcaggtcactcagggaactggtacttaagcagagatttgaagggtgaggacatacctggggacggaggaaggagagaaagaagaaaatacaggtaaagggtagagcatatgcagaagtagcaggtgggagcctgacatgtttgaggaattggaagtagatgattgttgctggaacacagagcaaagcagcataatgcaaggtgagctttgtttaaggacttggatctttggccagaaagcagtaaacagtgctgggggttagaaggatgtgaccagattgctattttgcattattaccttggttacaatatagagcaaattggagactgcagggaggtggtagtggagttgaagagaagtgggtgggtgttggaagatatttagagaatactaatatagtatggatgtaaaagcaaaggaaaaggaggtttccaagatgacagctacatttatgatttgcaggaaaggatggctggtggtaccattttctgaaagggggtatgctaaaatagaacaaggtttgggggctgaggaaagatccttagttctgttgtgaacattctgaagttgagacattttgcagcattcaagtggagatgtcaagccactagatctgtggctgagtagctcaagggaaatgtcaaagctatggatatcggtgttataaagtgatcattatatagatgataactgacactgtgcgtatagatgagattgcttaagaaaaaaagcatagattgggaagagaggcctgagtgattctgtatttcagtggcttagtaaagggacaagaggctacaaaatagactgagaaggtacaagcagaagggcatggaggaagtgctgagagatgaagagtgcagagtccctgcaggcaagagaagagaccatttgaagagggacctaatcagtggtgtagaaaaccatcaaacatcaagaaagatgaaaaataaaaatgctctgcttgattcatttacgtggagaatactgatgagctagcagtgacttctccggagggatgggagtggaagccagagtggatgaaggagtgagcaaggagatggagacagtgggaacagagaactcctccaagaagttcggctatgaataggaatgagaggaataacatggtatctgtatgttcagggaatattttaatgtttttaaaattatagagaattatgagtgctcaagtgctattcagatgtagaaggaagatattggatgtgtaaaccaggtttgtgatcatcaacaaaccataaggatcattcgaacgatattaaattttcgtacagcattaaaatttctcctctaagcacaactattaacttcattccttcattcagcaaatagttattttaacactttctatgtgtcatgcactgttctaggttctgggaatataaatgtgtataatatttactgagatggagaagattcggtgtgggtgaggttgaatttgggggaaaatcaagaagtttgttttggccatgttaagtttgagctgtcttccagacacccacgtggagatgtcagatagactgctggagaagctgactgtagagtgtggcagatgtgaggacagggaccttagtgtccttattgctgtatccccagcgtctggaacacagacataatttgacttgagcactcttcctaatactcctagagaacctaattgatacaaagtttactgtgggacacaataaagaatagaaaacggtaaatctaagattgacaagaaagtttgatttgaatgtaaacctttgtaaccttagccctacttgtagcttttgttcattttaccttcaggcctctagcatttcctccataagttattatgaagccatggtggagggaggaagagggactaaaattcaagatgttgtatagaaaaacaagaaattgctaacagagtattcgtttccaccagataaaaatttcacttaaggccaggcacagtggctcacacctgtaatcccaacactttgggaggccgaggcgggcggatcacctgaggtcaggagtttgagaccagcctgaccaacatggagaaaccccgtctctactaaaaatacaaaattagccgggcatggtggcgcatgcctgtaaccccagctacgggaggcggaggcaggagaatcacttgaacccaggaggcggaggttacggtgagccgagatcacgccattgcactccaacctggagaagagtgaaactccatttcaaaaaaaaaaaatttttcacttaaaaaatatttatccagtgaacccgtgtgtctcaccaaggattgagaaaacaggctgacagaatggtgtcagcggtgttgagtaagcacctacttcatgtcaagaactgggctaggaattgagatagctcggtgaaaaaaatagatgcatatacatatatggcttctgctctcatagaacttagtaattttgcaaagggcaatgaagaggaactgcatatgctaacagagctcctaacgaaggaactaacctagttaggaggatcagggaggatttccctgaggaatcagtgttttgctcacatgtgaaacatacatagatcatttcaggcagagcgagcgagtggtactaaggttagtatttactgagcattcactctgtgcctggcacagttttaaacactttcattatattactaaggtagattctatcactaatcccattttacagatgggaaaactaaaaccgctaagagtttaaaaaacttgctcaacttcaaacagttggtaaatggttcccagaattctagctcaggaagtctgatttcacagcacaaattcttacctctattttggttttttaaaagcatggtgtttttgaaaaactgaggaacatctaacatgacttaacagagcaatatcatgtgctatcttatgggtttgcaattttggactttatcctaagccatagaaagtgattctgtgtgtgtgtgtatagaaacgaaatatttttggacttccttcatttccttaaagcctcaaaatagagagcagaatgttaagaaatctgtcatttgtgcacatgagcatctttcaaaaacacaatcatccaacaatatactgaattgattgtcttaaaattatagggtggtgcaaacattttcaatcatgccattggtcaagggaaaaaagttagatgagaacttctattgaatccatgctattttataggaattttgctagtggcttaacatgcattatcttatgtagtatatgtaacgaagagtaagctgtgttttcataccagaactcattactagcaattcagcacttaatatgatggagaagattagaaaacagattttaaatgctaaaagccaacaagctcaatagcaaaatctggttttaagtaacatttaataagctatcatttaataaaatagtaacaacaggccaggcacagtggctcatggctgtaatcccagcatgttgggaggctgaagtaggaggattgcttgaggccaggagttcaagaccagcctgagtaacatagcaagaccccgtctctacaaaacttaaaaaaaaaaattagcgaggcgtagtggcgcacacctgtagtcccagctacttggaaggccaaggtgggaggatcgcttgagcccaggagtttgaggcctcagtgagctatgatcatgccactgcattccagcctgggcgacacagactctgtctctcaaaaaaaaagaaaaagtagtgacagccatatatagcagttttcatttattgagcacctacttagtttgaaggttatgataccaaagccagaaccaagtattttatagcaaagtctctcccccttgtttgtaaattgagtgcttattttgtgcctcacatcatgccagcatcttcagtttttggctctgaggtcatgttcattggaactgtgtctgtggaaatgccttgagttctggctctaggggaactctttagcagacgattttcctttgtttctgccaagtacctgaggcacagcttacctgggacacttttttcctctgcttgaggttttcagacacaggtaatgtaaattcaatgggcaaacccatttgagggctacctcttggatacaaattcttgaaggagatgtttttctttctccacctagagccaaggtcaaggcaggcaggtttctttgtgtcactttatatagggtagttttgttatagtttccctatactgagagcacaattctttgggagccttgctttatggaagggtttttattaaactctctactttcaaagggacaagccctgggctttatcttcaccccagcgttccgtgtactctttcatgatgaagctcgaggtcaagtttcggattcaccttgtttttggcctcttagtatactttactttcttacaaagtcagtgagatgagtaaaaatgattctatacaattttttatcctttatttaatgttagcaggagagttgttcaggtgtctactttccatatcactgtaaatgaaagtttaagcttttaactatgcattaagctgttgaatcctcacaacaattctcgtggtagatgtgaagaacacacgggttaaagaggtttgtatgactcagctaagatcatacagccagtaaaaatttgaaaaggagtttgaacccaagccgtctaactttggaagctatagcaaatgttggtgacataacaaaggagttcctaacgaatgtagcttgtgattgacctatatctttcctactagaaggaacaaacacaccagtaatgactcgatggatgcatggatgcaaggatggagggatgcatggatggatgcatggatgcaaggatggagggatgcatggatggatgcaaggatggagggatgcatggatgcatggatggagggaagggagggaggaagggaagtgtctcaacatagagaccaggagaagaaatggcactacagagtgtatttatttgaacaaattcaataggagaaagaagaaaggttctatgtcaggaggttcatgcaattattctgctgcatctggtagggtcattgcttctatttggaggttacatgtatcttcagaaagtttagctgtattaccagttgttggtgtatgctgatttttatgagtgaagtaatataataagaatgggcgagcacaaggagaccagcattctgcttttaataacctctaaccttaaacaggttactgaggcctcatctaggcatctgttcccttatctttaaaaacaaaagttctttaaagtctcatcttttttttcaccaaaaaacttaaaaaattgagatagaacatattttcatatatatatatgtgtgtgtatatatgtaagttgttgatacatgcttttttggtggtattccatctatagaaaggataattttccagaaaagtatattttttttttagtttgtgtcagctactctattttaagtgctttacatactgtcgctataggatagtcggatatgaatctttataaaagtaattttattagggcttattttattctttggaataccaattcagatgatatcatcaatataatccttttggattaaatagacgaaggaggttgccttttatttttatatttaagaaccagaatattgtgtagtaccttttgcttcaagatgttcaggtgagaatgtttcaaaaaactaaaataaagggaaagataacacactgtcagttttcctctcaatgtttcctgacaaataagtgagttatcagatttcagtttatagttcaataagtttatataactaataacaaatattgtattcagaaaggtatatacatgtaagtttttagttgattgtgcagaaagagagcagtactctgccctaccctattctgtgttttctcgcctttccaatttctacttgcctttcaagttccagctcaactttcccctgcaaggcattttcctagctccctccagcacagcattgtggattttttttttttttttttttttttttgagactgagttttgctctgtcactaggctagagtgcagtggtgtgatcttggctcactgcaacctctgcctcccgggttcaagcgactctcctacctcagtctctcgagtagccgggattacaggggcccaccaccatgcctggctaatttttatatttttagtagagacagagtttcaccatgttggccaggctggtcttgaactcctgacctcaggtgaggattacaggtgggagccaccgcgcccggcctgcattgtggatttttaaataggtaacctctcagtctccttagctctcatgactatcaaataaaagttgtgttgctcatcttctccttacctcctcaccttttaaacccaggaattaatggaaagaaggagacattcatttaaggagagaacctatgcgttggcttgatgaatgatgactgtgtgaaagttagggacttggagtcaaatatatgcccacactgttaaagacagtatcatttacttaacacataactagtcttcatctaggtgaatttgagcaaatctcttaacacctcctggcatcaattttcttacctgaacaagagttagggtagatcaggaaccatcaatcagcgcatcaaaatcttcaacagtagatattgaaaacgtacatgctggatctcatttaaataaattccccttggggatttacttttattccccatctctgcagagattaaaaagtaaaggaaaattgcttctcctgatagaaaaaaaagtcgtagtttttagtcaaggtgatttctaagatgccatctagttctacaattacagagctatgagtctatcacgtgagtaaaataaaattgaggggaaaaaagttaagacaacataccagtgtatttacttgatatgtctgtttgcgtggaaagacgtcttttttgtttgtaagaactcattaatagatgtatatttttggataggtgatatatcagcaaactgttgttagcatctctatattatatcttaaatatttccacttgccttcagccccactacaaccacccaggtctaagccactctccattacctcttgcctggacctctacagttgcctcctgcttggtttctagcagccagaatattttttaaataaaagctgaatctcagttctctcttgcgcagaacctctcctggcctactagaccctgaataacttggccttcgcctttcgttccagtctcatcttgttctgccttttcctctgcccttgggccttctcctgttttggaacgtgccacagtctccctccccggtggtattacacagtcagttccctcttccagaagactctgcccctgtcaactggtatggcttctctttctttgtctttagatctcagcttaatatagctccacagaaaaaccttccctcactgccctatttaggtagcccacctgttttactctgtttctctgtcctgtttgcatcttttcataggaattacagttgaccgttgaacaattagggggctagaggtgctaccccatctacacagtcaaaattcctcatgtaacatttgactcctccaaaacttaaccatgaatagcctactattgaccagaagccttaccgatcaacagtcgattaacacatatttggcatgttgtatgtattttttactgtattcttacaataaaggaaactagagaagggacaatgttattaagacaatcataaggaagagaaaatattcttactgttcattaagtggaagtgggtcatcacaaaggtcttcatccttgtcatcttcacgctgagcaggctaacaaggagagggaacaggaagggttggtcgtgctgtcccagaggtggcacaggaggaaggaaatctgcatgtaagtgcgcctgcacagttcaaacccctgttgttgaaggaccagctgtattattactttgttatttgtttccttttaatttttctttctagaaaaattgacagcaggggccatgtctgtttggtttaatgctgtaacattccaagcacacagcaagtaagtgctctacaaatatttgttgaatccttgactcaattagacatttaccatttttttttgttgtttgttttttttagagtcagggacttgctttatccagactggagtttgtggcacaattatggctcactgaagcctcaacctcatgggctcgagcaatccttctgccttggcctcccaaagtgctgggagtacaggcatgagccactgtgcctggctgacatttatctttttatctgtattttacttcagttaattaaaataagttttattctctgaaaaccgacaatcttttattctccaagcaactgaaaatagtctggaaatgtgcaaagaaatagggaatcctaccagagatttaatctgtccacagataatcctgaaaatggacaagttgcttatggataatcaaaagtgtgtccaagagttaatctgttttttgaaaaggttctatatatgccttgctgtagttagcagaggtcgcttcaaaagctgttcatattggaatctgtgtatacctgagtgtgtatgatgaaaagtctttaattgtaggtttgcaacatgtttgtagaatctgatcagtatgttaactgctggattaatcctgttttctaaatcttcaatatgcatatttttacaaaagaaatatctcctcttccatttctagatgtacctcacgtgattaattctcatgagtaagcagagatcttgacctgtagcttcttacatctgcctatttgtttagcagaacagagaattacggtaaaacagaggcatggtacaagcgtttgtgtttgctttacaaacacgtctcccaacttagtacaaaaaaacactgcaaactcttaattttagatcttcttaggtttgttgtaaatagaaagtagagtataatgttttatagatttatttctaaactatattatggttacttttctcgtgcttttcagatatttgagaaattgtttatgtgctgtcatgaatatgaattcattattattaaatgttaatgaataattttgcttcaaaataaaatagtgagcctgtatactttcacttgtatagtgtcctagcccatattttaattttttagtttttccctttgttttctttcatgtcagcttcttcatctggtccatcagttattgaacatattacgtcacctccgccccatcccatcttcatgacaatcagaggaggttgctaagtgctagtttcatccaggccattttgtggccaaacgctaagcacactaccagttctatccaatgctcactcactggtgcagtttccatttgagtccagccctatagaaagaagatgacagctttcggttttcatagtttgactaaactatctttttgtgtcatgtaaggaaccaaaatcatattttaaacttgctccttgatagctccttatttaaaattttctgggaatgttttatcactacagatattaaggcatggagaagaaataaatgctttattgtagccacagaaattgttttctttttctaacccaatcatttgccatctctctgaaaaaaaattccaaggccaggcacgatggctcgtgcctcgagtcccagcactttgggaggtcaaggtgggaggatcagttaagcccggtagtttgagaccagcctggacaacaaagtgagaccccatctctacaaaaataaaatataaaaaaattagccacgcatggtagtgtacacctgtagtcccagctacttgggaggctcaggtggaaaagatcctgtgagcccaggaggtggagggtgcagtgatctatgatcataccactgtgctccagcctgggcaacacagtgagaccctgtctcagaaaataaaatattcccttctcatctctgatcagaatagaaaaagaccgcccgtgactcatgtttagaatttttgcaatccaaacccagcttttccacattttatgaaaatatgagctgccttgagttgcacaatgttcacagtaaacacacggttttaggaacttgaagaacgtccatacatagaacccagactcttaactccaacacagatcactaaagctttggactgaaaagcaaggagtgcacaggccgaggcaactctacctgggggaggaacacttccatgaccccaaggccgggtgagcctgttggttctggcattcattggttagtcacctgatgtagatgttctactccagaggtggcaagcgtgtgggacatttgttaacactcccacctccaatacttacaacagacatcaataatggatcaccacttctcagccttttggctaagatcaagtgtagtgtctgttcttaccggtttaataatggatcattgcagtgtttcctactgagtgcaaagacagtcttgggatctgtcttaacacagcagtcactttcaattgccaaccttgttttaaaaaagaagcatcagcactccctgaaatccctctccgtttttcttactctattcttatgctatgcatcccctcttcccacccttccccatcccctaccatggcaactagactcttatttttatgattgctttatgatattttctacagaacctgtcatttacttttaccaaatggaaaacagagatgatgtggtttttttctctcttacttggcagcccagcaataacttaactaagtgagcagtagcctttttaaggtaagatagaattttaaagtcggctccagatataattctaatgtgtccggtgacactgcagaaaatgtaaatttccctggaaccatgtattattctgggatgtgtgcatgtgtgcatgcttgtgtgcatgctggtagatgttacggtcaagtaaaatgtcagcacagtaattatagaccaaaaaagttcacttcaaagaattaatactgttcaaaggaaaattcacgatttggaaactcacaaatgtaaaactaaagcattttcttttcgttcctttccattaaaagttgagaggagtagttaccactctaggatgaagtctataatagcataaaaatccctctggataggaaagagtgtgttgtttgagttttccagcccatctgatcggatttcagaactctttaagcgcttagcttttggtgtttttgggattaggaatgtgtgttcttgtagagagttggaaagcaaatgttaggcttgtcagcatctgaggaccgcagaagcagtccacccattgttcgagtcacgcttccagggcccagcacttttcactgaggagcctgcttttgaagtgttttctttgcttaattttctccacctttgagatcctttcagaagtattttctttcaaaatatcatgcattcttctttagaagaattggcctttctaataatacaaagaaacataggatacttgtaatctgtcaagtagggctaaaaacattagggcattaaggacagatagaataagggttgtggaagaagttttgcagtcgcattataaattgacttttttccctttttaatttagtctgactatagagaactatatctaggcaagaaaataagaaatgttgggttcatttagaaattgcaattggttttttcatacgtaatgggaaatcaaaatggaaatgctttggcattacaattatgtattggagtcttacttgtgtatgaaaataattgaaggtctaataaaaattccgctcaaaaccagtgtctgttattttatggagttacattttaaacattaaccaagatgaccataaaattatgtggaaagtttacgtttaaaaaaagtcagcataaaatgttaacatgggtttgagaacagaaaatagcaattcctaaaatagctcttgtagtcatatgtatgtatgtatgtacgttgatttacaaatttaaatacagaatttaagaattagaatatactttgattcacaaaataaatgaaaagtagctattcttacagacctatttgttgagatgtaatccacagaataattacatatattggttcactgtatatctctctgtttactaagacttaacactagggtcacagatcctgaagtcactcctgttgtttttctcaactgctctaataaatctgtgacctttctctcaggtggtagcatcctttgcagatgttaatttcaacatctggtggactcattcttaattttgttctgtgaaaccttattctgactttaattcttagcctctgaagcttgcttaaaatatttctttttgggttttctgggtgttcatcactagagacaagttattaatgcttctaacaccagggatttgtggaggatcttctatcactgtaaatctgtgctcccttaaagtgaactatatgaggttaaaatagaagatgtctatttttttttaacctcaatacttaatatagtgcttaacacagagcagttactaaatgtttgttgaatgaaaacatatcctgaggcgttgggattgggaaggaaagatgttattttcaacttctaccaaaggggctaagcagtgctttagggagtaaaccagttgggagatgatttagtttctgtcacaaaaaaaatccttggctgggagcagtggctcacgcctgtaatcccagcactttgggaggccaagatgggtggatcacttaaggtcaggagtttgagaccagcctggtcaacacagtgaaacactgtctctactaaaaaatacaaaaattagctgggcatggtggtgcctgcctgtaatcctagctactcaggagactgaggcaggaggatcgcttgaacccgggaggtggaggttgcagtgagctgagatcactccactgactccagcctgggcgacagagtgagactccatctaaaaaaaaaaaaaaaaaaaaaccttatatgtataattgtcccttcatttgtccataataacacgaagatgatgaaattgtccctttttcccagagctctcagctaaaattttctgactttgatttttaggtccatacctaatgttagtccatgttaataaacagttttcaaagaaatataacagcagcggtggtaggataactatgtaaactatgtgaagaaataaatacatggtcaattacgtgaatttgcatgaagaaataacttttcaaactgtgatgattagaaaaggactgaataaagtgcaatgaatctattataaattgtacaaaagagagagataataatataggaataaaattaaaattataaatataatttcataagaggcaaccaagccatcattactatttcatctgacttaatatgaccccctgttcattatgcagaccagtggaatttgataattgtgtagtggtattctaaagttgcatcttttactgtatttaaagttaaatgggccatgcacagtagctcacacctgtaatccctgcacttcaggaggccaggctgggaagatcgcttgaggccaggagtttgagaccacccttggcagcatagtgagacccccatccctacaaaaaataactagccaggcgtggtagtgcatgcctgtaagtcctagctactcaggaggctgaggcaggaggattgcttgagcctgggaggttgaggctgcagtgagctgtgattgcatcatgacaccactgcactccagccggggtgacagagcaagaccctgtctcaaaaaaaaaaaaaaaaagttaaatgatatgtaacatttgggagtgacaagactgttcatcagcttggggcctggcagcaacttttctagagttagcttttttctcctttcttgttccatgacttaaaaataataacttgctgggcatggtgcctcattcttgtaatcccagcactttgggaggctgaggcacttgtggccaggagttcaagactagcctgggcaacgtagtagatgccctccccgccaccatctctacaaaagaaaaaaagttaactcttgatttgctttctagtagtgggtgaatttggagttccaatgattgtcaacccattaattcttcatttactgaacatctccttatgtttcagatgctgcaaagatgtacaagactttgtttcctaccctccaggatatttcagtcttactctgtgatacttaaactattttattttgcattagttgaacctttatctgaattcagttttgctgtaccattctgaaacttgaagagtgttctgagagctaccaagctaattaaaggattagaaaatgagactcatgaaaagaactcaagaagaattgaattatttaacagaaaggagagaaagctaaagggagatacattaatcatttttgaagatgtaatggatgatgaccatctagttctagcattggccaaagatgggaaaggaagaagtggattaaattatagaatgagatagtaaggttagacttgagagtctaagaacacaggagttattttaatatgagtcctcttaatgaatgtagtcctgacatttttaaagggtatttttaagttacataaagtattttttgttttcccaagttaaactgtgactgaatttagggattaacagaaaaagagtgttcaagtttttgtatcatctttcagaaaattatagagcttgactagggagcgagccaacacttggttccgggacatgcatgatactgaatcagtaaaaagcaaatggtcacagcaagggcagccctctcgtaaatatatcgtaatttgcttttgtaatctttaaatagtttttttgttctacttttttagacagggtctcactgtgttgcccaggccgtggtgcaagggctattcacaggtgtgatcgtgcacactgcagcctcgagcatctgggctgaaggcttcctcttgcctcagcctgcagagtagctgggactacaggcaagagccaccacgcccagcagtgcttctatagtcttcataaatcgtttagaaaattgaaatgttctcactcataggtgggaattgaacaatgagaacacatggacacaggaagggggacatcacacactggagcctgtcgtggggtggggggagggggagggatagcattaggagatatacctaatgctacatgacgagttaatgggtgcagcacaccaacatggcacatgtatacatatgtaacaaatctgcacgttgtgcacatgtaccctagaacttaaagtataataataataaaatttaaaaaaaaaaagaaaattgaaactcatttactagagataaacttaagagcataatgaaagtttatttttaaagagtttcctattcctttgctcggttgcatattgctagggacgatgtctactaagagttaatgcctcctctcatttagatttgaaaggcattcttgccgttagcgtttacagcactttttcagaccacaacagcttgataactcgggttactatctaaaccttcaaagaaaatggagagttagagtccatctgcgttgtgatttaacttttcaaagcctctgatttttaagccctttcacttcaggtgccaaattttctcaaagcacaagaccccttaactcaatcttttctctctgccaaatgaacaattttatgtctcttcccttactctacagccactgaaatctagtattcagtaatatacttaggaaggtatctcagtttttttcttcatgaaaaccttctgtgctgtattacttgtggccaatctcagacgcaagtgtaagtacgtacatagaacctgacaaaaatttattccttagctaaaaagggataataattgcttctcctcatgcttagaaacattttaaatataacaaaggctttctgatgaccagctgagttttatctcttcttcatccttcatctgattaatcttttctttcgtgtttttatttctcagttgcaatgccaaagctctatttgtactgttcttctaatagaggaaaaatgcatgcttgcccagtttaaatattccaacttttgccgagtgataattaactgacctcatcccatctgaccactgacttgcgaaaatcaagttttatagtgtgattgaacaattagttgaactacattatccttgtaattcatattttaccaagaattacagttttctacatgatagtaatgtaaatgcatcaggaaaagagggaaatgaaactaacttttattgggtgcctactttgagcaagcctgtgtgccaggcaatttgtgtgtgtgtgtgcacgtatgtgtgtgtgtgtgatatttaatttaatgttcatagtcttgaggctttcttatcattaaccttgttttacagatgaaaaatatgtagcatggagaggttaaataatttgcccaagattttaggtttattaagtggcagttcaaatgctcatttacttaaaagtcatagagaaaaaaaataatcaaaagaattctgaaacaaagcccatgtcaccagaatcaagagtacttggaagagaggggtcagtgtctaatttgtcttttcgcagctttaattttctatttctacttctgtccgtttccttttaagctttttttttttttcctttcacatgatgtacgtttctctaaagccagagtagtgagcagcttgaaaggttaaggaaaagaggaggtagggaggcggaactattgtggtctctttatttgtcatgcctcaagcatacgatgtagtaatattccttgtcttccaaaaaaagaaatcagtgaacgtggttccttacttagctcgcattaatggccatgtgagtgcatgctgaaaatgtatatttaggaaagtaaggacataattaacataaaaaccattctaatagaattagtctatgactgaaggaggcaagcgagtccaaatcattctgtattgttcagtacatttttttttaatatcaggcataaatttaactgtgtgttgccaccagtgacaactatcatagaggtttgggttttttaaaatcaagaaatatagtttgaatcttgctcctccatgaactgtaatactatgtaagtcttacttaaaatattatgcttatatggtagacattatgttagtataattgtgaaaaaaaatagttgcctagaagtagcagtggatgctttaaaattttttttcaatatatttaaacaaaaagattatttgtatggtttggggcttaaacattgatttgggacctaaagtacatttaaaactacagcattggtgatgaaattttggcctggttcaagtaggtgctcagtaagtgagcactgaatgaatgtgctattaactaaacagccttacaaataaataccatgtcaagaaagactcagtacatcaagaaaaccaagtgcacatattaacttaaatgcatttatatgggttttaaattgttgcccttcaaaatgcaataatgtatttattgatcttgattttatgatttgtaaaatatgcttttttaaatttcctgaaaattaaaaacttaagtcattaatccactactctctggaattactttttttttttctacgaacacttaagagtttctctaaaagaataacttcccaggtcctgaggcctctggaattactttttttattctacaaacactgaagagtttctctaaaagaataacttcccaggtcctaatgcttaatgcaggaagtaatattagtactttttttgttgtttagtctctttctctgaccaaatatgccaccaacttgagtctcattgtccctagcccattaggaacaatagaagttttaccccacttcccagcccttttcttaggaatgtaggaatctggctagaaggcacaacaacctcccaccttcctagtagaccaaggattcctgttgtcagatgcagtgggcatgaaagcagcaattttacagcacaaaaactccaataacatttacttcggttggctgagattgcaatgcacacaggcactgctcattcttggttgcttaagcaccagctagcttcccttggctttttgccactttgtgcatttcagagacaagtcctttcaggagaaagcattttgcttgtaacttgcagtggagtaaacagaccattcaggcatagtttattgcattacaaactcaactatgcgaactatcccaaaattgaatacaacaaagtaattagtgaaatcatttggtcatgagaattcataaagaggaattgtcctatttaaaaaataaaatttttcttttctaaagaattatttaaaactttatatttagagaatggtagcttatctcttataagttttacttacatagtgaagcttaaagtgaccaatttacaagtgtcttccccttcccactcccctgtagccagcactttgttgaattcatttgggaaatcttaagagggcacccacgttgcattataaagcaaacactgaaatgacgatgacccactcctacgtagactgaagtgctggcatatcaaccccatgttactatataaagaataggcagagaaaagcatacaaaaacatctcaatagcctgactcaggctgaactaggtaaaatgtgcatacacattgtggattccctagaagacaggcaagggaaggcaagagggatgtgcattaggttaccctagaggcagtattcatctaatcaagagttcattcattcctgcagccagtttttaaaatcatacatctaatgtgtactgaaaaccagttgctaaatatggttaccagacattttcttcttctacaagattgtcctaggttctgtatttgtttttttgtggagcttttttcggagaactttaaaacaaaattataaaatctcatgtaaaatcaaaattaaatgactttttctattcaacattgtatctaattattacctgtttataaaccaatcctgttcatagggtcagagcaaactgcggctttcaaaaggatattaatggttagtgcatttgttaactgggaccctatttattgttcctgtccaactcagatcactcgtgtgtgtgaactaagtactctgagcttcattagaatcgtaattgtctgtaagtaaactgtgatgtacttgaatttctacaattgtgcttatttttcacattttgttcaaataaaccagggctcagctcttaacattttcaaatacttgtttcattttaaaaaaggacaggggccttatttgagctaacagatgagccctcatttctacggaaccctaagcaagatcctatcaatccatgtgctaatggtcttttttattgatgaatttggcccttgctctgttgattgaatctacatatagtctctagccagtgatgcttaaatagaagccacagggtacaacattttggagttgaagttcagaccacacagtctccctttctgcatcccacagattctcatctgtgctctctcccccagcctccagctgctgcactgtcaccagcccagctgagattcagaatcacttctggtgtggttctgtccctcaggtaccctttatgtgcctcagaaacacttttacctagatgtctctctaccattcatacatgtttacagtgatttccttctgagtaaatatatagaactatcaaaatgtctaacctgcccgttactcagttgcagtcctagtttacttcccgcttgatctgattgattccgtttctttggagtattagaaagagagagaacttgcccgataccttctgctttcatctacggctacgatccgatttccttcccttgaatgcatgaaggaagggtttaaatggcatctgaggtaatcgtgagtttctgggttactttgcagtggtttgccctcgatggagtgcacaagaggaaagaatgggaatagccctgccctgccagtgcgtgcctgtagcgaaaacgcttggaaaacaagtgatgcactcctaatgaattgtgcttttggttctttgaatgtgcacagcatctccatcaggtttttacagctggactctagctgtaattgctactgggatgagatgcacaacatggggtgttgaagctaagaatttgtagtgttttagtggccaaaaatacatggcatggtaggagcatcaggcctcatgaaattcacacttgtatatcttcatgttcctcacccgtttctgacatgccgctgatttgccaacaggctactctagatgaaggggataaaaatggcaaagctgaaagatgttgtttcttaaaagatactgtgtatcagtggagtaagaggaagtagattggggatataaatgcataaaaaggcctctgtagtcattcttcagtgaagacaattggtattaatctcatcaatgcaacaaaacaaaaaagataacaattttaatcttattatagcacaaaatggcatgcattaaagtatttctcctaatgtaaacaataattctatatttctgtagcatcagctctcagatcccttgtcctgatttgtcattagatataaatcagtttttatgcttcttccagagaagctttaaagcctaatgtttccttattggagatgttataattccaaagagggtaaaattgatagtttcacagagaaaagtatcctatccaaaattatgatgtaaaagaataatccaaatgcccatgctgatccacccttatggttatttaaggtataatcagtgaggcttggaatttaatgcaattccattggcatcataattttccagggtgtcagctgtgaccactgagttcccaacccagttaaattattctttcacattattctttgcattttctgttttcttctttctttcttttctctttattcctcgggattttttttttttttttttttttttgaaaatcaatccctgttgtgtccatccaaccaaaatattttatagcgcttacgttaactgacattttaaaagcagtttatgttgtagatattaattaatcctgagaacagtacaatgctcaggagagaattatttgaattaaatttgtcaaaagtggtataatgcaaagattgccctaacactgctgaaaggagtaattttcgttgtttccatagaaatgaggagttccttattctttggtccttactcagatcatactacttttgtttaattacaatgaaatagtaaccactaatcaaaagattctttgttctatttagaattcaaacttttgttctcctgaacatatttacctgcctttctaggattactttctaatggcaaaaccagaaaatggcaacatgagagctgaattgagaagaaaaatgcttaccttatgcaagcaccctgtaataaactttgagattttctattgatttttttaatgcccagcgtttgttgtattctttttataacattttttcattccacggtcattttaagctttatttcattcacagtttctttacacctcttgcttttattgaaatttaatttgagaaatggataattaagaatccttctacattctatagagagtaactagccccatggttaatgggtacaaataaatagaatgaataagatctagtatttgattgcataacagagtgactgtagtcaataataatttaattgtacattttaaaataattgaatataattggattgtttataacacaaagaataaatgcttcagatgatggataacccatttaccctgatgtgatttattacacattgtatccctgtatcaaaatatcttctcatgtaccccacaaatatatagacctattatgtacctataaaaattaaaaattaaaaaaaggtttttttttttttttaaaaaaagagtaactatccccacaacagtacatcacaatcacacacacacaccctgaatcctggcagcattgcagtacacaggaatacgttacttgaattgaaactgcaaaagtagtttaatgcaaacacacacccccacataaatacacttttatttattaaaagacaaggaaactaaaaaactgaagtatgaaggccaattggaataataatgtgtgttttacaattttttctcaaatttcctctttaacattaactcgagagtagattccattcccaaggtgattcagccattcaatatttcaaaactttcgttattccctcgagctcagtgccccctctactgcttctcctacaaacagtgatttcccagtaatgccagcagaagcaacagtgaagctaatgcagtcactctgctagggaagagaagttttcaagagaggcaaaggcacagtttccctttttctttcctaccagttaatgccctcagtgggtggtcatgcctgctctgttcttgaacaaaggacttccttctcaggagcagcaggaataaaaccgacaagtatcacatctgtttcatgctgcttctccagttcccatgggatagcaccacgtctatagcagcagttctgatggtgccacagggaaacaaggcagtaggacatcataaatgaacagatcctgcttgaatgaaagagaaggggaaaagaaaatactaaataacaatataatgaacagtggagaagtaaaagggcaaagatacaactcctcagagaagacaaatgttttagagatagtctctatttggtgtaaggtctgagtgttgacatatgtacgtattttagaagtagtgtaggatagagtacatccattcctctccgttcatggccagagaactggtcctgcgtgaagaatgcacggtttaatttgaggaacatttccaacgggtcttaaattctggcctttgctgttactgtctacaaatgggaagaaaagtggtaggcaaatttaaaaaccaaagaggatttaataattataattaataattgaaaaaaagacaaactaagactcaaaacattgatgggaatttataaaattggattggatgatgtttgtagagctctgtaaatttattaaaaattgtatttatgaattcaaaatttaaaattataaatatataaatatgtaaataaaaatgattttaaaaattaactgataatagctctttacaatttttaaaatccctccgaatatagaatagcataggaaaatgctcatgttagtgatacaaggaagatagcaaagcagaactatgcagtacaatcttgattttgatgatatttgtatattaaaaaaaaaaggaaagaaacaaaccaaattttccctgggtaatggattatggatagttttagtttttctcttttcccagtgttttttagatttctgtagttttgttttttctaaatgtttgcactgaaagtgtaatattttatgatgaaaacatacaaaaattttaatgggaagactttttgtcagtacctgccagaattgtttatatggataaacaatttcagtttttcatttctctgaatggatcctgtagaattctatagaatagttatgtaagggattatttaagtattacatggatattaaaaacaacctaaatgcccatcaaaagggaattcatgctgtgtcataatactattcagttgttataaaagaatgaaccttcacaagtatatattatgttggtgaaaaagtaattgctgtttttgccattaaaaataatagcaaaactgcaattacttttgcaccaacctatataagacatattgtgcatatatgtatataaacaatactgtgtatatccagatagatagatagacagatagatagatagatagatagatagatagatagatagatagatagatacacaccctaacttgaaaaaaatacctatgttctattgtggagtagataaagcaatttgtcaaacttaatataaagatagattgcattttcacaaaatgtatgtgagagtaagattgtctaggcaaccttaggctgtataagaaacataaacatctattcttttaagtgaactaagttttaattttgagccactattccaaccagtggtagaaactcattaagtagacacagtcaaatcagagtttcttattaacttatcccatcctaggaatgagattatgaaagtgtcacgggatggtgagtgccatatgctgaattgtgtcctctcaaatttatatgttgaagtcctacccacaattattttttaggacttctatcctccacaactgtgagaaatagttctgttgttccagccgctgttgcctcatgtgtccacactcatcacaagaccctttctgaactctgttcttctcttagtcatttccgtgccatttttcactcaagaaaatgtatggctgccctaccgtgacaccctgggcatagtgggggttggggttggagcaggctgccactttgaggctgtctcagtttcatctgactgaacaccctgcacagccacctttactcctatcctatgctactttaccctcctggaaaaggggcaagatcttgccataccctgattcatcttttgtttctgttattatatccaactttgtggggggtgcaacatggagcgcaacttctcaacacaacaacaccgtgcctaattctcttctgctccagtcatgcaatcacagtcaggtactgtgggggtcaaggggccaggtgctggaaaagtgaactctgagtactcagaaattctttgccagcctcattgtttctagcataagtccaaacttttgaaatttaaagatcaatactttatttattctttacttctgctttaacaactttttttttcctaaggcaccatgtactcacagaatatggagaaaggtacaggagaagatacagtggtggtgatggtaggaaaccttgatgaatatttcaaaatgttactctggtacactgggttatcttgaaagttaggcttagagctgggcatggtggctcacacccgtaatcccaacacttagggaggttgaggcgggtggatcacctgaggtcaggagttcaagaccagcctggccaacatgtcgtgcatatgtagagacaaaatgccgtctctacaaaaatacaaaaattagccaggtatgatggtgtatgcctgtaatcccagctacttgggatgctgaggaggcaggagaatcgctagaaacctggaaggtggaggttgcagtgagctgagatcatgccacggcactccagcctgggtgacagagcaagactccatctcaaaaaaaaagaatttaggcttagagaggggaaggggaaactttcacttttacttgatataattcacttgatataattcactttcacttttacttgatataattctatattattaaataattatccctttaaataaaaagttaatcatttttataagcttcatatcaattgatccttataacaatactatgatgtagcaggggcagttactattaacttgtattttaacagatgaataaatgaagtcattcctacacattaaaagtatcttttgatctggaacaagtaagataaaatgagaggcaaacatataatgagtgctttcagtgagtaaggaatacactaggaaaaaagctgttacaaatatcctaataatgcctaacatttctctaaacccttattgattagaaaccattttcaaagttatagtttttattgattattcttttgaaatagtttgtgtccattcttttcttcctaaaggtatctcttccatgcaggtcttcatggttcatgtttcaactaccaccagatccttcgctcctgccaatcattcctgccccagtatgttcttcacctcacttgattttactaaaacattgcttggatcacgtcatcataaagaccttaggttggaaagagcctcaaatgcagcctctcgcctggctcaggaatcttttcaagaggatccctggcataagattttcctgcctttttgaaccattggatagggattcactgctttctgaggcagcttgttctatttttagcttaaagtatcagaaagttccttcttttggctctactgaatgcttctctttaacttccacacaaaatgaatccaatctttcttttatgtgaaaacctttctttaaaaaaaaaaaaaagaaattgtataaaaaatagagacgaggtctcactatgttgcccacgctggtcttgaactcctgggctcaaacagtcctcccgccttggcctcccaaagtgctgggattacaggctgtcaccaccatgcctgggcagtgacaacctttcaacaaatatgagactataagtcttttcacctcaattattctcttcaccacaccgaacattcccaattcctttcttggtgttttcgtttgtttttttgtttttgtttttgttttgttttttttttttttggtccaatatccctgagaccaccacagttcttgacacacggtaaatattgaaggcatatttgtttcctgagttaatgaatggctaaagtgccctattgttacagcattgctttggttccagttttataatctgtaaagaaaggcatcaatacgtgtcctccatctggtagttgatctgcagtaactcctgcaatgatctaacatctgtttctctcttcttttagcttcacagaaatgtcaaatatttctatggcagtgtaatttttaaatatacaagtttattccccctcttagcttttatgtctgttgtttctgaacagctcattacaacatgacagtataaatatcttaaatgaatatgtgccgtcttacttatctcctgttgttgaaacagttcccatttggtttttacccagtgtgtgaaaagttctgtttttcattagtatccatacattatttggccatcaccagaatgaggcaatacagctttattaatatgttcagtcatatagttagtaaagacactatgttgcacagtttataaagtacacgtcttaatggaacagggttgaattatcagagctattcctggtgaatcatagtcttggttaccacccatttttgcttatttatcctgcctcctagacttagtttaacactcaagataatagaaccgaagaactgagaaggtaataaatcagttcattcttctctgataataggtgtgttggctataaagattgaagatacaattaaattatatgtgaattttagtcatatctacacccatttactacaaataagcaagaattttttattgtcaagtttcttataattatggttcagaagcagctatctcaagtcctcccgaaggatatagtgtagtgttgccactatgttgattattcaaccatagaatttttaaaagtataaagccaagtacctccaggaatgaccttaattattgaaattagcatccctcataccaatgatcatttaccagtatgttttcaaactttctatcttaaatcacagtactataaatttttatagtacccttttaagtatccagatttctctttattaagtgaaatacacagaaaacacatttcttgcttgctatatgtagcaggattagacatctacagcattatgctttcaagaaaatttttcttgacattgtttaagaaggagagagaacagtgagatttccacatctgttaaataatcattagcatgtaggattgaattctgtcttctttttcaacctaagaccagctgttgaagtaaactagaagggccccttaattattgcatatttcaatagcttgctgaggattcagttacctagatccaccactctgatcaaaggggactgatttactttgtcaccattgttattgaaagcattccttatttgattgttttgcttctaaaatgttctataaaaggtcagacagggtgtctttctctgattccatcaggcctctgggaagaacctctgctaccaattatgtgctacttggacgggtgctaagacattgcacggcttctttcccttggccttcatacaggtttgcttttgtcaccaatattgctgagtcaaaggtgtcttaatgtccatatggcatttggcatcagtgaaaagcaaattcagaaaaatgaacttatttcctcttgtttgtgacgcgatttggtaccattgccgaggagacatttgccatgagttgtacatctgtatcaaaggctttaatttattttaagggtctccttattaccattggcttcatgattgtttttgtaaacatggaataaagtcttaacctggcataacccacagcctagggactaaacaaaactaaactaatgcctgcaactttggccctccacaggaaacaccgtaagaatgattgaatatgaaaatcaaattttgactgcttccaaatagatcacaatactgaattatgccagtgttgtgtttattgtttctctcttccagcctttcacgcactgtgtcaacttggccaacagcagctatccatgagctcttgtatgtggcaggatgggtgttctgtctttatattgaggccaccaatggaatgtcattatgcatttacaaagatgcacacctgtttggaatatgccctcatgcctccacaattaacaagtttttaatctaaagctgttttcacaagtagtagatgtcagaatttctttgaaatctcttcatagcagacgcacaggtgtgtttgccaggccactgttcttttctatagtatttcactattttcaagatgaaatttattggtatgtatagtgacatatatacaaatttattggtatataaaggaggccatattctttactataatgaagctttttctcctaaagataattaaagtaatgaagcatgtgttaactacatactgcaaaggatatgtgaaatgggaaatggaaaaaaagaaaaacttctaaatagagaggtaaataaaagagacataatctatgccctggaaatcaaaacgtaggtcgtagagcgcaaaagggagtttgctttttaagatttgtttaccttttttgtgatgggataacatagaagatttttagtccattgtctctattgtcaaagtatgttcagaattcaacaatttcctgtcctctttattgccagcacactagccttagtcaccattgtctctcacctggatttctgcagaggcttcctgtcgggtctttctgctgtcacccttgacaccttccctcccgtcccatgcccaccacgtctgttctcaacataggccagagcaaatctttaaaagtgtttcagtgtgtcactgggtcctcagaactttgcagtagctccccatctctcagagtgaaaggtagtctttaaaatggccttccagattctacatgacctggctcctgttacctctgaacctcctctcctacttcctcctgtttctggaatatatctggcatggtcttaactaggcctttgtactgtcccttatcaggaatactcttcgggcagacttcttcctgcttaactctctcatctcttccattcagtctttgctcaatgttcctgcttaaaattgcagctcatccctgctacacacaatcaggagacttcccaccctactctattttttttttatataaaacagttactgtgtatcaagttaccatataatttactttgtaattatattattaattgtctccccccaatagaatgtaatccaaaaaaaaaaaaaaaaacagaaataggctctgttttgttcatagaggtaactcatgcctagaacagtgcctggcacatgcatagtaagtgcttcaaaagtatttcttcatagaatgaattgaatcaaaactggtaaagttggaaagttggtgttaaggggaagatatgagttcagtattgtccttttgaattttagaagtaagcgatagagctttggaaagagaataataggactatagatgaagttatgggaatcatgtgcacctaattcatcagcaaatcctgccagttctacctccaacctaccttcaagctgtactgcgtttcacctttaccacagtcatgtaagccagtattgtctatcacctggcttattacagcattctgcaactagtcaccttggatctgcactgaaccctcaacacattttgagctcaacacagtgagttggaaggcaaggatccagggaagatgaacaccaaaacctgcagaagagagggaataattagtaaagaggtatctgaaagaaggttggagaaacagaatgagaaggggcaaggctgccttttcttttgaattaacgggaagtggctttagaaggtcaagaaggtatgagtaagtttaccccgttagaatggctaaaatcacagagactaacaacctaaaatatcaggcaggatgtagagtaattggagctttcatactttgctgataaggatttggtatggtacaaactctttggataattgtttggcagttgtctataaagttaaacacttacttgtgagccagtaattgtactcttcaatatttatcaaaatatgtaaaaacacaggtgaaaaactgtttatagcacccttattcagaattacctaaaacaggaaacaactctgatgtccatcagtaggagaagggattgtgatatattcattcaatggaataatattaaacaataaaaaagaacaaagcacggctatacatagaaaaatgaatgcacctcaaaaacactaggttaagcaaaagtggccaggcacaaacgagtacatactgtatgattccagttacttgaatacataaaatccaagaacacacagaaaacatttatatggtgacagatgtcagagagtggttgcctggagtagtggggaggaggaagggaattgtctggaaatgggtagaagagaactttctgggtgaagacagtgtgtgctatcttgttttggatggccgttagccaggcacacacagttgtcaaatttgtcaaactgaactcttgagatcggtgtactgtactgtatgttaattacacctcagttaaaacatgtaatcaaaatctatgggcctatgttgggaaattctgagataaacaagaaggaaaatgtgataccttaaatgcagtggctcaagtcttcttagaaaagtagggtacaggccaggcgcagtggctcacgcctgtaatcccagcactttgggaagccgaggcaggcagatcacttgaggtgaggagttcgacaccagcctggccaacgtggtaaaccctgtctctactaaaaatacaaaaataagccgggcgtggtgacatgtgcctgtaatcccagctactcgggaggctgaggcaggagaatggcttgaacctgggaggcggaggttgcagcaagccaatattgcgccactgcactccagcctgggcaacagagcaagactgtgtctcaaaaaaagaaaaaaaaaaaaagaaagaaaggaaagtagggtaccaaattatgtcttgagcttgatacatgagtgattagactggaagagtagaaaaagctgagaccagctactttacgaaatgtgacaggacgtcaacaagagaaaactaaagtattaatgggcagaagtgaagacccaggcaaggcagccagtgatgactatgccacagtggaaccaggcaacatgattttgtggtttacgggtgagtaaatttgataactgctagttaggaagccagacaattggagtctagggcattcatgtctttctggaagcctcggaaaaggtgaggtttgaactgtgccttgaagaataaggtgaattttactaggtagagaatgtgcaggtaggatatattagggtaaataaaatgtatcactaaaattaactccacctgcttcttttgattttagtttggctactagaaaattttaaattatgtatatggctcaagaacatatttcttttggacagttctagccttgaggcatagagataagctattgccgtaatcgaggcaaaagatgatgaatgcctggactcagacaatggcagcagggatcgaggaacagtaaaattcaagagatatttctaaggactgaattgactgatggaggttagtgattacatttgatggggaaagggtgatggagcaggacaaatcaaagattgctccaagttttctaacttggataatattgattgggaggggaagccatatatcacattagagaaaatacaggaaaaaaacgaagtagatttgcaaggggaataggaagaaagaataccacatattgactcccaggcacaagtcacatattaaatcatgttcatgcctgcaaagatgtaagaaattatgacccagagagaatatttagctctgtggaaaatcagtcagctagaaagtggaagaactaggattcaaacccacaccagtggcggtagtaaatgcctttaaaacttggaaagggccggccgggcgtggtggctcacgcctgtaatcccaacactttgggaggccaaggcaggcggatcacgaggtcaggagatcaagaccatcctggctcatctctactaaaaatacaaaaaattagccaggcgtcatggcaggcgcctgtagtccagctacttgggaggctgaggcaggagaacgttaacctgggaggcggagcttgcagtgagtggagatcgcaccactgcaatccagcctgggtgacagtgcgagactctgtgtcaaaaaaaaaaacaaaacaaacaaacttagaaagagccaatgagcaaactatggtttgggttctgtaggtcgatgcgtgtgtttatcctgggtcacactgtgagaaggctgtgtgctgtaattagagtttgctctaagaactgacagactaacctggcacacagtaatcagaaatggcaagattcatattcgggggatgatttttaactaaatgctagattacagaatctgtgtcattaaaatcaaacagctgcaaacaaatatgggtaaagtgcagtcctatggcaaacacaacaaataactattgtgcttactgtcttagacgtgtaaaggcccaggctatgaagatgaggctgtattatcatgaggacatgccctgttcatgttgtaaaactttttttaaaactataccttaggccaggcacgatggctcccgcctgtaatcccagcactttgggaggccaaggcagacagatcacttgagcccaggagtttgagaccagcctgggcaacatggcaaaaccctgtcttttcaaaaaaaacaaaaattagctgggcatggtgacatgtgcctgtagtcccagctcctcaggaggctgaggtgggaggatggcttgagcccaggaagcagaggtttcagtgagccaagatggcaccactctattcccacctgggtgagaaagcaagaccctgccccacacatgcacaccctgcccccacaacacacacgcacaaattataccttgttttctttgtattttcttcccttttaaaatgtgaaagatataaaatatttcagttaacttagaattctagttaattggattagattttcctgataatacattttggtattatgatctatgtttcagaaaatgtaaatttccacagaaaaataattatataagaaaccattggtatgagcactttaagaatgtagatttttccaagtgtatataattaacatagaagactgaaagtttcaaacaacgtgacataattataaattgttgtgaaacaaaaaccaaagaccactgtggcacacagcaattaggaatgataaaactgtttattgttgttgttgttgttttgagacagagtctcgctctgtcacccaggctggagtgcagtggcgcgatcctggctcactgcaacctctgcctcctgggttcaagcaattctcctgcctcagcctcccgagtagctgggactacaggcgcctgccaccacgcccggctcatttttgtatttttagtaaaaacggggtttcaccgtgttggccaggctggtctggaactcctgacctcaggtgatctgcccacctctgcctcccaaagtgctgggattacaggcgtgagccactgcgcccggccaatattactgtttttaaaacagagactttgtactgattcttgagtagcagaattgcacacaacagcatattctttttaaacagccacaaatcagagattagtcttaaaatgagaacatttttgtaaagacagttacttatctatcatattggtcttttcatccacacttaagtagccatcagtctggaggaacatacttaaatgccagccacagcagtataatattttagtttactgagtcacttacttcagtaccgtcatggtaaactcaggcacaagtctacatttaattaatagtacattaagaaatgcagtagccttgaagaattccacagcggagttgatcttaatgccatagtcagtgttgagaaacctactcattcacagatgggtgtacctctttccagtgactcttcccaaattctagcaaactgatatatcagtcacttctatttagagctaagtagaaaaaaacaaaattgaaggcaatcaggttaaagaaacttcctgtagtggttttaaaagagagtagaaatagttgctcacagatttgataaaaaggcttgaattcacgtaccaactcatattcattgtgatacctgcctgattcagggatttcagtaatttttaggatcttgtgggggtcagaagtgccataaagattaatgatacctgttaaggtcacagactcaggctggcagtggcagttggggagtaggagaggaaataaagagagcttcatatagttcatctaggttctagggcttggctttgctgctttagcttagatcaaatagtaatttttaaaactcttgtttattgatcatctaccatcaatacggattgtgccagatattatttcaatgatttgcattctccttaaacctccagaggtagtattcatagctgttaatccacattttctacattagaaaagtgagactcggggatttaaaattgagtcagccagactccagaggcgtcacttaggttttgtatctcagcattgtcaggatttgagtaggacttaccgaataataacgctttctggaatagagccaaagtttgtgtgtatatacgcttatgaaccaaatatatatttttatattgacaacataaatgtatcaaatcaattaaaaatattaatttggaataaatctccatagggtgtttttataagttttcaagtatattcctcagaacaaacattaaagtaagctttttgacacaggaatcaaatccctcacatcatatttttcagagagcatcacactattatagtgatgaaattttgtgtgacaccatcagaaacaactgttcataaaagaagcaggggtattattacaaggaaatgttgaaaattcagtatatttgtattttagcctagtttcccagattgaacgaatgccacaaatatttattactttagagcaacatgtcggttaaaatttctgaacagtttctgaaggatttgaaggtgggtactagagagacagagaaaagggaatactgaagctttatatcagaattgaattgtgcgatttcatattaaaaagaaaggagaactatagttctcttccagttattcccaaatgttatgttttatttattaataaggaaaaatattgagattcatatttcacacatcactgaaatgactgtgcttaagcagaaatttttttcacacttgtcattatttactactttttagagcagaaaatgtatattttgttgttcaggaataaaaataggttacaataaaatatgaaaaactaaaattaattcttcttaaaggcatttagctaaaagtattttgtatttcatttcaaacacaggaaagtactttaattcaaaaaagacttagtttttaaatatactgccttctccattcatgactcaaaatgctttctcataatttatcccaactctcataattttttattacaacaaacttggaaatttcgtttggttatgttatttgtattctttcatatgcctcttttcaatcttttaaaatgacttgtcatgtcaaattgaataccgtagcgtgtggatttctactcttatcagaactgcaatttaccatggctttattatttattatttatttattcactaatttattctcctctttattccagaaaggatactcataggaagggcttacttatggattgctgtcatttggtatgcattacttcatgcatttatttattgccatctctactaaattgtatttatgaaacttttcctttattagtttcttgctttagaaatgaagcaaatgaattctcctgagccactatatacttatttaaaatgtaagagcatttcattgagccatttataggttttatgtattatgtattttaactaaaacacattaaaatgtattattttggcctttctgacagtcatttcaagtgacagagctttcattttaaatggcaaatcaccttctaatacacctaaaactggttatatttttgatcctttttctcttctcctaccctactattgtctcaaactctccctccctgcaagatttggtagtaagaacgtaagcttctcaatgagctatttcaaaaaaatttttttacaatgcaattgcggatggtttgttctgcttgcagaatggtattttattctactcccagacatatagccatatgtttcctgtcacctcggtgacacagataagccttacatctggctgtctttacctaggttatctccccaacttttgctaaacttgaagctaatatcaactttataaatttttggctttataaccgatttttgccttctaaacaaaggattaagaaaagccccttattactgaggaagcactgaagattttgttgagaactggttggcataaacatgtggtaaaatcgtacagaagaaatacacacacacacaccaggaatacaagtaaaactggagaaatctgaatagaatcaatggattttatcaatgtgattatcctggtattttacaagatgttaccattgggagaaactaggtaaaagtatacacaatctctttggattacttcttgaaacttcatgcgagtttacaattgtctcaatgagatttttcattgagaaaagaaaaacgggttggtaaactttttcttaaagggccagatagtaaatattttaggcttttcaagagccatgaggtggaaacttctcaaatcctttgttttatagcacaaaagcagtcagtacatgaacgagtggcggctgtgttcccatgaaactgtgttacggaagtagatggcagcagacgatagtttgcagacttctggtttaaaaagagacacaggcttttaatattccatctgctgctcccttgaaggaaaaaatgtggtaacaaaagctaattatatatttatggtgttgtgatttgcagcttattttctgtcctcatgattttcttaacttgtatatttatacataaagaataacatttttgtttattttaaatattctaaaaagcaccactttggtatcatgcttctctatttggggaaatcaaaacatttaaagttacgtgtcttagaaaagtaagaaattctttttagatataatactgtattaaaggaacaaataacactgaatttctgtccttaaggttttcatccctaaacatgaataataataagtcagagagtaaagttctaggttgaaatagcaatttctgcacatttcctcatttttattcatccggttacagagttgaacatcctctggaagaatttaggttgtattcagttattctcattttcagggtgggattaagcatgaccttatgcagaattccactttaaacaagaatgccctcaagcttactttagacaatgttaagaaaatccactcgatgagattttgatatttattcggtagatttttttaactttttctttctcttcatcctgtcacatcatgagcagtttgaagacatcaggttcagttccctagcaaaaccaagtttcttcctcctagtatgtttctttttccttctgctttgagtggcttctgtggaaaaacatcttatatgtgggataaaaacgaaaacaatttgtgtgagagacacacatgcggtaggtctgtactcaatgctgtggactgttaaaaacaaagaaaggttttgctatttaaaaggagaggtaatgcaaatactgcaatgcactcataagaaaaaaataaattttccagtaactataatttaacagcaatataagccagtcctgtgtagagttctaaaatgatgagagtggttagagccaaatagggttcatatgatgagatcttgtgatgtgaagtaattttaaaagatgaaagatacttcttaaatactttggaaattatatggttgaccctcttttttacccaatgcttcatttagtgtgttgctaaagctaatcaatttattctgcctcttaattatctcttgaatctggccctgcatgtttatctgcattgccagggctttcgtttatacactcaatacaatactataaatctctactaactctcatcacccagcacctaccaaaggcaacacacacccacatacacacagcctccacactgctgttagggtagtcgtcataaaatgtgtctctgaccttatcatgtatttgcttaaaaccattccacagctctctttggctaataggataatatgcaaatgccgaagcggaacaaggcaaggcccatgaaaatctttattccacctgtcttccaggcttcctttcctgcctcttgcgagttctcctaccctgtcccagccccacccacaccctctgtgttctagccagtctgaaccacggcagcttcgtgctccctctcactgtcatgccttagcctctttcggtcgtcctgaaggcttctctgtttggaatatgcattcttcacagcaactaaagcattagcttatcggaaaaaccttctgagaagctttcggaacccagcatatttcatctcttagattatttaccagataatacttcatctctctgtatatctgtatgctcaaaagcgaggaggcaataaatatagtgtagtagggaggaaagctttaaaaaagcaggaaagtatctgtttgactcatactggaattcctaggactttgaaagtacctgaagtacagtaggtattctatgtaggtgtgttgtataaattaatgagggaaacagtgaatgaataaatgaaggcaagaattgtgtcttactccttggaatcagattggatatcagcccacgaggcatttctaaaggtattaagagtttaaatgaggactctgccatctgcagtattgctatattgaagaaatgaatgtctaaaggaaattcctaatcatcaagtaagaaaccgttacacaggagactgcagtggttatttcagaaatagcagtggagtcattcacagttaaatgcacgcgctctattaacaacctaggaatccagggaatctggaagaaaaataaatttggggaatctatttttattagcgtgaatatctatggttttcatgcacataggtaatagtacttatttatccagtattaactatctttatgattcctcaagtactcagaaacttaggagatggtacacataaatatcctaacatgtaaacatttctaaaccattatcacctctgaaatctaatttattgccttccctcctgaggaggattcccatttttatttttaagtttttgcttaaatgtcatattttcagtaaatgctattctgatgacccaatttaatttttttttttttgagttggagtcttgctgtgttgcccaggctggagtgcaatggcgcaatctccactcactgcaagctccacctcccaggttcaagcaattctcctgcatcagcctcccaagtagctgggattgcaggcacccaccaccacgcccagctaatttttgtatttttagtagagacggggtttcaccatattggccaggctggtctcaaacttctgacctcgtgatccgcgcacttaggcctcccaaagtgctgggattacaggcgtgagccaccaccccagccccaatttaaaattttgattccttctccagcagttctaatcgcctaccctgccttgtattctgtcaatatcaccttccctttcatttactaatttattatgtttcctgcatattgttctccccttcttcccctccacttgctacaatgtaagctctacaagggcagaggtttttatgtttgtttttagctgtgataggtgcttgataggtgctgtgataggtgcttgagtgaatatctgtggaatgaatgaatcaaccaatactacatgagtctctcagctcacattcttaagaaaatagtcatcacttcacagcctgattgctgtcacatggcccttaagaaaatagtcatcacttcacagcctgattgctgtcacatggcccttgtactctggaagagcactcaggttaatctccctctgacttcttttctcataataaatttcttcccaggaacctctgtgtggcctaccaaatcaggtacagattcttccacttggaggtgaaagtggttggttggccccactttatctatccagaactctctcttaagttgctttccaaaccagtgttgtttggaaatctccagtcttcctgctttgactttgctaactgtgcttctcttcaaggtttagctaaatgttagtctacactttaagccttcgaaaccaaccccggcacaaagcaaatgtttccttgttcaccttcttcatgtagtttattattttgcacctgcctgagatttgtgttctcgctgtctcaggaatggaagtcccatctcctcaattagggaataagcccctttaggccaatacacctgccttcttctgtatctccacggtacttaacattatggataaatacagttaggacttgtggcttcgcagcggtgaaccattgttggttctagacaaaaaacaaagttttgaaaatgccatgttggttttaaacagaatatattggagtagagaaagtcagtaggcagagagagcagcattctatttcctcagagcacatatctagtcagcagagagtgatttatttaataaatgagaggtagggaagggtctaggtaggataatgcaatgggaaaacagaggaaagaacataaccaaataacattttgaataagctaacaagaaaattgttgatttggatcaaagaatcaaagagcaagagtcaaaatgtcaccaaacttttgagtagaaaatggggatttcagtggaaaggtgaaatagttgagaaagaggaggagatcttggattgggcagagagtataaaacgaggatgatacatttagtttgggacagatggacagtgcacatagggaagagagaaatatgttttcctttaagattttttagtagaagagtaatgacattacattggctgtaatggatttttgaaattatttccacaaatttgaaaacttctctttttttccgccaatatggattaattttcagggatcatattttgcagtgaacctttaaaatctcatcagcttattttaaagcaaagttgttacaggactctggtataaggaaagttacattaattgaaacattcatactagtataattgtgctataattctcatttgaagtttaaatgaggtttagtgctggctacagagggagggacacactggaaactaatttatctgtgagaaggcagaggagcagagtatgacattttggtccttttgagaaaatttgcaggatgttgaggtccgttgctgctgctgctgctgtttctgttgttttaaatagtatataactaagggtgaggaccattagaggacagaaatcacatcttaatcagctttgatttttttatgtttaaaaaagagattgagattcactttgtagtctagggagtttaattaaagtaagtggagacaaaagtactcttttgagagctgtcatttctcttagtgtgacgctattaataatgtagtgtaatgctattttggaagtttggttctttccttttcttttgtcttcctctgactcttttctgtattctaaatgaaaggggaataatgcacttagaggggggcactctcctaaattcactgtctcatgtacgacattatctccgacttcggctctcatgttttgaaaaaatacctcttcatcgctctatttttatttttcttcttcttttattgtgaatctcttttaccaaaaacatttgtagggttcttcacaaagattttttttttcaatcaggatgaaaactagatcatgatgtgaccatttcactgtgagtgtaacttccctttttgacagctccattagatctgccaggttataaatcttcatatttctgacttgccttgaaatcagaaagtgttttcattatgctagtctctgtgagcaacaagcatgaaggaaggcatggcaggtatcatagcccctttgatgaacttacctgtttcaactcagtgccagggcagaacatttactgctaaccctgatgggtcaactttgattgcaaattatgtgtggtacattttgaatttaaagaatgtttctgagattattctacgatcacttgtcatttttatgtgtgcagtaatgtgttgtgtataacttggatttcaacaatatccattgtttgaaagttagaaaatattctaagaatactaattatcttgctcaaataatcatttaagtacaactgtcacttgattatggtgaatatttttaagtaaaattatatatttaaggtgtgctacctctaattttattgtcatacaaaaagcagattattgaacatgttaatgtaaattgtacttttaattttttccagtactctagaacatgtgtaaggttaaaagaatttaaattacccaggtttttctttttacataataaataagaagaaatcacaaaggaagcagatattatattgtttttaatataacatgaaattgtttgactttattttgatgacctcacaaaagtataaacatggcagtggtgtgtatgatcaaagtaagaaattaaagagttaccggttctttataaaccagaagtccattgacttttaataatgctgtctcaaatatttgatagtaaattgtggaaataatcaaagctgagcctatgggactgtactttgtagtactgtttaatttaataactctaataatcccttaagaatattaggaaaaataggccgggtgcagtgactcacgcctgtaatcccagcactttgggaggccgaggagggcggatcacctgaggtcaggagttcaagaccatcctggccaacatggtgaaaacccatccctacaaaaacacaataattaggcaggcatgatggtgagtgcctataatcccagctattcaggaggctgaggcgggagaatctcttgaacccaggaggcggaggttgcagtgagccaagattgcgccattacactccagcctgggcgacagagcgagactccctctcaaaaagaaaaataaaaaagaaaaaagaatattaggaaaaatatcttaatgcaaaatatattaattagtaatctgccaacactgagatgtactataaggccaagaagaaaaggaatgatatctagagtcttgtcattttttaagtcattgcttttagagatttttttaacctcacatatatttttgtttcttagcataagagggaggaaaatcaaaagctcaaatagagaatttaaaaatgagacaaaagaccgcccacatactaaaaagtgttaattataaaactggaaactaacattcaaattattttttcatctctgttcccctatttaatatgcagtgtagtttccctgtaacggaagaatgcttctgctatcacggctggactggggtctccacactggcctttgctggatagcactctgacctccagctcaaagtaaagcaagcattcttccatttaaaattgaatttctacggtactgccttaatacgaatacttcctcttcatttccttcttgacaacatgcctggaacaaaaatgacaaaaataattattcctgtataaattagtatggagagctttggggtcatactctgtgaccattgccagatttcttgatttctctgtacattttttcccacttgtgaaacaggaatacgtacctacagcttaaggtagctatgagattaaacaggatagtgcatgttaagcctattgcgtaatcagcttaataagctttcatgagtataaatttctgttgtgtattccaccggcctatgtgtgtagaatccatatagttacgttgaacctagatttttagtaagtcttttttgaagttactaagtaattaaattacttataaccaacaaaacaaaaaaaaacatataaaatagaggagaactatataagtcctttttttaaaaaagtagcaaacagtattttttagtgtcagggattaaaggaattgttttagactcgatatggacgtgttagaatgctttaaaaatcgattctagctaatggagagaatgtttttaaaatgaactattgccattccttcagtgaaccacatacaacaagaaaaaattcacataaacattgaaggaaaggcaagctcttccttacagaagtaatgagaatcgcagcgatttgccttggggaattagaatgtggagactcttttccctgtgcagtatcccctaatgtctaggagcagataagtagcctctaattttaaatgtgcagttatccaaacaagatgaatgtgcagggcaaagctggataagaatgtcgatcttaatgttaatatttttattctccttcgtaatcgacatatagttggcaaaagccaaatgtctgtgagatccctaaagaccacagctaactcaggagagctgtagccagctttatcttacatcagctgtggagatctggcccgagggagacacatcccagaataagccccttgccattgtcctttacaatgttttaaatcagttattttatcttgtctagatttatattttgtaaaatgcaaactgataaagcatgacagcattcaagacatagagttagcaactgaagcttaaacctctgtgtgtgtgtgtgtgtgtgtgtgtgtgtgtgtgtgtgtgtgtgtattttaggtaaaatattatatagagagatttagggaattcttttaaaaactggaaagaaagacattagaaatcataatctactcccctaatattacagatgaaaggaaccaagactagaagagtaaaatatgttagtgataaagccagtacctaaatatgttagtttgtgttcaaagtaaaaatatcaaatataagaatcgtcttcttttcatttatatctccctaatttttatataagtaagattctatttttaattctagatctttgatatatgaaaatgacttgtatttgaagtgtttaatttttgaagtttttaaaattaatgtcagaacactagattcctcttaaaagtaaattagtaattatattttaaaaataaaatatacattttggcaatacaaacccagttatcatttaattgttagcatgtgttttctacagatatattttccttactaggcagataatgtacatgcttgctaatgaaagctttgtgagctatgtgtctttggcacttattttgcataaattataatactgtgttttactaaaatatgggttaaagcaaatatattcaagacagtgtgcaaatgtgaatgcaacagattccaaatagatgattttttattgataaatagtaatataagttttactgcagttttaagaatcatcaagattttcaacagaagggcttatttgttttaaaccctaagccgcctttctgaaacctgaaaaagatttgtgaaaacagcctgcaataaaaatcacacacacttcataaaacagtacttgatagatatcacttgcaccattaagagctaaacgacaaaggatgtaatttcagttctggcatgcaatattaatcgaaagcctttaaaacatcttgctgatgggaactatgacaacatgacattgaagaattatgagctaaagacatctatcttaatcagatttttgaagtaaatgccataaaacataaagttgttttcttcatctttacatttttacatgtttttggtgggagcatgattttctagtgtgttgctttaaatgcagagactgcaaaatcagtatttaaaagtatgagttcagtacacagagttgaagcaaattttagtcaatacactctgcatacacagggaattatttctgtaataatgtacatttttccatcttttatgccagcgatttgtcttaagcaaatactttaaataaatgatattaatagatattttggaaacataattaggtgtttctttgcctttttttctttttttgagacggagtattattctgtcgcccaggctggagtgcagtggtgccatctcggctcactgcaacctccacttccctggttcaagtgactctcctgcctcagcctcccaagcacctgggattacaggcgcctgccaccatgcctggctaatttttttgtatttttagtagagacagggtttcttcatgctgttcaggccggtctcgatctcctgacctcaggcaatccacccacctcggcctcccaaagtgcagggattacaggcgtgagccaccgtgcccagctgtatatttgcctttataaatttagaaatgaaaacagaatgcttgtaaagacctccccatagaaagaaattatcttatggatatactaacatgtaaacatctttttttcctaaaagaaatacggcaaaaacatttattactttgtttgaataattaagaaaagcctggaaattaactccttccactaaaataacacttcacagtttataaaaatactttaatatacattatctcctttaattctcacaacatttccttttaagattgattattaccccattttacaggtgaggaattggagtatttacaataggaaattgatgatatagttactaagtttgggacagggagcttaaactgtcccatttgggacaggaaaccagatgttatgggctaaatgtttgtgtcccccaaaattcaaatgttgacgctgtaatcccctatgtgactattggagctagggcctctaaggaagtaattaaggttaaacgaggtcatcagggtgtagccctgatcctgccgcattagcatccttataagaagagacaccagagggctttgctctcctgcattgctcccctgctgtctgcctcgcctcagcaagaaaacagccatctgcaagccaggaagagaactgtcaccagaaaccaaccgaccctgccagaccttgatctgtgacttctggtctctagaactgtgagaaaatcatgtctattatttaagccacccagtctatggcattttgttacggaagcttgagcagaccagtacgtcacatctctattctcttcatgatatatccagtgcttattcatctcttctatggacaattttaacaaactggcaccaaactatgtgtagactcatgaaatgaaagctcataagatccatgaaagactatcttagttactgcttctttttgaacctttatgttgagaggaaggttcctagtggcagtgagcatcttgaagaaagatgcaggcttccaatctcaatatatcatgtttactactattttaaaaggcacaaccggctgggcacagtggctcacgcctgtaatcccagtgctttgggaggccaaggtgggaggatcacttgagaccacaaatgtgggaccatgtggggcaatatagcaagacccccacctctacaaagcattttaacaaattagctgaggatggtgctgcatgcctgtagtacccgctactcaggatggtgaggtgggaggattccttgagcccaagagttcgaggttgcagtgagctatgatcacagtactgtactccagcctgggcaacacagcaagaccctctctcttagaggcacaaaaaagccttagaaaatacagattattaatttcccaaacaattataggaccttacatttatagtacttgccattcacggggcattgtcatatacgtgatcttacttcgatgttggccctcatgtctcccatattcagtattcttttcagtgtaccatcctgcctttcataggtgctcagtcaaagcagcataaaagcatatattgggaagaggcttttagtgttgtatacacacaaaaaacatacccccaaattgttaatgacagagaagggaattcagcaaatacacgtctatggtagcttcatctatgattctattttccttttaatcaagaatgatcattacatggtttccacttaacagatcactctcattgcacgtgccaagaatagaaaggatacgctgggttccattgaagttcattgcatctacatatttcatgttcatgataatacatatctctgcctagatgtcatactatgactggaaggacacttaaatgaatatttgatttgactttgatgtaaaacattaaaagacagtagggactcaataaactacaggtaagaaataacatatcaaataatatgctagaaaaaaataactgcaaaattaatatatttttgagaagcaagatcagtagcgtcattgggaactttatctgtgtgctcttcaattatttgtttttcctatagttgctgaaatatttaagaaagaagaatcagaaaaaaagctcaaagcagactgaatctttttgctaaaaataatttttaaaatgtattataattgtcttcataacttttataaaacagatcagttttcttttaaaatttttttttaagagacacagtctcactctgttgcccaggctgaagcacagtggcatgatcatggctcaccgtagcctcaacctcctaggctcaagtgatcctcccatctcagcctcccaagtattaatagttggaactacaggcacataccaccatggccccattaattttcacatttttttgtagatggccaggtgcagtggctgacacctgtaatcccagcactttgggaggctgaggcaggcggatcacctgaggtcaggagttcaagaccaacatggtgaaaccccatctctactaaaaatacaaaaattggctgggctaaaaatacaaaaatttttgtactaaaaatacaaaaatagttccagctactggggaggctgaggcaagagaattgcttgaacccgggagacagaggtcgcagtgagccaagatcgcaccactgcacttcagcctggcaacagagtgagacttcgcctcaaaaaaatgttctttgtagagatggattttgtcatgttgcccaggctggtcttgaaatcgtggtctcaagtgatctgcccacctcggcctgccaaagttctgggattactgatacgggccactacacctggcctggttttcttttaagcttgaaagatgcatcctagccttttacatagttatttttacaatttgtttaaaaattttttacattaaaatctgaaataaatttaagttggatataaagtgattttcattatatgtaccttaagatgttaatagttataatacaagataatatggatgagtttatttttaaaataaaggtattatttttaatgtctttaatataagatagtatggtagggtattttatgacttgagttaatacagtgaagttttcataatacttgaagtaaaattttttgtactatcaatcccttaaatgttttatatgtataacttaagatggtatgatatggtttttaattactttaaatttcaaatacccataacataagctaatatattttaagattttataatgtattacctaaaataaagggaattttaaaattgaaaaacttcagacttcattgcatgactccaatcctgctctcccctcagaagttaattgatttatatagttaggtttagttagagtaagtgctcagtcctgtgtctcctgtttccttttgtagtactcttctataccagacattttatttgtgatatgttatctgaaaagcatagcaaattctgcattgtttgaactatgtgatttgctttccttactctttataagccacactttataagtcacaataatgtagctttatttgccttccaccctgtccttatctatattacaaatgtgttttatttatatcatatcatatatactccatttaaagtcaataaaatttaatttcactaaaacgaaatgctcataataaggtaataaggggagagaaaagcgttgattgatttatgtcagttctttattgtcaagattgggacagcttcttccttttttgcttactctctcaggtaaaatattttaaaatgggtagaagaatatcctgaaacatacactgagacattttaaaggtatttttatccagttttttatgcatgtataaaagatatgtttatgtatgtttctgttagaaatgattatgcaaaactaagaatttcataggaaaaatgtgtctgaggcattatggttgacaagataaactactttaactatcaaaagatagccatgtacacttgttttcacccactgaaatagttcagagtgcttgacatttagattaactgcacactttggagcagcaaccattgaagccagaacaatatctttgaagagaagttactgccactcaagataagttgctttttaaatagaagataaccagaaattctgctatccagtaacaagaagagaatagcagagaccattcatactaaatgagaaagacatgaataaatatatattctgtttaatttcacaatcataagcatggtattaggagctttggagaaagctgttttaggagctctaaagaaagctctattcttgccttctagaactcctactggatgtatattgagcttttctatttttttttctttgaagtactcgtatatatgtaagcactctttatctttctggtactatctgaatgattttctcagatctgttttccagtttaatggtactctctataattgtgtctactataccatttaaacaatccaatgagattttaatttcaatgactacatttttcctatgtacagacattctacttttgtcaaaatcgcctcttattttttcatagtgtctaattcttaggtttttaatttttttttttttttttttggtccttaatcattctgaacatgcttacaattttatctgacagatacacttaccccaagtttggggaagacaaattgctgctttttgttttgtctgtagactgtagctgaaggtagattgtttcctcttaaattttgtagtttgtgaactcactgaaagcaaggttcggtcttagaaatcctttgtgacttggtttgagagtatattcttttaaaaacggtttgcggccgggcgcagtggctcacgcctgtaatcccagcactttgggaggccgaggtgggcagatcacttgaggtcaggaatttgagaccagcctggccaacatggtgaaaccccatctctactaaaaatacaaaaaattagctgggcttggtggtgtgcgcctgtaatcacagctacttgggaggctgaggcaggagaatcgcttgtacccgggaggcagaaggaggtttcagtgagccgagatcgcaccgctgcacgccagcctgggcaaccaagcaagactctgtctcaaacaaaaacaaaaacaaaaaacgtttgatttgcttctgccgggtgcctcaggcagaagcattgctgacccaagaccacttttaatattaatttcttggcttggggttccagaaccataatgatagtttaagtttcaatctaatattccaatcccagggaggcccaggctagtgggtaaaattttcctatcaggaaaaaacaagttgtttaagacaacataggagatttcttattgttccctttgcagtgagaaaatttttaaagtttcctctttgaatgagggcgtgacacttcaagggtccaggcgttatctaggagtctcagtaacagttgagacctacctagtcttctccttgttcattaaaaaggttacagagggctgggcatgttgattcacgcctgtaaccccagcacttttggaggctgaggtgggaggaacacttgagcccgggagttctagatcagcctgggcaacatagtgaaaacctgtgtctacaaacaatacaaaaattatccaggtttggtggcacatgcccagcaatagagcgagaccctgtctcaaaaaaaaaaaaaaaaaaaaaaagaaaaagaaaaaggtgggccaagtgcaatggctcacgcctataatcccaacactttggggggctgaggcaggtggatcacgagatgaagagatcaagaccatcctggccaacatggtgaaaccccatctctaaaaatacaaaacttagctgggcgtggtggtgcacacttgtattcccaactactcggggggcaggagaatcacttgaacctcagaggcggaggttgcagtcagctgagattgcaccactgcactccagcctggagacagagcgagactccgtctcaaaagaaaaaaaaaaacaaaaaaccagaaaaaagaaaaagattacagaaactggcagacctcctcaggaaagctatgccagcttacctgcactttacgttttttctcttccctctgcttttggcttattctttctttccaattcagtcaattaacccaaagtgtaagttccacaggcaggctgagattgttggctttttgttcatggatataacttcagtgcctagaacagagcctggcataaagtaaacactcaagagatgctaaatgaattcatccaaaaggtagtatatttaacccaacaattctaggtgttttatatagcaaggaagttggcagttaggtaatctaggttgccgcattgtctgaaatagaaagtacagtagaatctaaaaaaagagagagaaagagagagagaacgtgaagatttagattcagactttgattatttcttctaatcctcaaagcatgaccctaaagatactaaaccaaattctcactaacccagtaagtacagtgaatcacttcatctgtgttcatctgagtaataccttctaggcagtttaagtctttcttttgtatccttttatttatcaccagggcatttcatactcagtgtctttttataaatagttttacaatcaattgatgatgaaggtcttaagaacaatagtgtttacttatattgcatcataacaatgttcaaaacacattttgaaatttcatttgatttacaggcaactatctgacagatatttacggtggtgaaaatttttacacagtactgtattttaaccaagggcttacagaggtatttaaatggaaaactcactttgaaacactgggcttgtgtgagaattctagaaaaaataatgaactacaggaactggtttatgtgaaagtgattttctgagtaaaatgaggtctttcttttccaatttttattatgccattttaggtggttatattattaatagaatatttgaggggctggattggaaaacgaaaggaaaagaaaacccctgaatatctgtttttgttttccgatgagcttcacagactttgtgatatgagtataagcacctatttccttaactcaaattttctccatttataagaaaaattattgccacctaatttttttccttcagagggaaataatgactactaaatgtctgcaatgtgtgtgagattttctggacaaaagaggcattttaatggtaatttactgttttcagtgtcataaaaatgttgaatttataataccacctttcttttcttctttttttttttttttttacatctgcaacagatttatttttaaaggaatggattataataccacctttctaatagctcctgaaatgtaaccagatcagggaagtgttgttacctgaagttacctaactttagaaaatcaaggagaagcagtttctggaaagccacagagttagtcgataatgaaataagagattaagctacaccaaggattagattggtattttcaaaatcaaaaaccaactctcgttttgtccttgtacacttggaagatccacctgaggctctggccactgtagttaaaattcacatgatggagccgggcatggtggcccacacctgtaatcctagcgctttgggaggccaaggtgggtggatcacctgaggtgaggagttcaagaccaaccaggccagcatggtgaaaccccgtttctactaaaaatataaaaaattcactgggcgtgttggcgcacgcctgtaatctcaactacttgggaggctgaggcaggagaatcacttgacggaggttgcagtgagctgagattgtgccactgcactccagcctgggccacagagcaagactgtgtcaaaaaaaaaatcatatgatagtaaaatatacaaaaacaaaaagttttatacaatttgttttgatgacttgtttttaagaaagaggtcaattttgaagaagacttaagttttgtttgagacgagagaaagtaaagatatagccaggaagtgaggtgaaaacgaattttaggacacagaaatgaagactttaattccatcctttgcaaatcatccataaatatgtttggcttcttttaaatgttcgtcaagttcaacaattgaaaaggaactgacagaatttggtttagtatctttagggtcatcctttgagcattagaagaaataatcaaagactgaatctaaatcttcacattctctttttgtctttgagagtccagtgtactttctgttttaggcaatgtggcaacctagattacctgacaactcccttgctatataaaacaatatgtgtatcatattgcaagctcttaagagggctaaggccagagggttttcatttattccacttgctatcattattattcaggagtaaggaagccacatgctgatgaatgaatacccaggaggtgttttgtgtaacggtgcttctcagattctctcacagttttgtgaaattaaaactgtttctgtctctctgtctgtctgtctgtctccctccacctccacccagtttctgcctgtccctctctgtcctttcttcttccgtccctccatcttcctttctccatcccttcctgactccatttgtcttttgatgactgactttactcaaactactcgtattctgaagcagcacagctgtccgcccttagcttctatctcccttccagattagggtatttgttccctggggacgtgtgtagccaggccacatggagatccagggaaggaggggaaggagaacagggtgaaggaagtgggtgggacagagcagttggagtcgctgcagtgacacctttccaactgtgcacacctgctgaaagcgaatgccagcccactctcctcctttcctctcatctcacactcaccttttacttcctcccacatgaaccgagcacacacatacaaatgcagacatatactcacaccaagatattttcatctcacagcaggtattattttcttccccagttttcctgtctcaaagtccatttccactctgctccctgaagaccacagcccaaggctgtaaaccagggaggagctggagctgagttgcacatggcagcctgggagctgccagcagtagcttttagtcttaaaaaaaaaaaaaagaagccagcaaataagcccagatatgcattgttttgttttgtttcttcttggcatgatcctgtggccatactagctaggaaaaggtgactaggccgaacttcatgactatgagatcaaattccttcctgtgtgagaactggcaagaggttagtttgttttctgttcttatgacatttcctttttgcatatttttgatttttattttttttagaggcagggtcttgctgtgttgctcaatctggtctggactcacacaatcttcctgcctcaacctccccaagtgataggattacaggcgtgaaccactgagcctggccctatgacatttctgatcgtaatttttctacctgttaaagcaaacacttttttgtctctacaaaaaatttaaaaattagctgggcatggtggcacacatctgtcccaggtactcaggaagctgaggcaggaggaccagttgagcccagaagtctgaagctgtggtgagctctgatcacaccactgcacttcagcctgggcaacacagcaagacctgtctctaaataaatcaataaagtgaacacatttcctctccaggcgtatttgcttgtgtgttctcacttctggtgatggtgctattagttgctgacaaggcttttctgttactttgtttttcctcatgatgttctgccctttatttcttccctgttttttgttttggtgtgtgtgtgtgtgtgtgtgtgtgtgtgtgtgtgtgtgtgtgtgtgttttcccgagatggagtcttgctctgttacccagactggagtgcagtggcgtgatctcagctcactgcaacctccgcctcctgggttcatgcaattctcctgcctcagcctcccaagtagctaggattacaggcacgtgccaccgcgcccagctaatttttgtattcagtagaggtggggtttcaccatgttggccaggctggtctcgaactcctgacctcatgatctgcccacctcagcctcccaaagtgttgggattacaggtgtaagccagtgcacccagtctcttccctgttcttggcacttaacttttatgtcaggcactgtgtgtttttagctcctttaaacaagcactatcaaataagtgaggctcagagagattaagtaatttatgcaagaaaatatcccacggaaagtaaatatgccatattcattgtcatgtgtctcaatggcgcctctcaccatgctgattcataataacagagttgctatctagggaaagtcaccagcagtttttcttcttctccatgcagagttccatgaataggccttacatttgcttggaactgggggccggtaagctgcttacactgtaatctaccctgtatccaatagctcgtagcattttcctggtataatagtcaacatactttattcagtgtacaccatgatccaggttcttaacccatgccagcaggtctaacatgggaacagaatgccttaagtgacgctgttgaagagctaagggaggagcagggtgaccgcagtctttattatctaatctctatgattaatgtgagttttaaaaaacatctgatattaatttcattcaacatagtgaataaaaacatgcaactgttaggctttcattgaagttatatgagcagtgggaccttgataaaggaaaggcacgtggaaagaaagagtaaatttaataaagacgctgtttgggtatgatgcataatttctcataaccatggtaccgagaatttaattttcagaaagatagagaggaatattttgaaaaaataattgataccttttctaaaatatctaagagcattgctaatcataagctttaaaatattaataaaaggaaaacatactgtgtttggtaaaatataatttataataatttttaaatattattttatagctttcattttatatattatatattttatatgatctttatattattcacatatctttaaaggtagattttaaatatcagaacattttcaaagaaatattcctaaactccagtctttggggtgagtggcatggttccttgcttgaatgagatgaccccacaaggtgctattatataaatgtcatcaatcaatcagcacatttttgggagtccttgaagtacgtgcttagtgaaagtaccagaagatccaaaaaaatttgagttagaatccttgcctttcaggatctaagagttaagttggggaaatacaacatatttgcaaattaccttatagttaaaggcagtatggacaagctcaactttttactacttccacactctctcattgaattcttcacaaatagtcattcattcaacaagtatttattgagtgtctgcccttgtgaggtccatagagctcaaaggtgaatcgcatgtgaatcctgcccgtagggagctgagcaggggacatgagccctacaaccttaactctagcacagaggggaatgcgaatagagccatgaaaaagggacagatacaataaggtgactccgaagaaagatcaatgatttttacctggagaaaacagaggtggcatcaccttttttagatcttaaagtaatttggatttggagatagaaagatggaggaaaatgtctttccagagagaagcaactctgcctaagtagaaaggtgtaaggcatggagtggctacagcaagcgtggctagagcaaggaatatgcgaagaggacacacgagggagagcttgcaaaaatatattttggggtatctgtgaccaaatataacattcacctttagagttcatttcaagtttgataggcactagaaagccatttggagttttctaggagtaaatcgacatgttcagaggtatgttgcagtaacattaaacctggtgactatgtgaggtctgattgtcccatctgtaactcactcaaagtcattatatccagaacttttttatcaatctgtgtatcagtgaatttgtctaaagtgaaaggctgcagtggctgttctggttgttcttgtgcggatctgcccagctgtgttagatccttaaacacttttatagtctccaagtctagaccctgtcctttttccttgtgtccattttgaaccttggtcacaaagatttccctgggtattcaattgttctttatgcaaagacttaaaaagagccaggtacagatcctcacacctgcagtctcagtactttgggaggcctccgcgggaggatcgcttgagcccaggagttcaagactggcctgggcaacatagggaaaccccatctcgacaaaattatattttaaaaaaattagccgggcgtggtggcacatgcctgtagtttcagctacttgagaggctgaggcaggaggatcacttgagcatgggaggtagacgctgcagtgagctgtagtcataccactgcactccagcccagagaacagagcaagaccttgtctcagaggaagaaaaaaacaaacttaaaaagaaatgttatctctattttcagtaacagaaataaaatgaaaaatagtaatgtttttcataagcaacctttcgatcttaaaaatactctaaatcatgcaactgattatgtttccctctttgtgctggcaagtagattatttaaagccagatttgtgttcctctttaaaaatgtatagtactatacagtaggtattttgtccactaaccttaaatctggctttatcttatgtttcacacttttatttttcttgtattctatctttatttttggcagtgttgtactttatcttgttacactttatatactgattctatcttgagtaaattggtacggataaatacatgctccagccacttctcatgttttgtaagcccaaatctgtagagctagcattgaccctaactgaatccccggattttgctcctgtttgtggtctggtgcagaatttaaatttctgtccaggccaggcacagtggctcatgcctgtaatcccagcaccttcagaggccaaggctggaggctcacttgagctctggagttcgagaccagtctgggcaacatagtgagaccttgtctctacaaaaaatttaaaaattagccagtgaggtggctcatgcctgtgatcccagctactcaggaggctgaggtgggattgattttcttgagtccgggaggtcaaggctgcagtgagctgtgattgtgccactgcaccccagcctgggcaacagagcgagaccctgtctcaaaaaacaattaaaaaaattttttttaaatttccggccatccaccctatatcattcagactttgcatgtattctgttccaccaaattttagattgaacctagctttcatcagctggatttgttttattggtaggcctcctgattgtgttgtcaattcaagaggttccagtaaacagcacactgctgcactagcctgggcagaccattggcaagagcatggatcctcgtgtggtgtcttgtacgctgtaagttctcagcagacacttacaaaatgaagacgtgtacctaaggaaagcagcagctgcttatttttgaaaccttaatggaagttttcccaatggttacgtttttatttaggaataagaattctaaattcaacatattgaaacatgatgataatggatcttaaaatcatttctctttcagtaacagtgttcttgtccataatgctttattttaccatttacacagagctttcatccgtgactgacgtagcagattcctggaatatcaagtctagaaaatgtacttgggatgaatggctaagtgtgtgatgaataaatgaatgagtgggtgcatttcactgaatccttacaattgcactaagacctggatggggcaatagtatttctcacattacaggtgagaaaactgaggcttactatcatgatgtctgacagaatcaggacttaaatttgttactatgacttgtaatattctgctcttcacatagtataatatctaacataatttcttctctataatataatattctttcatggcatcatggagtcatctgacccataccactgcttctttttaggcaaagtcttgttactttttccttggaaacatttctccctgttctctctttgtttctattctgttgacaccaacctagtctaggccctcataactatagcttgtttagtcatgctatcagcaatttcttgaaatgtaccttaaagacatccatagagattctagtcacatacactgatgctctaataaattatatgaaacctgaataataaatctttcatgaattttaaactgttagtttctctttttctaacacaatgacaactgtatgtgccatttcctcaaaagcgtatttcagtctgagatttagacaatcataatttttcatgaacaccaaagcaataaaccaagaaggattcctgcagtttctggtatgggaaatttcaagaagacagagtttctatttttgaagttcccccatatcagaaactgcaaggaagtagcgatattttcatatatttaggtattatctctatccctcattacaagagtgagaaattattcattgttaaattatatgatatggaatattagggatcattagaaacatgtaatattactgatgttatatgctatgagaggagttatttttatcattgtaccctgtaaagaggtttgataatatatattaaaacaattacatattatgtattcatttcatgcaaactgaattacaatgttaaactgtgctatttggcttaacaatcactgctggagttcacatcgtagatggaagctagtacttgtgtttcctattctttgttaatatgtgcatttatattaatagcatgatttaatacatcactttaaaattatactgcattttgaactgcatttagtccaaaattgacatcttatgtgtgtggaaccatatcagtttagcattaaattaaagagtcatctatctgtttggtaaaatgtagtcttcgtaaattctagcacatccaaagctaggtaatgagatggaaagtaggtctcagatgttacattaatttgtgaattttaacttatgacgtattagctttacggaattttctagcagttacaacacagcattcaaaacacagtatttatgttttgaagttgtcagactctttatgattctggtttaaaacaaaaatatttgtatcactgacatagtggcatgagcctatctggtcacctatgacttacttcagaatgtagttacactgcttactgtgaaattggaaaatctgttctgtgtgtgttctaatggatgtgacggtcattaagtatatgagtcttctgacgttgtaatcagatgtgattcagtctgttaagtacccatgaaacaacatctgcttcacagagtgaccttctgctaaagaatacttagcatctattagtagatcatagtgcagatctgccttatttgaaatgcactaaacaagagtagtctactgctgtttagcaactagcttgtaataatttattgcagttaaataaagcttaaaaaaactccattaaataattatagggattatatgcattttgaaaacctttgtgttctactgaaattacccatttaatttcagggttggtttgttaaaaaaagctgaaatctgaaggcacattagaggagctgtcagatgctgttttctgtaggtgttaataaaaccagatgaaaaaaaaatctgaaacaaattaaaaccaaaagcaattttgccatctgttgtgtattaattagaactttgtgtatcaagggtaaacttgctcttagagaatgtcactgaacacccacttaatagaataatatgcaaatttattaggttatggatttatatgcagtttttaattctaattcatctgcagtggatccccaagaaattggtagtgtgtatatacatatatatatatataatgagttctctttctttttttttttttttttttttttcagagcaacctgcaagcaatcaaggccagtctaccctgcagcccttgccgccttcccataagcagcactctgcacagcatcatccatccatcacttctctcaacagaaactccctgaccaatagaaggaaccagagtccggccccgccggctgctttgcccgccgagctgcaaaccacacccgagtccgtccagctgcaggacagctgggtccttggcagtaatgtaccactggaaagcaggtaacatctaaaatttcaaaataagctagcccaacccttttctcaccaggagcaatttactatacttacatattctggtgtggtgttttggggttttgttgttgttgtgttttcttttttcttctctaagaagcagttccagattgttgtgatttttttagttgctgggtcagtgaatgtgcctattcttttcacacagtttgttgcctacaagagatgagaataaattacttcagtgaaactttcccttaccactgtttgtttttttcttatctacaaattatcaggcatgtggagaaaaggacagagatgtaaaatgttattctcagttgcatgtagtttgattcagtggacatgtctggcatcttcttggttctagacctctgtactttctcagactatattttgttcattacatcatatattcatagtggagccccactatgaatataacacttaagcacaaatcagatgacagtttgttaaggatattgtagtttcttgcagtatgagggagataggacctactctctaaagttccttgcaggattatttcctaagacaatccattcatcctgacacagttctattaggaagtttttccctacaatgaactgaaatctccatccctgaaacttccatcctctgactgtaaccgtacaactagtagtctgcaactatacaaaacaattttgccctgattcatacatgatggcccatgagcttctcagtcttctagaggcttcagcagtttaatggtccttctctgtacacatagcatagtgtttcattaaggttcaaagttaggacttctcgcaaaggctggctgacaagtggtaaactgctcatacaaaagtatgatcagcgaaagctgttttgagctaatccatttcattattcaggatctcctggcatataaaatttcgccttctttctttggacaggagcgtaacagtcactgtctccttgtaattatgtattgcacaaccaacagtggtgtcttaccttattggtcttctgttggcagctttgcggggaggttcccccaacattcctcttattctttatttcttctctgccccagggtttccgttaggcttggagaaaaagagttatcaccatagaaaagccagaaaatagagagctcttgacgccttgagagactgtcccccaaaatgtcctgccctagagcttccggttaacattaggatttaaattagcttctgggtgaacaaagtgtctcacaatgaatacattgctatttctcaccattaggtatatggtctcaacccattctgccttgaggatgagctagcaggaggtccccacagttagttgtcaacaatgaaagtctttctgtgttttcttttactcttgacctaagaacaaggttctaaagaactcttatctttttatccatatcagccacgagtagttgagttttattgtttattttgtattattgaacattcttctgggagaaattaggaagagaaagaacaggaaaaataggcaaacagcagatttctcttcacttaagacacagtcatgtatacggatttttttttcctgaggttattagcacagacgtaaatttacccagtgtaattaattagcacacactgaacagctaatcaacaccgattcactattgtcatttggaaaaaatttattaggaaaaaagtaattttccagttgagtcatcagattgaatatggatattacattgtagttgacaataattgttttgacaaatatttatgaaatatgtcaaattaaatcctcagaaacgtgtttaattttagtgatgttataaaacacaaaagcctcaaaaactgtcagtaggagagttagcattccgtgaaaccatgtcttccagtgaatttggaataattttgagaagagtaagatgcgttcttgttattcgtcttattgcactggaaattttgattgatgagactttaaagaaagaaagtagttggttagaagaaaatccactgtagccatatgtgaaattgtagctggtttctctatattcagaccatataagaaatcactcccatggtgagtagttactgagattttcttccatttcaaagtaatgccattaatgaatcatcaatggaattaatattatacagttttatgagtttcagggaggaaatcaaccgctgatatgatctcactaataaatatacagaataattaatctaaaaatttgttgttacactaacaaattttaatctgcagtatagttttgttgttttctcgttatccaaagttcacatcttacagtgtcgctaatcaaaagaaatgatatttcaacttgcagtactcagtgagtgaagctaagcagtgatgtgaaaatctcacactgtaccgacacagtactactgtggtttctttaatagtctcacttggttggaactctggaggtgaagaaccagtcttatttatcattgatttttccttcttttagttaaggttccctattgagtatgattctcagactcagtttcagctatattaacaactttatccagacttgtgtctgcctttaactattttttaatctagtgtattgtttcatctttggcaattatttatatatatatatatatatacacacacacaccgattttgctaattctcactttttctgaaactgccacttaaaggttataagctatgaagtttaaaattcagttacgaataaataagaatctctatatttttctcttagttcctcccccttttctcttttcagcacaaattgatagtaattggttacaaaatggcatgtaataacccttgaaaatctcagtgatttgtagacttacagtttatgtgaattgctggaaaaggcataaaaggattttctactttgtcctatatgtttcagtatagctatcattttgatttattcaaaagcattctttttcaccaggcagtttcttgcttccataaaaatgtttatttcctttctctaatgaatttaacatttgctcctgctggagacaatcaatgtgactgtgtactgtacattcccactcagtgaatagaatacttctggtctataatctccagtgactttcagatctcctagagtcacactgagatccaaaaatgcctttgcagttcataagcatctccttattatgtcatcatttcctattaacaatcggtccctatgtataataccaagtgcttgcttacaattttcctgaaaattccttttctttgagctcactatttgttatactttggattattcacttttagggcattggagagcctatagcttgccctttgtttattttatacttcagctgcttcagtatgtaataatagctgctacaagaatacagagcagctgagcaaacgcttagaattggcccagtacagcagcagcacttaaaggtatggtacagtaactctcattgagaagccttgtccttcagcaactgtaaagttaattgcctgcaagttcctcatttatatacgtgaattaaacagcttagtagttacctattagatgttaacaaaacggttcatttgtagccatttaataaaagatttattaaagtcttgttttattatgaagcctactttggcatggatagttcattagttatgttcccatagctttttaccttctagttcagtaatgctttgctaattattaatgtatgaaattgcatattaaattgcctctttattagtgcattttttatttcaatattgagatgtcttgagccgcattaatgtgagatcaattgttaacgtcgttaaaaaaacagaatacctaaacagagatattgtttactaaactaagatatgatacttttttctctttttatcttctttaaaatggttgtagggaaggtaaaaacagtcatacacacaccgggtctgagtcagccttgctgacgtgtgtctgcatcctatatggggtagctttcctgccccagaggaaacctttcccagctgaagaattaacctccacccacttactgataactaataaactaccattagtgaggtagtaagtagtggaatcctccgtaattaaagatacaacttcaagtaaaatatgcctgggaaggtagctcgatgactaaggttgactgactgatgctgatgccatatgcttttgttaaagacagcttggggagacacagggtacctgtggggaaaaggaatattactgaatatggaaaagaggtccaaaaatgaagaacctaaggttacttaacaaaaatttcaaaattggacctgggccaatggtaggaaattcttaaagtttcaccatcatcatttatttaaaaaaaaaaaaaaaagggaaagtcaacttaaattatatactaatgaatagtaaaaaatcacttggattctaagtctcttaaaatatggcaccttttataacttagtatttcttaagaggactaggaagggatattgtttatttgtgagaatgggaagaaacatgaagagggagatataaagttcaagaatttgctgtgtgctgttaatatttaaggcctatttcaagccctggctaaaaaaacctttgtctcagagagaggaggataattgaggaagctattgtaagcttaattcagtgcctaagctctgtggtgaccatatagttcattactaaagccaggacacttgcagagtgagaaggggccatatcaacagttaccctggaattgcagcataaactgatagctgtaccaggcaaagagggacgtgtgattaccacactaagttttatttccaagagtaaagttaattttaagtccaaattttcttatgccttagataaataagaataagaaatcaaacgagaaaggcaggttgaatgcaggtaaggctccagacttgaacatttctaatagtttctattgctaacttagagcaaatatttaaacttttattgacccccttcgcagaaaaagcttctattggcctccaaaatatgtagctcctaaaataatacttaaaatatttgtcttaattttcttctcagagtttcaagagaacacttatcacaatatcaagagaacaagaggtagcaggccgggcgtggtggctcacgcctgtaatcccagcactttgggaggccgaggcgggtggatcacctgaggtcaggagtttgagaccagcctggccaacatggtgaaaccccgtctctacgaaaaatacaaaaattagccaggcggggtggtgggcacctgtaatctcagctacttggcaggctgaggtgagagaatctcttgaacccgggaggcagtggttgcagtgagccaagatctcaccactgcactccagcctgggcgacagagggagactctgtctcaaaaaaaaaaaaaaaaaaaaaaaaaggtagcgtatataaaatatggtcctgaatttactcaaagaataaacatctctgtgtctccagcagcattacagtttgggtttccaaaaccattctctcaggctgaagtagaggcttcattctaggaaagtttgagataaagtttcaaagatggttattaagataagtgagagtaaaagccctattttttaatgtgagattattattaaccacttgtaatgctgtagcctcaacttgattgtttagtgggcgtcacgccaataattaaaatgtgaaagaaggttctagaccaatagcagctctcaaatgaaggtcattctcaggagtcagtattgatatatattctaattaaaacctggtggatatagtagggatacaaatcacagtttagcgtcatgagaaaagcatatgctttagagacctggtttgtaatcctgcatccaccattttcactaactatttaaatgtgaggtcacatatttaaatgtgaagtcagtttccaatgcaataataatacctactcaaaatgatttataagtgtgaaatgaaataaagtaagtggagcacgtggcacatgctaggtgttccgtaaatgtttttaaaataattaccaaatggtaatagcagccattgtgaagggcacctcattggttaatacctttcatcataaagtagctctcatctctccaaacaataagaaaagcatttgtcttaactgagatatttttgtctaatttatctttatgtgttaggtaggctaaacatgaaattaaaccatggttaattttactagattaaaatctcttagttttctcactcttcccgtcgcttaacaaaaagtaggtggatttttgtaggtaggaacgcccagactgttaattttgttcttgagaagaaaaaaaatcttcaaataataatgaaaggcaactattcatatccttgaaacatttaattaactaaagtaataaatgtttggaatgaatcaataaaagccttcatagatgcattgtcttcacatcactcagaagtgagaccccagttttatttaaggtattgaacgctttagagtcttttgtgcatgataaaagtactgtacaatagagtgggagtgttattttgtttaattggagtgaaccagtttctttttaatagcaattaagacaccaagaaagtatgcattaatcatttgctatagtccttaagtgatattgaaagcgtaatttcaataaattgcagatactgtatattctgataatgtttggctttggataaccgtaatctatataaaatgttcacacatgatcatcttaattttcatggtacctgtagaaatgaattgttaattacttctaacacattttgaatcacacttttttgaacgtgaacagtgtaaaaggtaatctgtgcctttactctggtcctagtcagtgattgcgattaagccattatcttcatctgaaaatgacctgtcattctcaagcacttctcttcctctcgagcaactgttttgtgaggctttttaaaaataccattcactagtattgtctgtaaaagtatgtctcagtcctctttacttgtgtatgtgtatgtatttgtacataagtatgcatacatattttatgtctacttgacatccttgctacctggtgattttattttttcctggaatcaaggtgtattcagtttttttaaagattgattgattgattgattgatatttttttgagacggggccttgctctgtcactcatgctagagtgcattggcacaatcacggctcccagcagtcttgacctcccatctctggttcaagcaatccttctgcctcagcctcctgagtagcatggactacaggtgtggcatggtgcccagataatttcttaatatttaattattagcatttatttatttgtctaccggctgcttggcgtttattttccacgaggtgcaaggtgaaaagttacaggtgtcaggagagctcacgtgcgctgggacagtgaggagggctgtctcctttttggtgttagctgtgttgatgtaaaagagcgccctgctcgtccgcttgctgcagccgcccggtctgcagggtccgcggcggcggggagggattctggcgtcctagcgcttctgcaggcccgggtttgggggtggccgctcaggtcagggctaggacccagcactggctttgctggacaggccatcggactgcctcctgggaggtccccaagccaggccacaggcggtcctgctgcaggggtcctaggaggccccgggtgctctgcggaccataaaaataccatggccatgaaaggagctcgcccgccagtgacctgggtcagccaggggctcaggggcggcttccctatggcactcggtgccgccgcaggagctgctgttggaagtggaacctactgtaggtagtagtcgtgggtggccccaagcaagaggctggagggactggagggtatggcccatgctcttgcttgcaggctggtgggacctcagtggcaactcttggggatgggactggggacgctaggccaggaaccatttgcggaggagcctgctgggaggctactccatgatggaaacgtgcacagattaattttttagttttttaaatttttgtagagactgggtctgctatgcagtctacccacctgggcctcccaaagtgctggtattacaggcgtgagccaccacacccagccttaattttaaaactgtgtttttctctggaatttcattctctggtttcatcaccaattaatatacaccctgtcaaagataattgcatatctttttctgcattcctttattttttcctggacaggcttttgcctactttcttctccactaatttcaaacctgaggtaaagtctgttttctattacaccagtctgagaactctttcttcttataccataagattaaattcttggacatgcaattaaccaactaaacttaatcaattctatttgataacccctctgattctgctgtaaccttctttgtgctttcgtagcatctcacttcatattctgaaccacttgaaatactgctaccagaaattgttccagttacatctcacagtaatataatattgctaccgtctggtcatggtgtgtggaaagaagcattggtttggggataggaggatctggattaaaatctcaacatcctactagctgtgtaaccttggtcagggtaattacacattcttatcttgtgtttccataaaatgggattgtaatacttcacaacgactttataagggttccttaagatgtcatgtgaagtacctaatgcttcagtttctttgctttttattcttttcttaggctatgtgtttaaaggaaaaataattcatttaataactacaaaggtaaattgacatctaccaaggaaataaagatgtgataaaatgcagtgacagctaccaagaacttacatgttaattaatttttgtgacaattaggtagctttttacctttgcagattttttgacagtaagaataatcactaaatcctcaacttaattgacttcctaacagagataaactatgaagtaaatatttaaaaagagaatttgttttagaaaaaacaaataactgtgataatatgtaacagtgataatatgggaaagaaattctctgagatagtggtgtcttagagataattcataaaatgaagcctgaatgcattcattcatttatgcaggaaatattggttagtcttacagtgtaccagtatgaaaaactcaagaaaggacctgcagatgttttgcctgcttttgagaaagatagattctattccagagcaaatttaaaatcataaagattatctaatctggccaagtgtggtggctcatgcctgtaatcccagcactttgggaggctgaggcaggtggatcacttaaggccaggagttcaaggtcaccctgggcagcatggtgagaccccacctctgacaaaaaaataaaaaccttaaccaggtttggtagcatgtgcctatagccctagctattcgggaagctgaagcaggaggatcacttgagctcaggagctccaggctgcaatgagctatgatcgcaccactgtcctccagcctgggcaacaaagtgagaccctctctctatttttttctcccaaagagctgggattataggtgtgtgccaccatgcccaactaaagttactttttttttttttttttgaggtagggtcttactctgtttctcaggctggaatgcagtggtatgatcacagctcactacaaccttgacctcctgggctcaagcaatcctcccgcctcagcctcccgagtagctgagaccataggagcatgtcaccatgcccagctaatttttttttttttttggagagacagggtgtctcattatgttgaacaggctggtctcaaactcctaggctcatgtgatgctctcacctcagcctcccaaattgttgtgattataggcatgagccatcacatctggccttatcttctttttaaggcccattgagatttagtaattggcctgaggtcacatgactagttagtggcaatactcagctagatgacaggtctccaaatataagttcattaccttttcttctagtaatgatctccaaaaaattttttattacatttgacaggaaaaaaacaaaacctcaacccccaaatatgtgtatttattaaattttaaattaggcacatgcagcaatttactaagcttgtgcctgttatcatacacagattaagaattgaaaggatgaactaaaacaattttacagaattttattttatttctacttattcatctaatgatgtatttaattattaaatatatatttataatagttaaatataagtgaactttatgtattaaatactaatcataccatatttttcaattctaacatttatataaacatttgtgttgaaatttggttaatttctctgatgtctactctgatcatctggcaagctaatcagtagctattacatttttacattttaagtaaataagaacaaaacccactaaaatatgagttagcagacctttaagcagtttagaaaataaaaaattgctatagatgacatacatttattttgcagcaaagtcatatattgatgggactatttccaaatgtaaattttcaaaatattctctcagaactaataatttctttagagaagctatactgtctttatcattcttgaacacttcctctacttggagggacagattattaattttttcaaaaatatattcttgataagatacctttgacagccacttgtcaccattgaacaggtcagcaaaattgaactcttctcctttttgtatatttaattcatctttaaggttaaactctttgggtattttgctgtgagataccttgttaacctttatgtggttaaaaaagattttcaggccaggtgtggtggctcatgcctgaattcccagcattttgggaggtcaaggtgggcagatcacctgaagtcaggagtttgagaccagcctggccaacacggtgaaaccccgtctctactaaaaatacaaaaaaaaattagccgggcgtggtggcggatgcctgtaatctgagctacaggggaggctgaggcaggggaatcacttgaacctgggaggcggaggttgcaatgagccaagattgcaccactgcgctccagcctacgcaacagagcgagactcggtctcaaaaaaaaaaaaaaaaaaattcaagactacaccacaactcatcgcgaaacattgtgcagaatattgtatttacttaaacacacacagagtttcagcagaaagtaaaaggtgacagcatcactgtcaactcctcttctccttttctcaggatcctcaggcattagagaaccttccaacagaaagactgagtataggttccacgatcacccatgcgtaaaatattataaaagcttaatatctttctgatttttagacaggagaaaaatacaagtttgatatgtaattaaatagagtttgaataccttcttatctcactggtttgttttgcatatgagttaaaatgcgtacctgatatagagactgcgtaaatttggaggccagaaagacctggctttgcctgctccttctaacctttgacaagttcagtaagtctcagtttcctcttctttaaaagcagattttataatacacacagacacacacacacacacacacacagtgggaattttgtaaagttaaagtttgataatattttcttggcacatggcaaatagttgttcagtaagcttcactgaagcccttttcactctttgaactgattgttttctgccttgttttgttttgtcatccatttcttgttcactgtcacatacacatcagattagtgacttactagaatgccatgaacaactctcaactcttaccgccggaaattcttttattcttcataaactacttacaaccacccctgaaattcttctcttgatctagcttatacttcctttcttgtgtttatagaaagaactttagtgaacaattctaagcatagatggccatcaataattaaatgaattaataattaaatagatgaagtcttgtccagatagcacataggaattttaacatggtctttttcatttccatttaaattttaatatatttagtgtataataactgccaacaataggtgtaattgatatatgaaaacatgtaagaatataatacaagtttgtacacttgatgacatggattcttcattaaagtaaccaaaatgtgaaacaaagactgtaaagcgattttagtcttcataatggctaaaaatatttttttgtatatttagtcctgttgttcagttcttaacattcccaaacaatacttataatgggatttagtacttggttgtagacctgtctaagttaaagtaagtcgtaatagaaacactttgcttcatattgtagtcctatactttttacatagctgtggttatgcttaaattttatataattctcccgtttacttaagactatgagaagtaagtgtgaaagatagtacagaactcacaaaaatatatttcccccaatcttcttaacactctctagaattttagctcccaattttcagagcttggttaacacacataatgctatacttactatgaacatgttatcatattcattgtaattataaatggatacaaaggcaaatgccaaaatgtataattactaatatattgatattgcacatttttatgtaaaatagtaaaaccagtttttgtctgaaagcatattttgtgcaattactaataggtcatattaattcaggtagcagcagtgaagtgtatcttgtttataagctttgcatttaagacacctttcttgcaggaatcacctcctagtgtgaaagttttccaaagataatagcacatcaattcaaaagtgtaatagatttgagaccacaacatgctatcagcatgaagaagtagtttatcagtctcactaactcacggtgtcacagctagaatcattacatatttgttcttttgttttcccatcaaagtacatagtttacattgtaatgttggttgcttattttcttatttaaagtgtttatttttaaaatgcataccagaattaatttttggtaataatagaagaggcactttagtgggaatctaaaatattttctttttataattgcatagtatacatagtatattacttcctataaaacatttatcattaaatgcatagtattaatacctttatattagaaagaatcaatccattttgaacaaaatggccaatttttagaaaattcacatacatagacatttacttatctgcctttcctagaatcatcctttttaaaagttagcagaaatccagtgattaaaattcaaggaaaaataatgaattttagtttattactgacttactatgagtatgttttattacttattacttcttagctgtgtctttttaatcaagccttgagacaagcctttttattttttaaatcccatttgctcatttttatttttagttatagcttttttgtcaagtataaatctactgccagtggtcgctgaaaaagttaattaaaaaactagtcctcctagtactttttcctttcctcataccacttaattactctttaagttctcctgcacacactctcgaaagcatgttttaaaattatttctaaaggttgaaagaaaacactttctctttaactctaacaatgagaattcaatgtggagtattttttcaattacactggtttttttgctgcctccaacctcagtaagaattcagtttcttcacgttgtttcatagatccgaagctaccattgctgcagcctttttgagagtatggcagggcgtccactgcagccagcactgggagcatcatcttaattgtcactactttgtcctcagcagtttcgaagaagagttagggaaaaggcatgtttctcagaaaaaaaaaaaaaaatacatatatatatatatatatatgtattttttttttcttctccaaatagcagatacgtaaagtgaaaagagattagagattatatttgtgtgtgtgtgtgcttacacgttacatttaaatatttagaattgagtttttcagaagaatctctggtagtaggtaaagagaatgattagaagtagctctttttttaatagaaattttcatacaggtaataagttgaaacaaggcttttagaggaaaaaagaatatataaaaactaccccagccagaaaggttgagagtggagaactagtactctctctgcgaagaaattaatgaagcattttgggaagttgtaaatgcccaaggtaaagtatcaactagatttacacgtggctcagaaatccaagtatagagtcccaagagaaaaggaaagagaaccccttagccaaggtacttgtgaaataaggtgagtgctgatgagtggttttaaagcaaatggaaatgtagatattatgaaacataaagaagacccaaaaggaaatagatgctggtatctcatttggagatgaagtaaaagccagtacacacggtagatacttaaaagtagcaatgacattagcgtaagggaactgattagggaaaacttaactaataggtgaagttgaaagggaagagttaaaaaaagggggatgttgaaaagtgaaaaaaaaaaaagagtgagatgacataaagcaatgaaaaatgtttaagccctttgactctgagatccaatggattgagcgttgtataactcatttgttctaaattgactactcgaagtaagctaccagcagtgactttctaagcaggagtcttgaattgattttctgatttgttatacagtcttgaagggagacttgaagttaaacttaagctaagaaactgatatcctaataccttactgcagtgattctcagagtgtggttcctggagcagccccgtcagttgctggggtttcaccccagacctactgttgtaacaagcccgccaggttactctgatgtaagctaaagtttgaaacctaccgctttaatgtatggaatggtctctcagttgcatttctgctcatgttggtgttctgaccctttaccacagcagttcacaagccctaccaaaaccggcgcttccttatcagtcttgttgaactgttttcgtgtaaaagataggtaactgcgtccatgtgatctcattgttcaattaccacctatgagtgagaatatgcggtgtttggttttttgttcttgcgatagtttactgagaatgatggtcataggaaggggaatatcacactctggggactgtggtggggtggggggagtggggagggatagcattgggagatatacctaatgctagatgacgagttagtgggtgcagcgcaccagcatggcacatgtgtacatatgtaactaacctgcacaatgtgcacatgtaccctaaaacttaaagtataataaaaaaaaaaaaaaaaaggtcaggagatcaagaccatcctggctaacacagtgaaaaaaaaaaaaaaaaagataggtaactgcagaacaccttttgcaagtttctgcagatgctcgtgtgggtgggcttctcccggaagattcccagcagcctctgcagtctttcagttcaggaatcttacagagcttctgagggccagcatcctcggctgatggagaattatttccaaatagctaggcatttgagcagagtgaataattatgctagatatctctggatgtctattgagaatcagttgccagaaggtaaggaaaataaacaggaacccagccttgagtaagaacgggtaattttctatgggggctttttctttagttttctgtttaatagctgccagaaatttcctattcctttcatcattctctaaagcacattatttaaataaactattttttcagcttttaattagtttgaacacattgctaaatatacatttcacagataatccagttggctttggaacttaaaattcagaatttggtagtgaaaatcctaaagattatgataaaaacagattttaagcattcacaatgcgtgggtaatagttaatatcatctttcagataccttatttgtttcaaatacatactgacaaatattttgggctgattctgtgatatttaatgaatgcccaattagagaccacaaggaattaaatgagtaataataggcgttatggaaggtaacacacactaacaattcagtgttatatattttaacagtacttttaaaaatcatcttatcttaaaatgaactctaggcaaaccgtccattgtcttgatatcatcaagtgactaaaactatcttgaactcagtagttaattttagccttcatgtatttccaggtacatttaatccacaagtgtgggattcatttgctttagatctgaaaatgtcattttggaaaagtcgtttgatgttgaggaaatcttgtgagacctttaataagcctcttaaatccagaaagttatattttgctggaaggaagaagaacctataccttaaaatttcctcagctcttaagtgagaacttttggatattgaaaaggttgtaaatttggccaaacatagccagtctttcttattgacacattgtctttgaaatcaaaacatctaatttgaagaaagcaatctatattctagattactttttatcgatttacctacatgtgtcagtagaaagcaggacatcaagggattttatttaatcaggtcacttttagtttaatgtaaatgattctctttgtccaagaaagaatataagaggaggaaagcatcaacatttcctatgcagtagtgcctttgtccctatacgatataatagatgttactacacaagataagtatttttccaggtgtctgtatgtcactaataaaagtttcaacagtgcctcagggacagaagctgagcactaactactacactctctttatcctaattatttgctttgtttgttaatctctaaaaatgtttttaacactatataaaacattgaaggaaacaaactattttctatgaagataactgcttatgaagttaatctaattagaatttatttcattcagtagttacacactttctttttgatttttattttctatgctaatctcccattgaggaaatgactcaaaccacttggaataatgctataacacattttccagggatgcttttcaattgggtccctataatttctaatttattaaactgtattcttgatattaaagataaaatgattatattaatcccctgaacaaaagaccagtattaagacatttttcctagtgactcctataagctttcaatttaattatgtattatgacttatttaattttgttagcatcttctaaaatgaactttgatatattaatattacatatgatatagaaaagtacatttaaatttccttgataatctgattatcttgccactaaaaatcttatgatggtaagttttatgcttattactttgaaagacaaaatcaatcaaaagtgaacagctactaaggaacaaagcatgcctgctaagacatggggtttaaaaaaaaaaaaagcaaaacaaattataagaagcaattgtaagtggcctaagataggagacagaagttttgactgaacaaatagaggtgattcggtatactgtgcgggtccaaaatttaaaacatgatgtttcatttgagggtaaaaaaaaatttgaaatgaaatgttatttttgcctcttctttgcatctgctaagcaggttaaaagaagttgaggtataagaacacagaacttctctgctcagcaataaaagaaaaagaagagaaagaaatgctataaaggaaagactgcaggatcccccaacaggttgactactcgggggtgggggttgggagcaggaaagaagagtaattaaaaattacccaaagtctggcagttagagagacttaaaagacagagttactcaacagtgacctagaaggcagggatggggacagcaaaaaagatgaggaaattcagtcaatttgcaacgtgacccatagaggtatacatcatggaatgggttaaaaataggagctagaaggccaggtgtggtggctcacacctgtaatcgcaacactttgggaggccgaggcaagcggatcacgaggtcaggagatcaagaccatcctggccaacatggtgaaaccctgtctctactaaaaataattaaaaaaaattagctgggcatggtggcacatacctgtagtcccagctacttgggaggctgaggcaggaaaatcgcttgaacctgggaggcagtggttgcggtgagccgagatcacgctactgcactccagcctggcaacagagcaagtctccatctcaaaaaaaaaaacaatagaagctagattagaggtagaagctaacatcaaaaggttactctaaagccagatcaacaaagaaacaaacctttcaacttaagaagacataagagcaactattaattgtgcttaacgtagagtcatccttcctatatatgttttagtttctacatagcattacaagttaatgacgcaatgcagttccaccgttcttgtcttgttgttgttaaatagaatccccctcaagattccagagccacaaagcaactgttagtgttcggtgaccttctgcaccagctgtcttttgggctttgaaattgattttcctcatctcagtctctgatagtctctcttcaagtgtgtctctctagctcatcaccagagtgaaaacagtggcacaaatagctgaggaactggaggcaggctccgtgcagggcatcattggaaacatcagaacaaaaggtgtgctctgtgttaaaaagaagccgccgcggctgctgctttattgctgaatacaatggggaatattctcacaggttcactttttttcattcccaaatatggtctgagaagtaaagaaaatttctgcctttattctacaaacctcatgtggatgccaggtcaaaagcatatgtttttgatagcaatttttgcagaattttttacgtgtgagaagcatattcccagagctgtatgactcggcagagtcacaggatgggaagagactaatgacacacaaaaatgtgtgctttatagagaattaggtgatgataatttccttgtgcggaaactcactgtctactctccatatagccgaatttcagtattccattccttcgttaaatatttgtagagtcctaaacataaagtaaccattgtgttggaccttgagaacgggtaaaaagaagtccttgggcttaaagacacattaatcacaatatgcactttggcagtgtttgatatagtgcaatgaaagagccattgttgcctttggaaagagggtatcctttctgaaccccaaaactaacagagtcctgcgaaatctgagaccaaatattctctgctatagaaaatatactgacatagatcatagtaatgtctaagagatttttacatgtatattttcacatatctattttgaggcctaattttacctgaaggaatccgtctacacaaaatgacaccatttgtttgtaagtagtttcaaaatacatcagtttaaacaatctttactaattctttctttacttacatactagaaagtgatctgaaaatatcaaagactggtgattttattttttgattgattgactgatttttgagacagggtcttgctctgttgcccaggctgcagtacagtggtgcaatcacagctcactgcagcctcaaacttctgggcttaagcattcctcctgcctcaccctcctgagtagctggggctacaggtgcatggcaccatgctaggctaatttttaaaaaagtttttatcacgcctgtaatcccagcactttgggaggccaaggcgggtggatcccctgaggtcaggagatcgagaccatcctggctaacaaagtgaaacctcgtctctactgaaaacacaaaaaattagcaggacatggtggcgggcgcctgtagtcccagccactcgggaggctgaggcaggagaatggcgtgaactcaggaggcagagcttgcagtgaaccgaggtcgcaccactgcactccagcctggacaacagagcgagactccgtctaaaaaaaaaaagatttagtagagatgaggtcccactgtattgcccaggctggtcttgaattcctgggctcaagcaatcctcctgcctcattgttttaaaatatagtgcacaggtgatttggcttctcttcccatgttttatagcatttctgtatttattatgcacgtacatcaccaaggccccagtctgatatacacaatcggattgaaatctcaaaagtacctcttctctgtgactaatctgagtacagtacaggtcccaatctgaggaggggtacttctgagatttaaagtcagtggctggccaggcatggtggctcatgcctgtaatcccagcactttgggaggccaaggcaggaagactgcttaagggtaggagattgaggtcagcctgaacaacatagggagacccccatctgtacaaaaatatatataaatatatatataaaatatataatatataatacatattataatatataatatgtattatatatataaaatatataatatatattatatataaaatatataatatatattatatataaaatatataatatataatatattataatatataataattatatattatatataattatatatataatatataatatatatattatatatatatatattagccagatgtggtggtgcacatgctgtagtccaagctactcaggaggctgaggaagcaggattacttggggctgggaggtcaaggctccagtgagctgtcttcacaccactgtgcaccagcctgagcagctggagtaatgttagaacaaataacaaaatatacaatcacaaagatgtgattttagaatattacatctttgttttgagcaatatctcaaaattacattttcttctaagaaaaataataattgcggcagggcatggtggcccacgcctgtaatcccagcactttgggaggccaaggcgggcagatcacctaggtcaggagttcgagaccagcctggccaacatgatgaaacctcgtctctactaaaaatacagaaattacctggcatggtggcacatgcctttcatcccagctactcaggaggctgaggctcctcccaggaggcggaggttgcagtgagccgagatcacaccacttcactccagcctagatgacaagagcaaaactctatcgcaaaaaaaaagaaaaagaataatttcatagcaactcaagcccttgccaagattggtgatctcatgatctactgatgtctcaagttttggaaatttaaacagaggtgtctgatttgaagtcagcctctatcaaacttactgtctctcacgtagtagatattcacgtttttagtgttgaggctaagttcataatcttgagagtcccataggctcagattcaaatcctatctcccgtggagaaacagcatactttgaataaagctaaaacacacatcccaggcttgctttttggtttttataatttccagccttatttattgctattttatatattatatgatttcattcctttattagctgtggcttcttggccaaggtacttaactttttgaggctcacttttcctcgtctacataatagtcaccattttatttattttacacatatttattgaacacctacaacatgccaagaactttttaagccctgttaatacagaggtgaataggacttcatagagtttacattctaatgggagaagacaaaccatagatgatttgtggagtgaatatatcattcatagtccatcagtatagtacgttagaaatgcaacttttaaaaatatttgtttatgttttttatttttatttttttagacagagtctctttttttttttttctttgagactgagtctcgctccattgcccaggctggagtgcagtggtgtgatctctgctcactgcaagctctgccttccaggttcacgccattctcctgcctcagcctcccgagtagctgggactacaggcgcccaccaccacgcccggctaaattttttttgtatttttagtagagacggggtttcactgtattagccaagatggtctcgatttcctgaccttgtgatccacctgtccccgcctccctaagtgctgggattacaggtgtgagccaccacgtctgaccctatttcttgagacagagtcttactctgtcaccaggctggaatgcagtggtgtagtctcagctcactgcaacctccatctcctgggttcaagcaattctcctgccccagcctccctagcagctgggattacaggcccccgccatcacatctggctaattttttgtattttgtttgtttgtttgtttgtttgtttgtttttactggagacagggtttcagtgtgttggccgggctggtctcgactcctgagcttgtgatccacccgctgcggccttccaaagtgctgggattacaggtgtgagccaccgcacccggcctgttttattttaagcctcattcctagaatcttctcttcaggcagtttgggtccctccctcccttaccccagctcttccatgatgctctgagcacagcagggagcttctggtgttacactcttctccactaagacatctagttttcatgctctctgtcttttcctaatcctcctgatattgcgggggtcgccttcgttcctatccgcgagacccctgcttgtccagtggcacactctgccatctctttgcttctcttgcagccatagaagtaattccgcttcttagaaattatgctcaggcacaggaatctctgcgaggctccctgactgcatcgcctggatgcttcatgcgtttatttctctttgagatcctgttatcacctccgttctctgtctgagatgtaaggcacaggtttcctctgctctcaggccccttggatatacgccgtggtctctgcttctccaggaatcacgcggggaggccaggagcagggccttcatccctgggacatggtatatcttcagccattcttctctttctctcttcctagcccttaataaaatgaaatattttttctagtctaaggggaatctttgttttctaaatatggtttctttctgacattttgggtatatcccaaagcctctctccatttccactttcccccagagggttttcatgggaccaaagactaaggtaagggactacgtcgttggccatgggcctgcaaacctgtcgctacctgagttttgcgtgtttctctacacgcagctttgccaggtagctctctctgctacttctgtcccttcgagcatggcatggaagcagtagaaagagcctcagccttccttggagtcttgccacttccccagaatgccactcacgaagcagaaggcaggcttctctccctgggccctgttgctcctctgctgttaccagctcccctcaggttctccacctgctcccagcgtggacatgttcccctttctggagggaagccctttctcccctcacaccatttttctccccagtccactctatttcactcagcagtctgggctttagaaaaccggtaagagactcaagctatttcttccttcatcttatttcatttctcctggaggcaatgaaataaaactagaatgagaggattgaggcagaggaaacacagaaagggaaaaaagtcaggaggaaaaaacatgctttcaatagtacttcagaaacttgatttaccgcacaaataaataacaagatcactgattgtaataagcactttgaagaaaatgataatacgtggtaatactatggagagtagagggaacagggctttggattgggtggtcaagtagtaacgtctgagctgagatttggaggatgaaggctgaaaatacaaataggcattttattcttcaccgcattatggtgaaaattgtaatgaaacaacaatacagtgcttagtaggtactcaggaaatggcagttatcattattgttgttaatgaagccgacagaatggacacctagctcaggtccatcggtgataccaggaggggtcatccaagactgagctgatgccaaagcccacacttgtagcacgggtccccgaccactgggctgtggaccagtacagatctgcggcctgttaggaactgggccacacagcaggaggtgagtggcagtcgggggagggagcgttactgcctgagctccgcctcctgtcagatcagagatagcattagattctcacaggagcacaaacgctgttgtgaactgcgcatgtgagggatcgaggttgtgcgagaatctaatgcttgatgatctgaggtggaaaagtttcaccccgaaaccatcctccccacccccctattcctggtccagggaaaaattgtcttccacgaaaccggtccctggtgccaaaaacgttggggaccgctgcagtaaagtaagcgaattgtcccacagtcataggaaatgtcagtccttttcctatacttggcaaagatgatcatttggccctgtgaaattcatacaccagtgtttgccaggactttttagggtggaacttccagaagataataataggatgtctgtccaattacatggatctgtccaagcttcacaagaggcatgctttgcaccctttaggctgccttttaaatcctctccagtggcgttgagggaataggctgtttctacgggctgctgagcctcctgctcactcttcatgtataatcctgaaaagagcgagaatctaggtccgggccaacatgattcacaggccagatctagccctgttccttactttttggtactgcttgtgagcagagaatggttttcacatctttaaataattgacagcatgaaaagaaaagatttcatgacatgggaaaattctataaagttaaaatttcaatgtctacaaaaaagtgttattggaacagagccagagttaaacatgtatgcattgtctatggcggctttcacgatagaacagcagagttcagtgatatcgctggaaaagcctaaaatatttactctgtggtcccttacagcaaaagtttgctgatgcctgatctaaatgacatagtccatcttcttatccagactacatgccagtgtgaaatcgccagtatcaaatttgtaaaccagggaattaattttgtacacattcgttttgatgatgttacattttgaattggcatttaaaatcttcaaattatacttttttggtcctttgaatagagactgtgatatgtgattttgagcaaaataataaataactaatgcttattgagcacttaccttgtgctagatactaatgtaaacactttatatatgcattacttcatttaatccttggaaaatgcctgtaaactgtaggtactgttattatgccctttttacagatgataaaaccaagacacaaaacttgagtaacttacccaccatcttgcagctatttataggtgaagtctggctttgaactcagacagtgttgtttcagagcgcttaataaccaggctgaatatggtaggaggtactgatgctgcctccaacatatcacttaattcaggctataaacttttaaattagctttttaaagtagttcagtggggggagatgggctcataatacagtcgctagtataatttgtacaagtggcaactcatcatttgcatctgttctaattttgtgtttgacaaagcattttttagagacattagctctagtctctaaaagctctagttttgcaaccctgttaaaataagtaagtcattagtgccattttttttacaggtcaagaaaaaaaactgaggttccctaggaccacattactaggaaatgatagaccagggactgattttcaatccagaattctttccactctaccgacctgtattaggccaactttcatgacttttaccgtatctgtagaccagcttcactatttttcacgtaatagttttctggagattgattctttgtaacttttaaatacctattcagccttttctaagcaataatatacataaaataaatgagtgtgatccttttttattaattggatacttacataacacttggtatattccaagcactttactttaaatattaactcatttaagtttcataataaccctgtgaggtagatactattaccatcctcattttatacattaagaaaccaaaactgactttcagtaactcgccagggacacatacctactaagtggttaggtggaatttgaaccttggcagtctggcttcccaattctgtcctattagccccttaatttgtttgatatattcagtatttctccaatatacaataagtatatgagtattaaaattagaagtatttagctatgtcttatctaaaatgaccttgcataaagactgtaccatatcagattggaagatctctgtatcttctgaatgtgaaagagagcacagtctgttgacttcattgaatgtattaggaacatcgtaataagtgtcacttactgaatatactgtatattcagtggatactcactgaatatactgtaagtaaccagcataatattaaaagtaaaccatgaaacaaatggtgcttttttaaaatttggagacttctgttgttaataggaatattaaaattagttacctttcctgaagaattccttttacagtgctcttgtcatgtgaccacacaatttctgcttaaacattgtcaaggaagacagcatacaacttttagagacagtttgctctctgttgtatggctcggtggttagggaatgtttccgtatttgatccagaatctgcttcactgaccccttcatttatttaggtttggtgttagaagatgttccatgattccttccctgtccctacccccagcaggttcacactcctgattatgtttgacataagctaacaataaaatagtttgcatcgtttgagaactgagcagctgcctgtaaccgaacttgtttttatagtacttattagcagagaagcaggccaagaggacagtgtttccatggacatccagaaaataaatcagtctgcagaagatccgcgtgatcatgcatactcgtgtttatatgagcgcatagtctcatgagtagtaaatggccatgtagctgggtttcttttgctaactgtgaaaatgctcttagggtaattcatcaagggacattccaaaatggttttgttcaggaaacagtatgattagaaaatctttatagtctctcaagatgtctacttgaagggacagtgatcatttatgatcatttatatgtataaatcctgctatctacattagaaatcagtctctttcattagagtcattattgtgagttagattctttggttaaaacatttccttaatttttaatgttttaggttatataggataaattcttttaaaaaagagagagagagcaaaagagacaggagagctaaatgcatcgctgtctcttgtctcttgtatcgtaacatatttgtatcttataatgatattctccttttccacaggcatttcctattcaaaacaggaacaggtacaacgccactgttcagtactgcaaccccaggatacacaatggcatctggctctgtttattcaccacctactcggccactacctagaaacaccctatcaagaagtgcttttaaattcaagaagtcttcaaagtactgtagctggaaatgcactgcactgtgtgccgtaggggtctcggtgctcctggcaatactcctgtcttattttataggtaagaacaagttcttagaattactttgtctgtaaatcagggtgttacattgttttattacttgtatttattcatttggtctagaaatatattgtgagattatatttggtgggggtgagtttggtaataatgtatcataaatcacagagtattttcagtaattttcagcaaatttagatacatagaaaagcaggttttgtgggtagtgaggtaatattcttggacaaaagctatagggtacatttgtgtttgacttatcccttgtgaaacatggatagctctgtggcatttcatgtacacaaaataattcatgcgcttgcagtaatgaaccctgtgcaggatttccttcaatgcgtactcaatagggagctctccactgcttgtgatattgtaagtctctcagctcactcagccatctaaatgtaaaactcatcactcagggccatcatcttgcactcaggaacactctccagagaactgggcgtccataaagcaatgaatggattatatactcattcatatatgtggatttttcttctcttctgatgtagtattgatcatgtttttcatttgatagtaacccaaataatggaagctactaatagaagttgtaaatattgcttttatttaaccatttcataacatatctgagcattcacactactggaaatcgctttttaaaatgccagaaatgaccacattgtgttttgatcttcttctaagtataggaaaaggcctaccacattgaaatgctaatggtgtccactgagataaatcacaggctttgtggtttatccaccaagaacaatagccagtgatgcatcctcaggtttacaaagcaatttgtgatgccccatgaaattctataactgaataagagtattgcagagctgtatgtagaatactatgatgtttctgcagtggaccagtatcttccactggctacaatactcctgtgatataattatgcactttggaaagtgaaataaccattttgtgtcagtgttcaatgggaaaacagaattgtagagcatgaaggaactttagagacaattgagtcaggaatggcaactacgtgacaagttatacagtattttttccaattttttgaccatggaagacatcattaatgattcacagcactttctctccttaacccgattacatgctgcttatcttcatcagagtgcttcatacagtacctctgacggcctctaccagtcagaggtaaaagcaagatgaaacctttctgttacctttctgtcatcttttaatctaagttaactttctccttataaagacggtcaaaccagatactgaaggggttgtctcttgactaggatcacaccctagtgaaacaatactgctgttgtttcataacagtgaaggtaaatgagtaatttcacaacaaaaatcaatattccagagacagatttctagtattcggttagaaaatgtatcagccatcaagagattctcttctagttagctgtgtatattatttgtacctgtcagaagtgtgctgctaaagaattttaaatggttctgaaagggaccagtcataaatgggatgtaataaattaagaatatgtatttgaactgaacaaggagaacacacgggcacagggaagggaacaagacacactgaggcctgtcatggggttggctgaggggagggagagcattaggtaaaaacagctaatgcatgctggacttaatacctaggtgatgagttgacaggtgcagcaaaaccaccatggcacacatttacctatgtaacaaacctgcacatcctgcacctgcaccctggaacttaaaaataaaaaagaatatgtgtttgttggggattttatttatttatttattttattttattattattattttttttttactaaatggggcacaccaggtagataaatattcagggctggaattcagtgtcaggttgactggtcaggcatcctttctgattgataagtgcctgtgtgcttccagttgttaaatattttgaatatcaattctaatgccatttaattttattttcatggtgtgactagcaggaaaaaatagcattttaatgtgagatcagtcactgttacctgtgagacttgtactctttttaaggacccattagtgaatataactctcagacttctaagtaaaaactcaaaattttcctttttttttcatattgcctagttttactttttagtaattaccaatctgctttattcctactagtaccatggtcataaaccttccctttgcttttatttttccccacatggcaacatgcaaattatctagttaatatactcatgtagggttttcagttcaacagatatttattgaacatttgttttgatctagttattgtgctaggaattaagaagatacaatcccagtgttatctagcaaaaaaattacttttatcttcaaagaattgtctcatacttttatcactttaattaagcacatgtgtgcttccaattttcattggtcttcctatatttaaagggctaacacactaacacaatgattttatttttaatcaggtaaaaaaatttcattcgctcatcagttcgcatggtaaatcttttttgattaaagacgttgcctttacccttgaagaaaagaacaggacacttctctcagggaaggctgtccttttctgttaagtgtgcatgtaaagcagagagggagaaaagaaacacttgcccgtccagccagatcagtctgataaaccccagtatcaatgaggaagaccaatgtcatcatgagattgaccttgcaacctttaacagaaatgcagccttcctgaagcttttttttccattcccttagaattcccttctcttatattgaccgttaatatacagtaaaagcctaagacattaaaaaagagcttgaggaattatttcttcgaatattttttcttaccttccagtaagataatgagaacttacgacaatgtagatttaacatgtctcttctctaaggtaagttgtctcaggatagacaaggtgaacagcttctgaaagagaggcaaggagggagggagggaggtggacaggctttgttgtttattttttctatttcttcaaaatttcagagagtaaagaaagaccttaaaaagtgaaaattaattgtaatcccacagtgcatgctgtcaactttttggtgtgtatccttccagatattgtcccatgtacatatacagctagaggtccatatttttaaatgcattttatactaggcttttctcacatatcattcattatacatcatctatataattttatttagtggctattcttagttaactagttccccaaaatacagtgacttattttcttgtacctgtgtccgtgcatgttggtgtgtgcgtatgtgttcatttgatccagttttttattggtatacattttttgaaggatgtttgctgtaccacagagtaggcatgttttaaattttgaaaaccatggcaactgtcagtttacataaccaccaacgctagtcattacatctatttatctgtctatattttattatgcatatttttaacttttgccaatctcttaggttaaaaggttgttattttgatttattactagtagcgctgactatcttctcatacatttattggccatttgtatttctctttttgtgtgtgaatagcctccacttttctattggggctattctcttttctttttgatttaaaaaggctattttcaattaaggatatgaattttttgtcacatgttatgtacttctccaatttattattaactttggtcagagtcatttttaccatatttcattcacaagttttaaagtcgtcaaatgtatttttccctttatatttctggctttcaagacatacctgtaaagtccttatttaatctaagtgttagtttttatttatttggtatatttttattttttggagacaggttctcactctgtttttttctttaaatttctagctttcatgccatacttatctaatctaagtattagtttttatttatcttttatatttttattttttcaaggcaagatctcactctgtctcacaggctggagtgcaacgacgcagtcacagctcactgcagcctctgcctcctgggctcaagtgatcctcccatctcagcctccctagtagctgggactacaggcacacaccaccatgcccagctaattgtttttatttttttgtagagacaagatctccctatgtttcctagattggtctcaaactcctaggatcaagctgtcctcttgcctcagcctcccaaagtgctgagatgacaggaatgagccaccactgtgcccagccgaggatttttaaaaatgttcttcaacttactctggtacttaatggtttttcagtaactatttttaagttaacattttcttggccactctgatagatgtcagaggtccaaattagctcttcattctagacgctcatagtcaagtgatgaggacgtgcataaaaacactcttaacaccatacatgctttcataccagcttgatgagcaaaaagagaagaaaggcgatacctacgttttgctgtagatttgggggaaagacttgatctggcacctgatgcatgaactggagctttgttcacctcacgccaatggctagtgagaaaatcaccttgagatgaggtcatctgaggaacagcaaggagaaatgcgaaatatctgccatggtgcatgtgcagtgcttactgtgccgggcgctgttctagaaactgtatgaattacctcatttaatttccacaacaaccttaggaggtttcttcttttaacaaatgtaatctgtggcttagagagatggctcgcctgaaggcacacacacaaggactcttacactatactgtctcccgtgaggttttttaagaagtaaaaatagagaagaaattgaagagatttaagcataggagtgaaaaggagtcacatttatgcttttgaaagattgtttcagtggccttccagaacatgcagtatgatgaaaggaggtccagagttgtgctttccaagcattcctgtgcctaggaatcgcctggggaccttgctaagatgcacgtcctgatttagcagatccgaagtgagaaccgagattggtttttccagcaggctctcaggtgatgctgccgtgcttctcagaccacaatatgagtagcacaggtctaggaaatgctgtcacgtgtcccgtttcatgatggaaatgttctgtttccacactgtccaatttagtagccactagacacatgtggctgttgagcacttgaaatgtagctagtaagttgtagaaaccaaagtttaaattgtgctgtttttcattaaactcaaacagcgacatggggctaggaactatcatttggatagtacaagtctagacaacctgttagaaaagtagccataactgggagatcatgaggccctattaggatagaggagcaagcagaattgagaaaccttagctgactcatgatagaataaatgtgatatgatttcacctatcccagtttttaaaaatcaaatgtacatatggtaaactttctttcattggagtcatcttaccattttctttggattactgagcctgcagctaaaatcctgctctaatccattaaccttttgagttgctgtgcctttacgcaacaaaaattctactgatttctaaccacaaatgttaggttcaatgattacagttagtgatacagacctacccaaagaaatacctgttgcacttctctgggccctgatgtactcattcttcttttttgactctgaaattaaaaaaaaaaaaaaaaaaaaaagatgagcagtaaccaccagttgttcaccaaagaatggcaaaaaggagaagagtccatgttctgcgtctgttcaccgttacacgatgggtaggagtcttgatactgttctttgctcacagaaagctcttttttctgggtagaagataacctgaaatgtcaatgttatacacatagaaaaatggccagaaatccctcatgaaggataaacattattgacgcattgctacatgcaaatcataataaatgcttgggatgacgccaattaaactgcaaataagccctcaaatcagacttcaaataacaccgttatagacctttaatttcgtgagcatctctgtgcactgctaggcagagtcagagaatttctccatgtacagtagcaccaaaggtatttgtacatgaactttttaaggaacactagagaaaaaaatattatcagactatattgtggtggtatattttctcaattatcttgcccttttggccaggtttttcctaaccagtaattcatttgacaacagagtgttttaaatcacagctttattgagacccagtgcacatactgtgtgatttatccatttaaatatacggtccaatggtgtttagtgttacatgtccacagaattttgcagctaccatacagaacatttctctcacctccaaaaagaatccctgcatcctttaacagtcactcgctgttacctcccaacacccagtcaatacccaatagtttttttatccccacaaaaatgtttccataaaaatctgaaatttttaagggactgttttgctaactcattgcccaatgaaaacaaataactcagctttgtttttcttatgagctcctgacaagtatagcaaaccggagaactactcaaatttttactattcctttcatttaaaaaatacatatgtagttatttatttcctttgaacagctgctaccaactgatttctaaaatacatgttgtcatatgcctgctaaaaaggctgtttaacaacataagcattccctagatctggcaaaacataacctgtcgaatccaggttcattgcagttatgattccttagcagttatctgtcctacttctgggcctatttgcattttatgaacacttttacctctctgtgtaccttgaaattgattatggtagtagctatatatgtgcaactcagggtcagaagggaaaatacgccagccctttatgcttcatgaaaaatcagccatttaactatatatggcaaaataaaatgtgtttgacattcttttttctttttggacatgtctttgtaataaaagtgctgttttataatgttctagaacacagccaagcaatgaattacataccattttccactacagcttcttcccttcactctgagttgcattatagtcagaaaatgcgtttttgtctgagatggtatggaagcattttaatactaacatgatttcatcacattgtaggaaaaaatgtgttgcctatattttagaggatggaaaattgtaagactaaaaatttagaatcagtttttcaatattttattttattctggaatccttaaggacatatttaagcctgattcaatggtgattaaagactcagaataaaagaatttaccagtatagaaagtaagctcctcctctccccacaaacataatgtattttactcttagtttgatatgaggtcagctaaagtaaataacatatgcaaataatacacttggccgggcacagtggctcacacctgtaatcccagcactttgggaggaggccaggagttcaagaccagcctggccagcacggtgaaaccccatctctactagaaacacaaaaagttagccaggcatggtggcacgcacctgtagtcccagctactcgggaggctgaggcaggagaatcacttgaacccaggaggcagaggttgcagcgagcagagatcgcgccaccgtactccagcctgggcaacagagtgagactctgtctcaaaaaaaaaaaaagaaagaaagaaaagaaaagaatacacttaaacagattgtgtttaccatttaaatatagggatctctctgacttgaaaaatattcaaagacagaacaataagaaatacctttaaagtcagcttacatccagtttatgctagatataaatatcttattcatgaaatatagtgaagttttctctgttttaaactatcatttttgcaaaacgtagcaacatctcctaatgacaagtggaaagcttaatgcaatatttaccactttactgctacgttgcataaatatttaattggtgttgcatatgtcatttgcttttacattagtggtactaacagcggcatattcagagagaaatgtctgcatagagaggagtgaaagaaaagtaaatggcataaataaggttaaaaaaacttgaattactaggaattttagaagtgaattcagcataaaacctttaagtttcatggaaactatatcaaacaaaggtttcatcctagaatatacaaataaagatacaaatatcaaaggtttcatcctagaatatacaaataaaatttaaatttgtatagagtttgttgttcccacatcatcttagaatgtctgcagactgctcacattgtcccttttccttaaaaataagattccaaagccagacgtggtggcaagcatctgtagtcacagctttctgggaggctgaggcagaaggatcaccacttgagcctcggagtttgaggctgtaatgcctgatgatcatgcctgtgaatagccactgcactccagcctgaacgacatagcaagagcatctctaaaaaataaaaaatagatttaaaaaaattccagtttcttctttagtgactttggtaatataacacctgtcagaaaaggaactgaccattcattcatccgtcattcattcaacatttatttatcaggtgactaccatgggtcagacactgtgacagagacagcagtgaaaatacagtccttgcctcttagagattatattcttttgtagaatgcaaacactgagtaattaattacagttatagtaactgtttgaaaaggagaaatgtaggaaactaagagagtgcataaaagacagaactttactgaatctgagcattcaagattttcctgctaaggcctaaataataactgagattatgtgttttgacaaatgctgacgtagggacagattctaagtgttaccacataaacctaaatgtgacccaaaaatatcaactgtcagggtattaaaactaatatattgtgatataatgaaaatttatccatgtgttaggggaaaaattttttttttttttagttttcattattgacttagtttacctagagcccagtgttccagttaacatctagaagtagaaatgtcactttggaaatttggggtaactagatctataattgccgcaagaatcccatagtctctttctgtttgttcctttctcttaatttcagataacgtacatgcatgctttaagaattttatttataaagaattttcaaaaaaatgtttttaaaaactggtaaaggaaaagatatctctgacttctttccattcatgagtactcaatctgttttgaagaaattaaaaacatacagatgtgtgtgtctgtatcctacatcgcaaaagctgtttggagataagcgtcatgttgccctgtgtttgataactaaggaggtcagcacgtctcattttcatgattgagttgggcctaaaggtgcaaagaatcttactctgaggcccccccattgtgcatcttcccattgtacagtctatacagtgactcgaagaacaagtatgtttttttagctagatccacctctgtataatactaagatattttctgagaaaagatttcatgttattaatgataagaacttccagtccttctgttacctgttacattttatcgtggtgacttatccgggagggaattaatgctcctcttctggtggctgtccatcagccagcctggcatgacattggctggctctgtcctgggattgtcttatcaccctaatactttagccactgcctgatcctttctgttttctcctccactggggaacccattctctttatgactttcagtaagcctccacctgcccctgaaggagaggaaacctgtcacatattatcctgcatttcccagaaagacagaaggatatccaaagctacctagaagattactgcatataatttgtagaatatggggctcttggttttgagagaaaattgtacaggtggttttgcagatttcagatttttgcttattttttcatgtatctccttttaattatttctaatatcaaagtcaatttcattaaacttagctgtttttgaataccttttctaaatactgaattcacaaagatgagtaagaagtaatatttatcacagtgatctcacactcttatatgacaagatataatttgaaatttgtataccatagtacaatttatttttaaaatactgttaataagtatagactctcaaagcagccagatttgtgtttgtatctcacctttgtcacttaataactatgtaatcttgaacagggtagttaaccttcgtaaacctgaatttcttcctcaatataaacaagtttcaaaatagtacagctatggggaaaattgaataatgtgcctggcaaaatgtaagtgctcagttaattttagctcttcttcttcttctttgtaacaacctagtaaattaagtactattatccacacttttttaaaagaaaaatcttaggcccagaaaatcagtgacttgtccagtcagcaagtcctttaaaaggaaccataatctaggtctccttattttaagtccagaacttttcccactatatcacagagcattgtttctcctaaggtttaagaatttatagatagaacatgaactgaagaataaataacaatgaaagacaaaatgagaaatgaattccattttgaattcttattttcttatgtcagattatgtcacgaggaaggtctcagcagatgttagccatctctgacacttgcctttaacatctcttttacaaataaagagtaatttggaccgggtgtggtggctcacacctgtaatcccagcattttgggagcctgaggcgggcagatcacgggttcaggagattgagaccatcctgaccaacatggtgaaaccccgtctctgctaaaatacaaaaaattagccgggcgtggtggcgcgcacctgtagtcccagctactcgggaggctgaggcaggagaattgcttgaacccaggaggcggaggttgcggtgagctgagatcgtgccactgcactctagcctggcaatagagcaagactctgtctcaaaaatacgtaaataagagtaattttgctgatttctattcatatcaagatacactgatttttcccttaaggtaatacagaatttcctttagaaataaatgtattaaaattttaagtcaatcacttaaaaaagaagtatataaatgtaaaatactgacttacaaaataatactatagaaggttcactattataaaggtgatcggcacatttttaccaatacaggaatcactgctgagggaactgaaaatgctgtggggcttttccactgggtttcccaattttattccagatccttaatctttttgttaactacatttctagttttaacaagctaattgcatgatatggttagtaagcctatatgagttacatagaatttgtttataaaacctaactatattgtttcagtcatttcaaataatcataaattttacattttccatttttagagtaatgatatttttagatgcctttttttacttcttcaaatacattcttcatgatcttggaaaagagtcacataaagagaagcattgcatgtttaaaataagaaagtgggccatttatttttaggaaaggagactgagaccaccaaatacagaagcaggctggcagtgtgggcaagtctcccagggatcagagactgcagcttcctctgtgttttgctttgaaatatatttccacaaatgctccataaatattcattaataatggttaagttaggagtaactaaggaaaactgctctccgagtgatcccagatgaagagggagcaaatggaacgcaggcttcataagaacgtttttctcctctgcctgaggagtaagatgagacactcatgggagactgatgtcctctgtccaaataacccttacctacaaggtgctgcaggcacccagaggccgtagtgggttccacagccctctgcttctcacagccagctgaacttgataaggcagtctcacagccagccgaacttgataaggcagatacccacttcatcttagttgactgagtgataaacaacaaatcacatgagctgctcgtgcctacattactgaaggatcattgattctgtttcaagtttcctcttgacatacacgtgcacctgtgcaaacacacacacgtatacacacactcacgaatcagtgtctgtctcaaatgtaacgccttggagaactggactattacataggagctgtttttcggattttgccatgttttaatatactgacattcttctaaggatctccatatttcaatagttggatctttcagtaatggtgattacaatgccttaaaatttcaaagaattgtaattttcagtttgtatattttaccattttttaaaaagccaaaacaagtgaagaaataattttatgcttaagtcagtagcatacataaacatttgttacataaaagtagtatgcagtttttttttgttgtttttttttttttgagacagagtcttgctctgtcacccaggctggagtgcagtggtaccatctcagctcactgcaacctccacctcataggttcaagtgaatctcctgcctcagcctcccgagtagctgggattacaagtgtgctccacacgcctggctaatttttgtgattgtagcagaggcggcgttttgccatgttggtcaagctggtctcaaactcctgacctcaagtgatccacctgcttcggcctcccaaagtgctgggattacaggcgcaagccaccgcgcctggcctatgtgtgcaattcttaaagctgttatgggagaaaggaacccaaatgaaaattgagtgagtactgcaagcctttgaataatgagatagatctattggatttcaatggcaaagctgcaggtaactcactaatgaatcatctattacatacatttcacaataacaacaaattcaatattttgggaagcagggaataacccacaaatcatgtaaatgatttcattctgtattttgaatgttattgaaataagtcctcttaccatactcttcaatattgacaagtattatctcaaaaattctctagcttataggtaatggctgacccctttgggcagctgatcgtgacggttaacactttgttctttccattacattggaggatgaatccttcttttattcagagaacagaccctttaagcaagagaaaactaatgaaacatcaggaaaacagtctgttttagaaattctaacttaattctctctgtgacagaagcaacagcttgattttcgttttgtcagcttcagcattggctgtcaaaggcagctctggaattagcatttcctgagccgcatccataggtgtcttactctgcatccacgtagttcagaaagaaaaaatgcaaggaaactttcaagtagaattgtttaatgttatcatttataaaagaatatgagtcaaatatcctggcagaaacaaaccttcaaagctaaatcactgtgtgttcccatcaaggcattttgatagccaatatgattcttttttcccattaattgcattatgccaagaaaggatggaaaggaaaaacagcatagaaatataaaatattggcagccattctgtatctccctccaaacctgttcgttcataaagcctatacttttagaatgttatcatgtaatacaaagaggaacttcctatatcaaatgttagttcttttgaatataaatatcctacagttgacagaataattttattttccttaatgacaactagagtgcatattaatatgaaagctttcaaaagaaatattgatttaaaataacaatatttgggtcagcatgctatagagtgttgaaataatattagccttaaaagttaataacaaataataatgaattagaatgccaaaatattgcccaacacattctgtcaacacgtatatgaacacagcaggaaatccaaaacaaaagctaatttatagagaactctgtgttcctaatgacagtttagaccagtaggggtccaagttacaaactgcagtcttcacatgcgatactttcattttacattgaaagcttggttgcactctggatacatgtagccaatcaaatgattgccctatatttaagagtatttttcttatttttttctgtgaaatctgattattagcacatgaaatacacatgtgcatcgtgtatatttatgtattcatgaaattgatacataaaatgaaacaattctgcattcaaagcccaagatatccaaggaatcgtatgtataacatgatagtttgactctatgcaatgtagttttaaaaattaaaatcaagaacaacatcggtattctaatgtgttgacatcttattgatgccagatatttttccctgtgctcaataatttagcctaaatatttgtattttaaaatatattaacatcatagaatataaatctggaagagaccttagaggtcatctagtgcaaacccttcagattttctttgtaaatgagagagccaagcctcagaaagatccagtaacttgccaaagttccacaattatttaaagccagaattcagacagggactccagtctcttttaatacaaacaaaaggccccacaagatgcaatagacaatctgtgttgaaaacaatgtacttacctatgtaatgtcagactctgattttattttctgcaacttaatatgttcctaatgaatctttctcagaaagattccttttggaagtgtaccacagtgaatgtgaagtgaattgcaagaaagggaaactctacatccttgcttgctttgatgaagttttgaggtttgggagactaaacaaaatggaatggcaggcattttcagcatggtatttttaaagtcagtttttcttatcagactctctttcccatattacctcatcctctttgtctttgtgagaatgttcacttgatcttgtaatattaaacagcgtttagccaaccctggcaggccctcccagcacgctactctgtgttgccaaaaccttagagcacactcctcagggttctggtggcacacaccaccttcaggtgactgatggctgggtgctcgggtctgtgttcccttcacaacatcccctgtaatttgctccaaggttctggcaattgctggactatgtcaccagctgtcatcacccttccttcccatccatttttggcaggatctggggactcaagcatgccagtagaaataatagtagctgtggtaacaacttcagtggcatggtccccagagacgagatcaaaatttggcacctttttctctcaacatggagctaaaaatggcactgaatttgttacttggtggtatataattttctttaattacacatttttggtttcaagtgttccacatgctggcttttaagtgtgacaccaacatatacgggttaaaaacaatggcatgccccctttttattttatggggaggaggtgaaataactataataccatggattccgttcgtctccagccttggaaaataaaaggaatgcatgctgtaatttctctcactttaatggtctttgtgtgtgaaaaaaaattccttcataaaattttactgataaatctttattaacatattgtctcaaaattatttcaattaataaggttttttcttaattattggaaaaatctacagaaacatactaagagtttgcagaataattttttaattacataagaaagatttaatttttaacatctgaaaatggttacagttcatgaataccacaagacaacctaaaaagatgcagtctagagtagcctatttggctgttagtaacagaggttttgaccacgatcaatgacttcatatccatgttagtcactcctgagttgatattactataatttttttttctcattgacttgggtgatagtataaaaagtatactcattaattttatagatgacaaatgtcagatgttacaacttattttaaagggatccctgtgctacttcaaactttactaaagacaaagcaaatggtttttatcttcataattgttttgttttctgggtttcttttttctgttcatgatatcagtgacttcactgcccaggctaaagtgatatcatgaacagaaaagagaaacccagaaagcaaaacaattatgaaggtaaagaccatttattttgtctttagtaaagtttgaagtaccacaggatttctaggtaggtctagtagaaaaatgtaaagtttgaagtatagcccagtcaggaaagaattcagtgttaagagatacatatttcaaagtcatccatccacatggaattggaagttgatattataaaagtggttaacatgaaaggaaggtcaaggaaggactttggcaaatgtctatattttggggaatacatggagggaggcattgtataagtcaggagtaggcaggttatgaagtggtaaaaacaaccctaaaaacctaaatggctgtatcagtttgtaattgcaactgggcccaacttagctgggtgcctctgcctcacagtctgtaaggttaagtttacagtcaaactacagactggggctgctgtttcatctgaaggctcagctggtgctgcaggatgtgcttccaagctcacacacaaggtttttggcagacttcagtctcttaccacatgggcctctttatgaggctgcctcataatatgacagctggttttccctatggaaagcagtccaaaagagagagagaacaaccaaaaaagaagctgaagtctttcgtaacctaagctcaaaagagacattgcattatttctgccatatgctttccattgtaagcaagtcactaaatcaagcctaaactcaaggggagtagatgatacaagggcgtgaataccagaagacagggcttatctggggccatctcagaggctacctactacagtggcttaacatgatggtttatttttgcttaagctacatgtgcagggtggttcttgtcaaggggtttctgctcactcaaggccctagacttaacagaaacagtactcagcacatttgcatgattactgcatgggaatgcaacacattacatattggttcttaaatcttcctcacagaggtaagacatactacttttgcccacatttctttatctgaagcaaagttataaggcttcagaagagcagggaagagtaactccaatatatgtccaggagaacttagttatttgtgaatagcctgtaagacttccacaaaatgatttaaggagaacaactgggaaccagcagagaactgggaagagaaccaggagaattatgaaaggaaaataaagtattgatgatgtgtggctaataatgcccagtactcttgagatgtaaacaggatgaatattggcacgaggctactggatgtggcaatttaagagataccagctggggatggcgactcactcctgtaatcccagcactttgggaggccgaggcgggtggattgcttgaggtcaggagttcaagaccagcctgaccaacatcatgaaaccccgtctctactaaaaatagaaaaattagctggatgtggtggcgggtgcctgtaaccccagctactcaggagactgaggcatgagaatagcttgaacccaggaggtggaggctgcagtgagccgggattgcgccactgcattccagcctgggtgacagagcaagacttcatctcaaacatacatacatacataaaaataaaaaaatttaaaaagagatacccataaccattgtgagaaagattttagtacagtaatgaggaacatcagttaaagtgaggagaaaagaagtgtgtgctgaggaagtatgtattgtggtctcttcttttgagatacctggtagtaaagggaaggagagaaattaagcaaaaatttgaaagatatcagaattaagaaacccttgaaaatcctgattctgtaagtaagcatgacatttataccccaaacattgctttttcatctcttctaaaccatttgtaaacatgcttaagttgaaggagcaaacacagagaccttcagtgtacagtcagatacagtaagatgctggtcacttcataccgtctgggttaagtttccgactttgtgtcacagtcccatttcttcatcttaacaacaacgattttctgcagggtgacaagttataatagtttttgtttttaattctggtaagaaacacacaacataaaatttatcgtcttacacatttttaagtgtatagctcagtaggattagcattgttgtgcaacagatttacaaaatgtttttatagtatgaaactaaaattctgtacctatcaaacaacaactctccatttctccatcctcccaaaccctggtcatcaccattctactttaagattctatgactttgactacttcagatagtccatgcaagtggaattatacggtatttgtatttttataactgactgacttcatttaacgtgaagtcctcaaggtttgcatgtcgcattctatagcatgtgacaatatttcctttttaaggcagaatactcttccattgtgtgtatataccacagtttctttatccattcatccattgatgggcatttgggttgcttccacctcttgactattgtgaatagtgctggtaagaacatgagtgtgtaagtatctcttcaagaccttaatttcagttctttcgggtatgtagcctgaagtgggattgctggatcatatggtatttctatatttaatttttttgtggaatcaccatattgttttccctagtgtttgcaacaaaatgttgcaatcctagccaacagcacacaagggtttccatttctttacatttgtgccaagacaaatcataatgtttttaaacaaaaatcaatttgggagggccatgagctgacagtcatcaccacaatacatgaatttgtttaatcgtattgctttcctccttaaagtttgcacttcctgagatttgcactgaggaaagtctttcctcactctttccttttcctcccacctggtggagtcatgtgcccttcttctgtactgtcttcactctgcatctgcatttatttgttacctcttcgggctggagcacagaccatcacagttgactcacctgcaacatcatgaaaggaaaggctgctagccttatggaggaaaccacttttagcgaagatttagggagggtaaaaaaatgtatgttatttttagctatgctgggtgttagatggattacttttaagttgtttttttttttttgaaacagagtctcattttgtcacccaggctggagtgcagtggcatgatcttggctcactgcaacctccgcctcccaggttcaagcgattctcctgcctcagcctcccaaataactgggattacaggcgcctgccactacacttgattaatttttgttttagtagagactgggttttgccatgttggtcaggctggtctcaaactcctgacctcaagtgatccgcccacctcagcctcacaaaatgctaggtaggattacagaggtgagccactgcgccctgcctaagtaatttttatttaagtataatatacatttagaaaagtatatggatcgcaataagtgaacacaccattggaaccacctcccagatagaatgtgagcagcactccagaaacctctagggactatgccagccactacctgttccttccttcctagaggtcatcaccatggtgactttcattcttctcagttgattttacctgcctttgaactttatatacatgaacttatacagtattcccttttttgtgtgtgactgctttcttttgcccaacattaggcttgtgagattcatctatattgttgtgtctgccagcagttcattccctaatgctgctgtgtagaagtccattgtatatctgcactataatttgtttttccattctactgctggcagatgtccagtttggggttgtttccagtttggggctattacaaataatgcttctgtgaatattgttgtttatgccttttgttactatgtggatacatatttctatggggtatacaaacagacttttgtagatgcactggggacttcaccaccatttctgagatttttaatatgagaaaatacatcccaattccagacaaccaacttaaaaattgtcttgcaaaatactcccatttatagttggtaaaaatcttgtatttactagttttaacatttggacaacttcttattatatttacctcatggggcaaatataatcattctttctacaaaaaaagaagataatggacttcaaggttttttaaattgtgaaaaacacactgataaatatatatctcagataggcagtattgctgtcatctacaaatttcattctgccttggataacattttggatatgaatccaggcactttcactattatattcacctagaaatacatggaagtgacataaaactaagaagcataatactagaaataaaaatttttcatgattaaatctacatgattatttctgtaaccttaaagttcacaactataatgcttacttttgtacttttgtaacttttaagttgttgttttttaagaatcttggagttaaacaaaatagcctgttcttaatttcattactatcatcatcatattactgtaaaactttagttttagacagaatagtgggaaagtgctgcgtagaatggtgcccaggacacacagatgtcacctagtgatatcctcggccccagcccccaagtactgccccagcctgcagtgtctttggatgtagtagagaagtgttatcgtagcctgtggcccccacacaagctgtgtttcacttccttctctatggattttcacatcccactaccctctggtagaatacagaggtatgtggtgatacatcttttgtcatcagaaggtcggggtttgaggttaacatccattgcaaactgcatgcaaactctcaaacaaccttaaactctcaactaatctccactttcttggatttaaaacgaaaaaaaataagtcataataaccattcaacagaacctttgtgaagattagagataataccaatgaagtactagtacagttcctgacacacagtgtttgttcaatgactggtttgaaatgcatattgcatcatgatgttctaccaccagcacaaggaccatgtctgtggccggggatgcctggtatcactcctggcttgtacgtcttcacctgagacccagggcagtgagggactcagaagagcacagcgcccccagcttcttcttgccactgtctgcacaccctacactgggacatgcctaaaccaaggatcctttgtgccatccatgaatagtggcagcaaatgcttttccatgagttcagttctgctttccaactcaggcattgaagaactggacttacccttctttattttcagatgtattttatttggcgaattttccctttttttctgccagataccccatttagttttattacaccactgctcagtaatttctgtagcattcttgactttcatgagtttgctgcctgcctctctcctttctctccttcttctcgtctctctctctcctctctctaactttggagagtcagccccactaccaccctgcattcgtatgaatatcttaaattatgcataatgagagtcaagggcatcactaaatacgaaacaccaacaatttcaaagtagataatatcctaagaccaaacaactcattggtttctgttttcaatgcagtattaaagagataatatttctggatatgagtctcattatatagcatcttcagtagaaccagcatctcactttattgagattttctgtaataaaaaaaaatatatatatatatatatatatatatatatatataaaacaaagctgttgcctatctggcaaaaaataaaatagctctcccaacataaacattacattactttctaacatatgacatctgcgcatgatcccatggattatgtctactcttcaaaatccattaaaaccgataatgtgagcaaatctatcaggcaagaagactttttatgttaaaagatcacaatgatgacaaattattttgtgtggaaactttgaccctcttggaatatttattgctgctatgccagagtgtgtctgtcaaacattttactctatgcaaaactaagctcccattattttgttcaaaactcgtgaagcatctgaaaccctgaaaaatgtatgatgtgataagtgtttagcaagtcaaacactatgcaatttaatgcagaatgacacatgaagttatacctttttacatgatgacaacttgtaaattgaagaatcctataacctatatcttaatccgtgaaaatcagagtttaggccgggcgcagtggctcaagcctgtaatcctagcactttgggaggccgaggcatgcggattgcctgagttcaggagttcgagaacagcctgggcagaacggtgaaaccccgtctgtaataaaaaaaaaatacaaaaaattagctgggcgtggcggcgtgcgcctgtagtcccagctactcgggaggctgaagcacgaaaattgcttgaacccgggagacagaggttgcagtgagccgagatcgtgccactgcactccatcctgggtgacagagcgagactccgtctcagaaaaaaaaaagaaaatcagagtttaagaggaattgctggccaaggacaactttagcagggagtgtgactatatacatttatttaaaatatacagggtagatgtcgctatctacctatttttggtatctttcttactatagcatgcttttatatcaggtattattaacaaaagaatgtggactgttaatagaatatcctaaaactaccaaatttttaaagtttagttaattacatatagtagtagtagactttcagtcaactgcttttcagacagcattatagtaaagcagtcattcatccgttactaacatgttctcctctcttagccttacgcatttgttttctatgtattaactttttctctaaattactatattttatccacacagtgttttcttagatttttaaaatctcagaaaatagaatattcctaactttaattcatttatttgacagatacttattgagacctactaggtatcaggcactgtatccttatacaaagttatatgtcttataaatgagatacgaaagtcaactaaaatagtcttaggaaaaacacttcacccagtcagggtatgagggatgcacaggtattttcctgtcagggagaagcattgcagacagaagggactgtttattgaggggtgccgtggtctagtcaggtgactccaaatagttcggtaacctggagtccagactaaataaaatacctcagcagtaagaactgtccagctttgtgccagctctccttcatatgccctgtctagaatcttctggcctacaccttctcacctgagcttaaattaaataaggtggttgtaacaaacctccttttaaaaataaacctaatttctaacaatatcacgtaatttatccaaggctaaattctagactgaagattgaaccaaagtctgactgcatccaaagcccctgctccatgtactgtagcaggtcagtgccgttactttatgtattggatctgaagggctttttgacagtggtagtcatcacactgccttcttattcttcctccattgcgctggtaaattccagtacatacagtaagtaaaataatgtctaaaaatatcaaaaaaaagttctctttcatgatatggtaatatgaccatcactgggtttccctaaaaatatttaaccttccttaggggttagttcctaaactatattctgtgcagcacaaatgaatgtttagtatattaggtgagtatgacagcgacacatttttctaaatagcattgataaattaagaaaaataatacacagggtattcacatttcaaattatgtctggaatttaaaacttatgtttatagttgtatagtcttctagttattttttaaattttttaaaataaagcaaattagtaaacataatcataaattttaataaatgtattaaatataaatttatgaaattattttacccacatcagaaactcacatgaaattacctgacacatgtacatgctttttaatctgtaccattattaaattgtttgtcgtcaattcaaaaattactcatcccaaatttagaatattcaaatttgattatattttgtacagctgaatttcatgtaccaacaaattcatctgtgagacaagtttttgggtttaccttaacgcaaaggtagaggatcatgtctcttaagaatctacaggtgttgcagcaaagtagcataaatttgcaagtgacctgtggtctagtaagtggcaaatgctgttatagggtgttctaccagttacttaaaagatggtgaaaaatggaactcaattagagcaaataatgattgattcctaagagtttcctggtaccaatgaagtgaatagtattaaatcactattgaagtgccaccatattgccctgcattgctatgtaaattatatttgtttgaggaactctttgttttataattttcattgcgcagttatccttggtatttcagaaaatggaaattgtaactttacatatgactcttgttttaaacatgcttagcaattgccgttgtagctgaaggcagcagatctttaaacaacttgtgttctttacccccagcaatgcatctctttggcctcaactggcagctacagcagactgaaaatgacacatttgagaatggaaaagtgaattctgataccatgccaacaaacactgtgtcattaccttctggagacaatggtaagcgaaagaattatgtatcctgtgtttctcttttaacatcccttttccataaatttatttttacccatgcttacatctagtttagatggaacagggaaaagtgttcgaaattacagatatcatctttttataagtttttttcaattaatttacttgaaaggttgaaaattcacatttttattacaggaataatatgattttctgccttctgatttgatggctaggcttttctgcctttcccttctgcagatgtatattgagttttatttttagtctgcaaatagattataattcagtgtatcatctcttgtattaccttgggtttattaggttttcttcattcaacttgcgtgtggagttggaacactgtattaattttattataaaagcatttaaatgcaaagcacattaaaggattatagtttattgaccttttctctggttgccctttctctaaacctttaagaatttgcactttgagctaacaaagattttgaaatcaattggctctgaattaaaaatggaatttaagtagttagagaattccattttttcaatataaacacttagaaaagcgtatacatacatatgtacacttacgttacaaatagttttatattatttctgtgtgtgtgtgtgtgtacatgtcttggccttggtatcctctgactttttgcaaaatatcataatactttatatctcagagcatcctgatgaagacgcctttttctgtcatctggttaataaattatttccctttaagcattcccctaactcgtcttcctctttgtttcttgtctagtatattggtgttcagctttggcattaatatgtctatcctcatgtggctggtttctttgcaagactggaaagaaattattctacatttaatgaacttattatatgttgctgtgtcacatgtacccatttactgggatgaatactttgtacacttttttattcttttttttcctaatgataatactttatgacattctctttctccttagggaggttgaggaattttacgacattcgatttttataataatagtgaatcccccgccatatggaacctttttatataaagttctgcatgttccagaagaactgtaagctggtgactgacatgtcacccacctaaagtagacagtggcagtcactgtagagggggttaaagagggttgaaactatagattgggaaattttaattacataaatttcaattaccttttttatacattaataacatatataaacaaaatgagtaactatacagaaattaagaatatttattttggtttgtattgactgaaatttagactgtctcttaaaatgcatggttcctgtgaagatgatcgaatggtacttattaaccatacatgtagggaacttttttacagactgaagaaattgtaattataccaaagagacaaacgcttattatggatattgtatttattttacaacatcttaaccttttattatgattaaaatgaaaatagagtttggctaattagtttcacagtcctgaaaagcatgatactgagaaagctgtggatttagagactcccacagcctgggtgctgggtgctggctgctggtattttgccagggaatacctctgctcacgtcagcactcctcagctcacagaagcctatattcaaatcctcgctctttcgcctgtttactttgtaactttgggcggcgtgcttggttattcagatttgcaagaaaattttagggcagctgtggaatgggctgcctaggatcctatcagtcgcagaggtttggaagaaaaaagaacatcacatgaatgtggccatattaatagaaatctccgtaaagctggagtccttgaaaacagtggcttttaagctattgaccatgacaatgcaataagaaatacatgttacatcaaagccaacatatacacacacatatacatatgtatctgaaatatgcttcccaaaataatatttatccttgccttgtaaaatgcatcctgggattttccattttattttattgtatttctcatttttaacaaacgccacttgcaacccactaaaataatttcatactttatgaaatattgtgctctgtaatttcagaaatactgctttggtagcctccttctctaagggggactgaagttcccccaagtgatcatagaattcagttttatacagttctgtgcacctttagagcacctgtatatacatataagcgaagtactttcttcctagatgtgtaaaagtctcctatatagggaatggttaacggaagccccagaatcagttaagtgcactagagaactgccaactggactaggggatttgtaggaatttccctgcatggaaaagctatctctctctgggctctgaccttgtccaaagagtgacctaactattagttacttgccttctttattattacttgaatcgcccccaaaaccctaaattgtaaggaattcttgtttctgattttccaaatacaagttcttaatatctcctaaatattgttcttaaagacctggggcacagggagtggacgggaactctatttacaaggagggaggtagctgcaaaccgctgcttttcggctttcgtgatgaacctcagtgtccatgcaccaccacccaccacccactacttaaattttatatgctatccaagaagcagatcacatcatctctttagaaattctaggagattacaacccttgagaaagctttagaattctgaacaaagctcactaggagaatgaactgtgaaaagcatagtgagaaaattatttcacagcttctaaatgtaatactcttacttgtgcagtcctattttactcttattttgtaaatataattctaaggaacaatcattgtgctaagggtgcagtaaactccctgcttgcatttaagttaacagtgagccaaagcttctaaatggtatttagtatctaaaagaaggatttctgttatatgccatcatcctttactgattattcctgagaccttctttgcctacagattttagagatgagttatcagaagcgtagggtcttagacaaaactgatggaaatggacaaagtgaataaagaggtaagaatgaagtttgtagctcaaacactggtctctttccagaaactaaaattattcccctggcccaaggaattcatttagcctaatgtactggaaagaatcacacagttctatactcaaatcctggctccttcatttatttactttgtaaccttcagcatgttacttcactgacctctttgagcttcaatttcttcacatgtaaagagggaataatagtacctatctcctgactttccaaattcaacagtcggcagccctagtatccctctcaaacttctccccaccatacttctcaacaactatttcagatcttcctgctatactcaaacccctctctcagcagatgaccctgcattctattaaaaaaaatagaaacttgcaaggggagctctcattttctgtaaacacatctttattcctccacatatgtggatctatgcttccaccttttctccccatattccaggttcatctttgcgggggtcctcttgatcccattctctcttcagaatgtcctcattctactgataccatccagtcaacatttgaacattccagtctctcacatcttggaaaacaataatctcttgactttgcctcctactgcctctctcttctaccagccttctttttatttatttattttatttgtttatttatttacttattttgagacagggtctcactctgtcgcccaggctggaatgcagtggcacagtcacagcttggctcactgcagccttgacctcctgggctcaagtgatcctcccacctcagcctcccgagtagctgggactacaggcacatgtcaccatgcctggctaatttttgtatattttgtagacagtgttccaccgtgttgcccaggctgccttgaactcctgagctcaagcaatcctcctgcctcagcctcccaaagtgctaggattattggcgtgagccacctcgcccggtgcttccagccttcttgaacatagtgtgcttagtcactttgatcacttctctgccttctgtttacccccttacagttgggctttcacagtacccctagctcatgacttgtcctcctctaccttcaccacacactcatacttcactgaaactgatgtctccagagttacccattgctttgtcagtagcaccagtgaaacctctttattctttatcatgtttgagtttttggaaccatttaatagttaacctatccctcctgttgcaatagtctttccttagcttctgtgataccacattcactttgactttctccctgactgttttggcaatgatgtctctgtttagttgactcacctcccgtctacctgatccctaaatactgctgtttctcaggactctgcgcttgacaatataatcactctggattctgtcacccactttcatggctccagttacattctctgtgcttcctaactctcaaatcagtaagtccagcctagatgtctctcttcagctccagatctcaactacatattttgtagacagtggtggtagtagtagactacataaaatctacccaattgtctttggaacatttccacttgggtgttttccatgcatcttaaactccacgtgtctaaaacagaacccatcaactactttggttatctattactacataacaaaccataacaaaactcagtggcttagaaagcaatgttatcatctcttgtggttcagtgaattggccaggtacttcttgcgttcttacttaggacactgcgattgctttcagatgttaaccaaggttaaccaaaggctccactgagctggaagtccagggtagctcactcacatggctggcagttaatgccatctgttgacctgagctcaactgtagtcaccagctggggcacctagacatggccttccatgtggcttgggcctcttagaacatagcagctggttctgaagaggaatatcccaagagggagcatgccaagagcctgacagaaactaccagctttgtataacctagcagtcgccattctaggctttcactgccatcacattctgctggtcaggaagtcagcaaggtcagccaagattcctggggaggggaattaaactcctcctcttgactagggacctgttatgccattgcacaagggcacgtgggatggaagatgctgttgtggccatctttggaaaatacaattgccaagccatctttctttccaaatttgcctctctttcagggatttctgtacagtaccttcccacatccccccctccacagttttgctttttgtggttttagttacctgtagtccactgtggtctgaaactattaagatactttgagagagagagagagacagaccacattcacttaactttcattgcagtatattgttataattgttctattagtatctttttcttgcctaatttataagctatcataggcatggatgtataggaaaaaatatagtatatatagggtttgatattatccacagttccaggcatccactggggatcttggaacacagaccctatggataagaagggattcctatattaggaaatggcaccgtcgttcacttcatcactggtccaggaggcccggtgactgcttctactctctcatctcccgtatttagtcagtctctaagttccttcaactctgaccccataatatcttttgaatcctgttttctctcagctggatatggtagccttctatctgcgctgtatgtctccagtcttgctcatccactcttcacacacaaatttgagatatcagttccttgcctaagccccttcagtgacctagattctagtcagaagcctttaaatgacttacaaggctctccacagcctggctgtacatcacaccatactgcaatataaaaacaatagcacacagagacaaggagtgtagagttacgagcctcaccacctgatgtggtgtcctagttctgatcattaacgcctgtgctacttgggacaggttatatagcttcattgtgcctaagtggtctcatcaattaaaagggactaatttacttcatagaatggtctttggtcttgaatattcaatgcaaatatacaaaggtgtaaacatacaatggtgtatagtacatagtaaatgcttgaaaaatgtttatggttgtcactattactatttaatgcatctcatctttactagactataaggcaaggatcctgtctgttctttcactgctgtataccaagctcttggcacagttctggcatgtagtaggtgctcacaaagtatcagttgaatgaatgagtgaaaataatacaactaaatgatatgatataaagtatacgaagggccatgcatcaagtatatgcaaagtactagtatagaatagtggctaagaactgaagctctgccactcactgggtgcctttaagcaaattaccactctcacctcctgtttctttatagggtaatataaaggtttacaatgaggtttgaatcaggtcatgcatgcagggtgccaagcaatgattggaacatgaaagctattcaatgcatatcagtgattgtttgctcttcattctgcaattcaagatgatgcacttgtaattcatagcaaaattttaagaagacacttctgcaaatcagcatcggtagtatcctctaaagcaataatggaaatccccatcattcgttatttatatttttagttatttgaattttatgaaagaaatattatcgtgtattttttaatgcatagaatttattcattttacatttgtctaatgagcacttatgatgtgccacgcactgagcaagattctgggaatatagctgtaaaagcaagatgatcacagctattgtttccagagcatgtgaattctaggctagatgggaatcgagcgagttattacagtgaattagaaaatctccgttagggaaaagcggagtgtaccctgacagaacatttcaacaccagcttgacttctaaaggggcagtaagacacatgcccaattttagcctaggataatttaggataataaagactgaaataaaaggctatatattacaggcaatgtaactatggcaagtgacttctccaatcaaaagaactctttttgtatggatacgagttgaaaaactacaaatatgtgtgtatgtgtatatatgcatatgatttatgctgcttaaacaaaacaattccaattgcttttaaattttaattttttttttttttttttttttttttgagacggagtctcgctctgtcacccaggatggagtgcagtggcgcgatcttggctcactgtaagctccaccacctgggttcatgccattctcctgcctcagcctcccgagtagctgggactaaattttacatttttgatcatcgtgtatcaactttctcaagtactagacaactctagagagttcagtctgacagcaggttgcagattccctgtgaattcgagaaatggagctgacagggctgcaagagcactgagttttgttcaatagtgttcatagtacttgtgttattacaatgtgtaatagctccttaattagatgctatattgattttgtccattaagctatgtttgcaaagtagttatgtcttatttcacttagcttgtgatgtaacactctgtatccacaatgctaaattatggcatgcggttgtttataaaaagatatgttctctcagagatctcaaagccagggtatgaatccaaggttaggtcatagaattggagggtgggctactgattgtctacaaatgcccaaccttgcttcctgacgtcttaattattagtgcctctgtgggatttaagatgatattatcatttaccttccgcaacaattgcagttagactttgacagtgaatttcttttctgcctttccgtttcactcattataggcttgtttactcacatcataggcaggtggcaaattcatgatatatatggcagaaaacttagcattttataattttcactgatttttctgatagcacaaaatagttttcaaacagataccaaacctcctaattaccaatatgactttaaatcttctgttttgtccttacagcatctcggttggtaaactattatttataaagtgtttttcagttcaaagtacttttgaaaaggcattatctgaaaagctgtcactccactgatgtgttttcatatgaactgggtatcacataagaaggagaggaataacaatagctttgcgtatgtggtctctctctgttttcacactctgacaactgtattttaagacattaagactgttgtgacacatacttactgatgaaagaaaaaaatcacagttagtaggtgaaaagactgctagtggctcccacattcaggcacaacaggacacgttgaaaaaaaccttcaagatgataccctattgtgtttgaagacgtggtacgtttcactcttactgtgaaggctttaattggtttgattcctaacccacaagctttgagtttagaataactacagggcactctgttgccctgtctctattttttcctccagttttcctccttttccttttagtaaaacctacagacaaccttagtgtttcctatgatcattcccaggttcaggctctagggctttatggaggtagtgatctcagtaagggaggatagagagccctagaactggcctttttttatttcttctgaagccaaagttttctggaattcgggacatgatgaaagacttctgtgtccaggcttttatctaagaggactgatgagcttcagaggaaaaagttgtgcaagtatttacaagtttatcaaactgtgtcaatggcccactgacttccaggtgtgtttaccatcaataaagagcatttgaaaatgctaacaggaatgaacacacttgacttgtccaaatgagagaatggctgtgacttgaaaagcagcagtgcagaatttaaagacaaagccccttcacgaaaccctagtcccctgtattcaaactagaggcttaaacaggaaggctgtactaatctaagctgccgtttcagtggatcttgcagagaaaaatcagtgatgtccttatatctctacatcactgattagaaagagaggtcagatctgcaagtaccttttagaaaagacacattctaagactgtaattcagaataaattcattctaactagtgtaataacttgaagcaaatagaagttgacaggcactttagagatgagattcatatttcatgggaaaagctagaatagatcagtgggcttcaaactattttgtttttgtgacccccttcaacaaaatagctatacaaatttaaatttatttattttttgagatcatacgttttaaaaaacctgttttcttctatattaaattatacttacaattattagttgtacacatttgactgaaaacaacctaattcttatataaatgtgttaaacatgttgataatttgaaacacaaaaagtgaaaatgtattgaaatataaatgtgttaaacattttgataatatgaaacataaaaagtgaaaatgtattgaaagtacctctctgaaatgaatgggaacttttttcaaatagtttgtatattcatagatgaatataccttataagaataaaacaaaattcagtttcatttctaatcctgttttcctttcttatgaatataaacaaaagaaatcttgctacaaaataagtaagtgacaatgggaggatttttttaagtgattctgttcagttatttgacattcttgttagtcatatgtcaaaaatcacattgtgatctatttctaaaaaatacgttgtctataagctgccagttctatcacatttctcataaaagcaaggaatcagcaactaactactttgaaaaagatttattacactgtttttagaaccaatccttttcccggtttctgtgtaggatgccaaaaaagactttaccaaggcttagcaaaatactgctaattttacctgttattcttctacttagtggtactttgtttatctggtatactcagaatgcggtgaaaaatggaactttggctcatattaattcacctttgatactataattttgtaatgctttcatcgtattacaggaagatcttattttattacgctttatcatgcctcccagataccgtgttttttacaaactgaatgtttgtggcagccctgcgtcaagcaagtctatcggcaccatttttccaacagcatgtgctcacatcatgtctctctgttgcattttggtaattctcaaaatatttcaaactttttcattattattagatctgttacagtgaccttcaatcagtgacctttgatgttgctcttataattgttttggggtgccagaaaccacacccacataagacagcgaacttaataaatgtgtgtgttctgactgctccgtgaccagcatccccaccatctttctcttcttggacctccctatttcctgagacaaaacagtattgaaattaggccaatcaataaccctacagtggcctctaagtattcaagtgaaaggaagaatcacacgtctctcagtttaagtcaaaagctagaaatgattaagcttagtggggaaggcatgtccaagatgagatcggctgaaagctaagcctcctgcaccaaatacttggccaggttgtgagtgcaaaggagaagtttttaaaggcaattgaaagcacgattccagtgagcacatgaatgataggaaagcaaaacagccttattactgataaggagaacatttgagtggcctggatagacgatcaaaccagatataacattcccttgagctaaagcctactccagagcaaggctgtctcttcaaatctatgaaggctgagagaggtgaggaagctgcagaataaaagtttgaagttagcaaaggttggttcatgaggtttgaggaacgaacccgtctctgcaacataaaaatgcaaggtgaagcagcaggttctgatgtataagctgcagcaagttatccagaagatctagctaagatcactgatgaatgtagctacactaaacagattttcaatgtagatgaaagagccttagactggaagaagatgccatctagggttttcatagctagagaggagaagtcaaggcctggcttcaaagcttccagggacaggctgactctgttagtgatgcagctggtgacttgaagttaaagccaatgcttattgaccattcctagaatcctagggcccttaagaattatgctaattctactctgcctgtgctctataaatggaacaacaaagcctggatgacagcacatctgtttacaacgtggctactaaatattttaagcccactgttgagacctactgctcagagaaaaagattgctttcaaaatattacttctcattgacaatgtacctagtcccccaagagctctgatggagatgtgcgaggaggttaatgttttcatgcctgcaaacacaacatccactctgcagcccatggatcaaggagtaatttcaagtcatatttaatttaatttcaactttcaagtcgtatttaagaagtacattttgtaaggctatcatagatagatagtgattttcctgtgatagatctgggcaaaatcaattaaaaacctcctggaggctgggcacggtggctcacacctgtaatcccagcacattgggaggctgaggcgggcggatcacgaggtcaggagatcgagaccatcctggttaacagggtgaaaccccgtctctacaaaaaatacaaaaaatttagccggacatggtggcgggcacctgtagtcccagctactcaggaggctgaggcaggagaatggcatgaacccgggaggcggaggttgcagtgagccaagatggcgccactgcactccagcctgggcgacagacagagactctgtctcaaaaaaaaataacaccttctggaaaggatttagcattctagatgctattaagaacatttatgattcatgggaagaggtcaaaagactaacattagcaagagtttggaacttaattccaacattcatagatgactttgagggttcacacttcaatggcggaagtaactgcagatctggtggaaatagcaagaaaactagaattagaagtagagcctgaagatgtgacaattgctgcaatctcatcatgaaactttaatggacgaggagttgttcttatggatgagcaaagaaagtgggtatttgagatggaatttactcctgatgaagaagctatgaacattgttgaaataacaacaaaggatttagactatcataaacttagtagataaagcagtggcaaggtttgagagggttgactccgattctgaaagatgttctactgtgggtaaaaagatatcaaatagcatcccatccttcagagaaacctttcatgaaaagagtcaatcaatgtggcaaacttaattattgtcttattttaagaaattgccacagacactccaaccttcagcaaccaccaccttgatcaatcagctgccgcctacactgaggtaagatcctccaccagcaaaaagatgatgacttgatcagatgatcggtagcattttttagcaataaaattttttaaattaagtttgtacgttggtttgtagaaacctattggctgggcacagtggctcatgcctgcaatcccagcactttgggtggccgaggctggtggatcgcttgagtccaagagttttagaccagcctagacgacatgttgaaaccctgtctctacaaaaaataccaaaaaattagccagactcggtggtgtgcacctgtagtcccaggcacttgggaagctgaggtaggaggatcacctgagcccagggagattgaggctgcagtgagccgagattgggccactgcactccagcctgggtgacagcttttgagaccctgtctcaaaaaaaaaaggaaataatgctattgcacacttagtagactgcagtatagtgtaaacataacttttatatgcactggtaaaccaaaaaatgtgtgtacctcactttattgtgatatctgctttattgtggtggtctggaacaaaatgtgcaataggtatgcctgtatatgctttaaatgtgtctatttcattagctcatttaatttatgggaaatagccaccatataatttaactgtcagagccagtactcattgaaatcaaagttaccatttttttgttttgttttgttttgttttgttttgttttgagatggagtcttgctctgttgcccaggctagagtgcagtggtgtgatctcggctcattgtaacctccacctcccaggttcaagtgattctcctgcctcagcctcccaagtagctgggattacaggcgcccgccaccacacccagctaatttttgtatttttagtagagacaggatttcaccatcttggccgggctggtctcgaactcctgaccttgtgatccacctgcctcagtctcccaaagtgctgggattacaggtgtgagccaccacacctggcccaaatttaccttttgtcagaaaaagtctgacttattttttcagttcgaataaattaatctacattttgttagaacctctcagttctgaatccctgctctaggtagagaggtagcaagataaagcacaaatccttgtcctaaccttgacaacgggaataaataaagcatcattacatttcatgtttcttaccttattgctgtgttcttggtagtcatgaaattcttctgcagttgaaaagcattctttgtagaacacttggacacaggaaggggaacatcacacaccggggtcacacaccggggcctatcatggggtggggggagtggggagggatagcattaggagatatacctaatgtaaatgatgagttaatgggtgcagcacaccaatatggcgcatgtatacatatgtaacaaacctgcacgttttgcacgtgtaccctagaacttaaagtataataaatacataaatacattaattaattaattaattaattaaaaagaaaagcattctttgacagtagttggggtgagtgataagttcattaaaaaggttatctctctttcttgatgtatttgacttcaaagcatgctagtagtcctaaataccccattgttaaccccacattttgcccttaatggaactatgttaagcagggaaagtcgctgaagccctaccttgggtttatggtgtcttcaataaaagaggcttcaccaccacaatacttttaattttgcctttttttggcatactggaagttttatgctccaagacaataagtcatagtaatatttgggtatgtgagaggtacgcctttcttttgtaaagaaagtcaacacatgaatgttattgagggtctattaatagaaattaatctcctaccccgttccttattgaaaagttttaatgtttcctagggatatggctacccttttttaaagacccctggactagatgacccccacgggtactagaactcgaagattctgtggtgttatgattaattaggtattttttcgttacgggaggaaaaaaatcatcacaattgctatcccattcaagcacactccaccaatcttggatcttttgttttacaaatgaagaaccctctttttctggaaaagaaccactggttaaattacctatatatgggactaacaggataaatagatatacttcgcgacacaacgatgtattcacatatcatttctgtgagaaagattttaacccctcaaaattaatttgtggagaaagaaacaaggcaagaatacctagcttattaaatgcctttgacatagtgaaaccggaaaccctagaaatcagaacttggttaccattaccacagctaatcctcttgggtaaacataatgttttggaaaaaaattctgaaattggcaccagtttatgaatttatgtttaccagttctcaaagcacaggtatgctattaaaactcagaaaaccattaatagcagcaatagggtcaacccaagagagtagattaaattacatatgcttcggatagtagatgaaacttgttaatgacaatcaagtatcatagccttagaaatgtatgaacttgatgaatgagtctacatataaactatgttcatattaaaatatgatatgtatactgacatcttagaggggaagagaacagctactctactcagtactttaaaattagtttcatgtagaagtcaaccaaaagacaaaaacttatgaggaacttatgaattataacataaagagtattatattataatatccatgtcacgttttttttgtttttgtttttgtgagatggagtctcactctgttgcccaggctggagtgcagtggcgcgatctcggctcactgcaagctccgcctcccaggttcacgccattctcctgcctcagcctcccgagtagctgggactacaggcgcccgccaccacaccgggctaatttttttgtattcttagtagagacggggtttcactgtgttatccaggatggtctcaatctcctgacctcgtgatccgccctcctcagcctcccaaattgctaggattacaggcgtgagccaccacacccggccttccatgtcagttttttaagttttatcaatataaaacttataaaaataagtataaactttatgtcctgacattgtaagtatattctctagggtggttcagtgacttaatatatctgattttatatgaaatagacaaatttaaaacttagtaatttaaaataatatttttgttttaataaaaagcaaagattttattgaggattatatacaacagatggttttggaattctgcagaccttgatttcagtcttgatgccatcactgactttggccacatcatttacttctctgagccttagtttcctcatctcaaaatgataccaacctcttgggtgaaactacctgtcatattgtaggttctcagtgaagattagttccatttctctctcccctgaatcttctcagtaaaagctccttcatgacaaatgtaggttcctttgcagaagcttcctaaatgaaaagtagaaattggtctcagataattaaaaatttctgagtaaagcaagacgtctgtttagctagaaagcaaaataatctctgggtggtagcattatacatattttttctctctttatttaactgtatgttctaattttgctgaaatgaacaagtattactattgtaaaataaatactttgaatcctatgaatgatctacagtttataatctaagagttgatgtgtggaaaaattatagtgattactataactcaatttggaaattttattccttagatccttttatattactgaattggttcaagaaaaatagacctgatagctaccatgattgtgaacactgggaaagaagagaggaagggagattataaataatgcctttttattgagttttctagtacaaccctcttctgcctcatacctgggttattgcagctgtgtcctcactcatctcttcatgtccaggcttcccacagttactgcacagtaatgctcttgaaacagtgatttcatttcacctctagcccgctcagaacctttaatgggtctccatttagttatagctgtccttcacaactgatggtacgtgtgtcatgtaggatgcagtagtccagatggaaagcaattctaacatttgctagtgatgtactctccctcaaacctcacatttatctgtaagtgtgaattttttgtgaattgcttcagatcctataggccataaactgggtctgtgattgcaggtcatgttccgtagtaatcttcaattctgtttctcttgattatatacacacaccccaccaccacacaagaataagtgtgtttgaggcatcgaaatgcaatttacccataatcagtcttcaagtatctgtttgaaaaacataccataaatgacatgcacagtaacagaatactagtaaatatatacatcttcagggaaaagggtgtaataacactcttgatagagtgaaaatacaagaaatcactagcataaagtataaagaccatattctttaacctggtattcaaggccctccacagacagatgccacgtcccttcccaaccttatcccgcatccctcccacgacaaacccattcagtacctcctgagagccagacgctgcagcttgcccttgatgcaccaaacctcatggaatccttgtaacggtgcaatcattatgttactctccccattttctaaatgaggtttagtatcttccttaaggtcacacagctaattgttggcagagccaggattcaaacccaggtttgtctgactccaaaacgggttttctttatcttgttttctggccagatggatttctctgctgagcctcaacctaacacctgtcaagttccacggccatgcttgtgatagcgatgtttatcccagctcagaaaccttatcctacctgttcctcaatgtttaccaccaaacttaactcctgtgaaatctctcaacctccagcctgcagtgatagtgcctttctctgacccctactcatatgttgctttagggtctcacttaatttatcagtttgtgggtgttgtctccccacccaggtaattactacttgatagcagaagctatggaagtctagataatctctaagattctactctttggtttatatttctttttttaagtcacctacagtgctgccgctagcagacactcagtaaaaatgaactcagagttaaactaataactcttcacagatagttagaagcctgtctcccttatcactgagatgagatagcttacagctcagacttaaaatcacttcctctgcgttttgaattaacagtttaatattttttttaaaaaagacaaagttggtagtaagtcaactttgttatcagtttttttttaagagacgaggtctcactgtgttgcccaggctggactttaactcctgcgctcaagtgatcctcactcctcaccctcttgttgttatcagtgtaaaagggctgaattgatagaagataatttgcccagttccattctgttcctcagccttctggacccgtctgcataagagacaatgtagttatatttccactcacggcaaattgcagaaattctaccatgacccccatcagaataactgagaaagaaccttggcaaagagggaaaagaggaacatcgtaccaaaaagaggagtcttggatctgttttctagaaggaggccatgcaggaagagaagagatggtgtctcttaacaggtggcagagatccagggagaaaagaggttttgttcctatgcatcaaagatcagtgtggtcagaagtaacacagtatgtccactaagactacaagtgagtttgaaatgaggctcaaaagaaagaggaaaagttataacagcctacacaaaagctatgtgagcacttaagcttacccctccttcctttcccctcacaatgccccaagtaccccttctctatctctctgccaacatctgatgtttttcattcatcctagtatatcatttagatagaaccacatgaatccgagccatcagttggttttattgtttgcttaaggattgatttagaaatctccataatccattctgccttaatttacactttgcagtgttatagtatgtttagaatgactgataagtaccagaccctaatctctcccaagaaataacaagactcataatttgtaagataattatgtttcaagtgaacagaaagactgtaggtgtgaaaacagctttagtaatgggcataccttgggggaagtcaaaaggattttaacttaaatatcttacgagctaaatcagaattagtaaaacaccagtatctaatagtagaagcttttaaagtgcaaattttatgaaagtaatatatcagaagatgaaatggcttgagcatttggtaaaaataactttttcaaaaagtttaaaaaccttttttgttttgtttttttaaaaaaaatttgttcttcatcagtgcatctcttacattcaggaaaattaggtggatttacgcaagaaaataacaccatagattccggagaacttgatattggccgaagagcaattcaagagattcctcccgggatcttctggagatcacagctcttcattgatcagccacagtttcttaaattcaatatctctcttcagaaggatgcattgattggagtatatggccggaaaggcttaccgccttcccatactcaggtaagactaggctttcttatcaataaaataaaaactgccagttgcattttttgaaattattctctttcttaagctcagctgtttggttaactgtttgacgacttttgaatcgactttctacagtagaaagagttttgaatgtagattacttgttctgaggtttttgaatcagtagtgggaagaacaatattttcttcctgatttgactgtttaaaatgtactgaattttgtgaggaacttaatgaatattgagcatcatctgagcacccagtaaaacaccatggattttccaagtgttttacaaagattctatgataatttccgatgatcttattcctttcatgtaatagatgcataacatattcatctctaacacgtattcattctgttgaaaatgtatttttttagtttatgccagatttcctcttagtagagaaatgatgggaacatcaacataaatatgatgacatgagctttatcaactcaggcgccgtgcctcatctaaaatgatcaacgctgagatgaagaggcaagagagctttcagagataaccaagtatgatcatgtcagtgtggtacacaagacaattcacatatccttaatatcaaagaactttaaagtcgtttcccttgcataaaaatcccctcacaacagcaatcacagatggagaactgctggcaattccacagcctttttcataatctaatacagtaccgggtcatagtatgtaaactggaaattgtcgcttaatataggtttcatcatctctaagagaagttatttaaattacctaccataaaattggaactgagactttccccaagatcaactattacgttagtacatagaggaatatcaaaaatgtaagagttgattcattaaaattgacagtaggatgagcctaaagttatattcaataatcagtttatttacctagagaatttcatgctgatttagtgtgacttataaaataagggctggagagttttcatgtatgctttatatcatataattttgtgagaaatattttttctataacctaggaacataaattatgaagaaaagttatcacatattaataaagaaattatatctttaaaggaagatgagtaagaagatttcaacatgctttttctaatgtaattgtggatttagttcatatacatatattaattttatggctgtgaaatttctgaatatcaggctttagtgtattcatttttcctatttaatatttttaatatctatattattaaagtaaatttgatccttatgcattgtatacttcttataatgtactaatgcccaattttaaattttatatttttgtttgtttgttggggttttggtttttgtttgttttgttttttgtttgagacagggtctcactccgtcttccaggctggagtgcaatggcacaatcttacctcactgtagcctcaacctcctcggctcaggtgatccttccaccccagcctcctgggtagctgggactacagatgcgtgtcaccgcccccggctaatttttgtattttttgtagagatgtggtttcaccatgttgcccaggctgctcttgaactcctgggctcaagcaatccgcccaccttcccaaaggactgggattacaggcatgagccaccgcgtctgggctattttattttattttattgtttgagatggagttttgctcttgttgcccaggctggagtgcgatggcatgatctcggctcgccacaacctccgcctcccgggttcaagtgattctccagcctcagcctcctgagtagctgggattacaggcgtgcaccactatgcccagctaattttgtatttttagtagacataggttttctccatgttggtcaggctggtcccgaactcccaacctcaggtgatctgccctcctcggcctcccaaagtgctgggattacaggcgtgagccaccgcacccagccagtctagaccattttaaagtttagatttgactccagttcatcttataggtgacactgactaggatataataaccagattttcttaaggctaggcacagtgacttaggcctgtaatcccagcaccaggaggccaaggtgggtggatcacttaaggtcaggagttcaagaccggcctgaccaacatggtgaaaccccatctctactaaaaatacaaaattagccgaacgtggtagcgcacacctgtaatcccagctactcaggaggctgaggcaggagaattgcttgaaccctggaggcaaagattgcagtaagtgagagatcgtgacattgcactccagcctggacgacaggagcaaaactctgtctaggagaaaaaaaaaaaaagcagattttcttaagtggaagtcctctataacttcaattatagtagacagattggatttatagcaattgtccagtgaaatatgaaaaaatattttcccactgaaaccgcatatgtgattatttgtgtataattcaagaaatatacctctaagctgagcacaatagtaaacatgtaacttacaaattctagaaaataatttcaggtaagaattgtctattgtgttgtgtacttgaaaggtttatttaaagatttagttgactgcaagttgtatataacatttaagattagagaaatgaaaggtgcagtttcgggttttctcataatccttctagtatttaaacacaatacatgtgatatcctcttttcttttctaccacaatatatgtgtttaagtaggttatgcattttcttaagcttcacggttattatagtttcttcctgtggtttattcaagatcagcagagcaaacaactgtttctgagttcagtgtttaaacatgaaatattgtataaggcagcccaaattgaacatttctctgtttctggagaacattaaataaatcaacctgaaataattaaaattggccagccattcagaatagttgcttgagctttcgcagtctttgtgaccctttgtaaaactgcccgtttgattgttgccaaggaatcagtgggctctcttctccctgatgccagttcattctcctggtcagttagtggcctcaggagtcaatgcagagccttatggtgaagtatactgtagcattttagtgcattcacatgaaggctgttgtcgaataggagttggaagcctgagttctagcataccctcaccaccttttcactgtgtgaccttgcagagtcccttctctgagccttagtgtccattggtaaaatgaaagagttggatcagatgatctgtaaaatctctttagtctctatattccaattacagcaagactgtgccactaccaaagagttgatgtaaggacacagttaagtattcatagattctaagaactcatcgttttagtaacggaattgaattaaacatataatctaacttcagaagtgaactaccaagataactgaaacaaaatctatttgtttttaaatggtctattagataatcagcataaatacaacaaacatgggcaaacttttcttctattgattttccaaaagacggcttattaatacattgtagtttaaagcaactttaaatgaggatttttaaagcgtgtatatttggtaatattaaatcgtaagaaaatgacctttaaacggagctttcacactaaaattatctcactttatatgaaacctgtatcaagtataagctttgtctcacgatggctcccgcggactagtgcaattgaagagttagccccaagaatttcttcctaaaaagagcataaggtcctaagactcctcttctccccaaaaatatatctgcatctccatcttagaaatattacaaagcaaaactcacatttgcccttaagtgaccactttatgccctaagaacaaagattattaagtatttttattccttgtaatttggtaattttgggcaaagatggttttagtgttaaagtagggaactttttttaggtatttgaatcgccctcctgaattcatgtgcgaaacacttctgcagatgagcctagaactgggtagatactcaaaacctgtcagctcctcctccccaccatcatgcccactaccctggccttattttattgttcacagtgtgatgcgaatggttatttctatgataaaggtgatggttgtgcttttgccttgaaagaccagctaaaactcaaaattcctcccgttcactttttcagttaccgtgtttaatgttagggaagaaaaatgtttatatgcttcggtcataaaaagaaactttttcttgtctctttgccatgcaaatgtgtaaatatttaaacctgatgaggaaatgaatggcttatttgagacagagtcaccattcaaaactgctgaattaattttcctctgacaattctagaatagaattccagtcaaattttataggtcatgtatccacaccagtcagtattttcatccttataaggtataaatgaaaataaacatttttgactgctgatcaggttatactgtttttatatatttctcacagctgaattctgttctgatgaaactacacaaaagaacaaaaaaaggttttacttataaataaaaattttagtaagtcagaaactgaattagatactctaagttctctccaatattaacagtagaggtctatggtcagtaaaatggcaatatatttaactgtgattctcagaaattccaacaactgattttattccagtttgattggattaagagattcatataatctttttcttaaataggcctctgatgaaattccatttaagaaacctatcagaaagtagaatatttatgatttatatatgcagtagtataataataattatttatatatagtactatggcatatgtttcaccataaacacacttcaggaatagaatgaaactaggtaacattctatagacactgaatcactctacttttaacaattgtaatctaaaaaactccttgaaactacattggaaagtcttttcagtgtctttcaaattccctgtattatttctagttacaaaattttaccccactatattaacaatcacattttatacttttaattcttttttaaactctccagtcaccaatgttcatgtctaattttactacaacaaaacttaggtttaatgatgacccattcataagaataatcaggcacgtttactgttactgccatcctttcagaacccctccattgtttaactgtttagatcaaagatgtaaaggcatcttgttacatgtttctaatctaacaataactaagtaaagcccatggcgttctccatggtgcttgagatggtcacatcagggtcacaagagaggtggagtagggtgggaggaatgaccccacttggagcaaagtgctcttgagttcacaagccaaccccaccattaccagatgtctgagagcctgctaccctcctcaagattcagattccttcacctgtaaagtgcaaatgttaaagccttcctacgagggttcctatgaggaaccagcacggagtaaggattcaacagtagttgttgctacatgaatgttaaatcagagaagactgtacagggttatcttgtggtctaactaaaacaaggttgctggcaacatggatggaactggagctcattgtgtgaagtgaaataagccaggcacagaaagtcaaatactgcatgttcttgcttatatgtgggagctaaaaaagtgaatgagcagaaagaggagaatgatggttctcagcaaactaacacaagaacagaaaaccaaacgccgcatgttctcactcataagtgggagttgaacagtgaggacacatggacacagggaggggaacatcaccccagggcctgtcagggtgtcaggggctaggggagggatagcattaggagaaatacctaatgtagatgatggattgatgggtgcagcaaaccaccatggcacgtgtatacctatgtaacaaaccagcacattctgcacatgtaccccagaacttaaaataaaatttaaaaaaaagaaagagtagaatgatggataccagaggccgggagggcactcaaaatacgtacgactattatatatcaattatgaatttaatgcattaaaaataagcctgctggattggaaatgtcagttcatgtagattttatgtttgtatccccaaactgcctaaactcatcaaacttttgatcagtcagtagaattaaataaatttggaaaccatattgcccaataagggaaaaaaatggtccctgatgtttgaatccagccctgtgtggcgaatagtttgcgtcctccttgtaaatgctatgcatgggagacttctaccatttggacctgtcaggaacttctttctaacattgtatttgttagagcaaaggaagacagattgaagagaaaaaaaaaaagagagaagcagccaccctttatctttctgactatttttcctcgtcctccccccagtatgacttcgtggagctcctggatggcagcaggctgattgccagagagcagcggagcctgcttgagacggagagagccgggcggcaggcgagatccgtcagccttcatgaggccggctttatccagtacttggattctggaatctggcatctggctttttataatgatgggaaaaatgcagagcaggtgtcttttaataccattgttataggtaagaatagtcttcaaagcagcattttccaggctatagcctaaacgccgtgtttaataaaaactaaattatctgtaccaatttggggtaattcctagggtgttaaagcccaggtaaaatgtgagaattatttttaaacctttatttgggaatatgtgacaaactgtgaagcactgggagaaaatattttctggaattaccttgggagaggagaatatgtcatgaaacactttgaaaatctgcatttgaagtgacagtgctttgctttactactcaaattatctagcataaatgaagatcaaagtgataccgtttatcttttgcaagaggcaggctatacaacaagtgttccttctttcctttttcttcagagtctgtggtggaatgtccccgaaattgccatggaaatggagaatgcgtttctggaacttgccattgttttccaggatttctgggtccggattgttcaagaggtatgcaagttagattcttctcttaagccgatataaataagctgtagaaacacaagtgattccaaaaactaccgagacaggaaagaaagggggggggagactggcatattgcttgttccagcgatgtgtcttttctttcggaagctcggtggaaagtgtggctgtaattcttctgtcgtgtcttgtttcacagccgcctgtccagtgttatgtagtggcaacgggcagtactccaagggccgctgcctgtgtttcagcggctggaagggcaccgagtgtgatgtgccgactacccagtgtattgacccacagtgtgggggtcgtgggatttgtatcatgggctcttgtgcttgcaactcaggatacaaaggagaaagttgtgaagaaggtaaacatgtcaatattcacagaagtctgttgttatcttcataaagaaacagattgtatctgtaatctttagttgggcagatctcttttatacgcttccttttgaaagcaattttgaaaaatccatgtttatgaatgcattgttttactaacattttaactaataaaaagaacaagcaccaaagggcccctttgctctttttcagcactgtgaatcattccttttcttcactctgagaaagcaagcaaacctttatgccttgaaactaacagcggacggttgattttatttttctttttatagttttttacattgatgccagcttctaaatctagcattttgacatctctagaaagacagagtagtacacataatatgctacctaaaagaagtatgacatcatggatgtgttccatagctgtatacgtataatgatgagagtcgagataccatactgtaaagtgcaggtgaattgttttttcagaaagcaaaaaagcaccatttccattcttcaatcaaattgattttattgatctgcacacacaaagtaatgcaattaagtctctggaattaaattttcaggccattgaccctacaagtgtaaagttttattgagtcaaattgctaaattaaatctcgtcatctaaagcacattgaagtgaattaagaaggatagagagtatgcaactcatttatttctcaaacagtgtgaggatcccatacagctgtcagtactcagtggtcacagattttgttatagagaaggcaatacttattactctgtgattaggcagaacagagagcaatagtctgaaacctcaagagcctgtgtgtgtaattcaggaaaattacaaatccttgcaagagtctcaattacctaaatggcattaggctggatcttaatgctttattgtattataattctttgcattttcagaaacaagttcttgaaaatggtagataaatatttgattttccaaaatgttcatataaattagattaggatttaattcttttttctgcatgcactatgatatcttctggatttaataaaattgttcttttctttacaccagctgactgtatagaccctgggtgttctaatcatggtgtgtgtatccacggggaatgtcactgcagtccaggatggggaggtagcaattgtgaaatactgaagaccatgtgtccagaccagtgctccggccacggaacgtatcttcaagaaagtggctcctgcacgtgtgaccctaactggactggcccagactgctcaaacggtgaggttaataaatgcagtacaatcgagttgcttaatactgtttggctaaagatgatattttaatctttaaacctccctttttaaacctaatacaaattttagtaaagtgattctttatggaaataaatattaaaagtaatgatatgtagttgccttataaaaaagaaggaaccaggcttagccagtttgtcactaaaatttcccctttagtattatgcggagactcatctttcatctgcatgagataccatatcttcttaactctcaatttatggaactactaaccaaaactaacctctctaaaatcttaagtatagcttggggatttaagcacattatcttataaacagggaaggctcaatttaaaaaaatcatttgacaatataaggctaaacatcacagtaaagagtatacaggtatagacattatgatatgaataaatggttcaacactgagtttttaatcataataacatggttataatagaaataagacaaggtaatttcattcaatcagccaagttgttattgagcacttactatgtgcatggcattgtgataggccctgtaagactgaaagacttaacaaatcgtgtctgccctctagaacaatggctttctaattttttgaccttgaactatcatcatgacctagtataagtatacatgcacatactcacataattgaaataaacattttacaaagtgatacacgctgatttttttcaagcctattttatttttttcaaatgttggttgcaactcatgagctaattccataactcataagttatggtttgagaagatgccattctagtgtggaagattacagtttatttagggagataagatgaatacatatgaaaaattctaaatcaatacatcctagtttaatactatattgagtgttacatggaatattatgctaaattcagtggacattcagaggagtgattctaacttaatgagtattcagagttttcaaggagacttgtattaacatttctttatttaatgatggtggtagtctgggtaagggtataatttttggctaggtgaacagtattagaaagtacttaagagcatggactgtgaaatcagatgtgtggattcatatccaatctgtactccttaagagctatgtgatcttaggcaaattactatatgcctcagtttactcatctgtaaaatcatgggacactcttcacaaagatgctgtgggaattacttggaataatatatataacatagttagtacagagcttggctgataataaattctaaagatagcttccaccaccatcatcactaccatagaacatccctaatctgaaattcaaaatgcttcaaaattcaaacctttctgaacaccaacatgatgctcaaaggaaatgctcattgcagcatttcagattttgtattttcagattagggatgctccaggggtatttattctgcaaatattataacatctgaaaaagtttaaaatccaaatcacttctggttccaagtaatttaaataaaagattagcaaagatgcaattgtgagaaatatcattatattcaagggacagtgaaaagaaaagtatttggaggcaaaaaaattggattgggcccaattttggggagtatggtttagaaatgatagttttaggcaatggaggatttatcgatagcaataatttgcccactaagacaatgagagtattgtttttggaaaactgtcctgtagataataagtcagagagcatgaattgtgagactttgatggcgaagagacaagctggaggactttcccacaagcgtgaggtgatgacagcatgaattggctgggagtcagtagaaataaaaaagataaatctgagggacatttgaaaggaaaagcagacaggacctgctgaaaaaaacacaatagagacgtgtgttgagaagagctgtaagaatgaagcaaggaaaattggtgctaatgttaatgtccctgaatgaagcaagaaagttgggaaagggggaggctgattgaagaggcaggacgtagggaggcaatggaagagaagtgagaaatagaaaagagatgaattccgtttggatactcaaactaagcaaaactacacagttcatcaaaagaagaggaaaaatgagaaagagaagcagggaagagagaagtggaggaggaagaggacaatgatagaggaggaaggacaagcagaagaaaggagaaagcaaatggattttactagcagtgttgagtgaataaaaacatcctgcttagattaaacataagtcttggcttcagtgaaggggtctatctactttcctgcccacactgattgcccccttctctaagcctgtttaacagtaagtggctgagaaccagaactcagacactgaactgcctgggttcaaattttggactggccccatcacaaaaaaaaaaaaaaaatttggactggccattcactggcaatatgacgttgggcaatttatttaatatctctgtgcctctgtttctttatatgtaaaatggagataattacaggactactttatacagttgaggtaaggcttaaatgagctagtatgtgaaaagcacttagaatagcaccttagacagtaagtgctcagtaagtgttaaccattaatagacgtagtagagggtggtggtagtagttactatggtagaagtattctaaaggctaattgtagttcgtcattcttaatttctcatcaattcagaggagcttccacattaaagcagtgattggacatggttccctaaatgtgaaagttatgaaatgcaaattgtttcctctattagtacaatctaatggcataaaactacatgaaatcttgtgctaagaagctaattcacatgtttatttttagcaagaagtaaaaaggctagtaatttttacaaattgctgtttcctggccttttgagaagcttgggtgacatctctgctgccctatgagtcagtatcagcatgacagatttatctgctactctttacctactacagattgaatcctggaagcccagactaacaaatgtttcctatcagctaatgtataatattgatgaaaattttctgttgaactcatatactacttagagacaagttttcatcctgagttctccttcccattctgatttttgtatgagttttcttcctccttccctccctctcttatctctccttccttccttcctccttctcttcttcccttccttcctgttttattcattctccctcatcttttggcccatacacctctggatagcttgaagaaccagaaactttgtagagaaaattcacatctgctagagcaaataacatgcatagaataaataagagtaaaaacacaaattgggatctggattagagagagccttgaatgtcttactaaagagttttagggtattaccaccaaccaacacttacccagcatgagtgagtggtattattttaaataacatgttaacttgttttgtccgctattcataaaatatattttgtaattacatataatttacatataaaataagcatttagtgttttctgttgagtttttacctacactaaaaaaccctttccacaaaaaatatccaattaaatgttatagagataattacttctatagtaaaggtacttggttcaggtctcttaggcctccatcagtaaaacaggcatattaagactagctgtagaataatacttgcttgaaatactgtcattcagatttgcttcctacagttatccaagtcggaaaggaacaagcacaatagccccttttttcatataaagttattatagtatattacctgaattattttataaagggtagtttgtaactgatactaaataactcaaaagttaattcagccctcttcataaaatgatactgctatgaattggaaaatatacatataaatgttcattaaaagattaaattggctgccaaaaatcacacatcattattttacatatttagacggaatttttttcatgctactgtaattattttggtagttgaaaatctaattttacctgtatactaaatgactgcttaatcatagtgagcagagatctttatcctattcatcttgatatcctcaatgcaaaaaagaaacttcacatatatttaactctcaataaatagagtagtataatgaatataatactctatttttgaagaaagtaattatactaagtatagaaaaaatctttatgaaactttgctattagccacaaaaagacagaaaacttacttagaattcatagtaaaggtctcaaatatgcttccaatcacactgaaaatatctggtcttgtgtacctcaaatttatctggttgttgcacagttctcatttaaagcttataaaagcactgttaatttacatttgtggcttaaagtttacaagcagtataattctgaatttctaagtgaatcctaaaggaaaacactttactgcctacctcttttgttgatgtggaaatgaccttcagatatctaaattcaataagagaatagactttacacccgaagaaacattggttaagctgctaaaagagaagaaatgaattatttccatctgaaagtttataggtttgaaagcaacagagctttcctctatcttcaacagcagtttgttcattaattagcccttcaattccacttcaattaaattaactctaattaataagttcattacaaagattgacgcaccttgctcaaagctagtgtgctaaatgctgataaacaccatcaccctaatgaaaaattgattagattgaataaaaagggtacctcagaaagaaccctctcacttctggagctgggttgatgttatgttgctctgaagttaatcaaactatcttgaatctcttaatcaaaagtttaattcaaaggagatagaaaatattgcatgaaaaaacctgcgtgctaccctcttccagttaatagtcctgggtgttgtttataaaaaatattacaactctcgtagtgccttgataaggtgtttagcctgtgagatagagaatcacgtgtctgagaaatgttacctggggaatgaatagggaaaacagaacatgtgactacataaacagctactattttttaatcaaaaaaaggttttagtacattttctgtttgttagaaatgattttaggtttttattgttcagtgctttatttttgtaagaaaaccaaaactaatcaatagtcttagaattttaggggaaaaaactatagctaactttaatcttatatgtaaaaatgaaataaccttcaaagtttcttttacctttgcctctccctgtctctcaattggaactagttaaataaagcttttaagaaagcttaaaattttttttcttacacatctgaattctttttaaagacctaacctggtattaaaacatttgaattcatttggtcacttgtgctcttttcagtaattctaggaattgaaaaaccttgtttttcaaaggagagtcaattatatgtattattaaactggttttgtactgtggactaagaaatttgtatctgtcaactgtacaaatttactgaataggaaaaacagtttctttttacatgcatgtctgtgtcagaagcaagctaatttacttaagtagattcctcttagtgaaagtttctgaatatttaaaacatttaaatgtggcattagaaacaaccccatttcaaattcttgccatatgtatgaaatccaagtcctgttagatacctgagatgctgaaatatttcattaatttggggatgggggtgtggggacatgttttcttggtgataggtgtatataaatatgaccaccctctatatatgtaatgttttctatataaagtattgtatatgtaaagaaattatttctaacaattgtcatgtgtattttctgcatgattagagcagcatgtaaaattaaatgatgaataaagacgtagagttccaccattgatcatttcctagtagtcagtgctgaaatttacgtagcatacaaatacttttgatttcttttggatgattttgtgtttcccttgaacaaatttgtgtggaagataaaagctgcttattaattccccttctctctcccgccactcttctctcctgttttgtgtcctcttcctcccacatagaaatatgttctgtggactgtggctcacacggcgtttgcatgggggggacgtgtcgctgtgaagaaggctggacgggcccagcctgtaatcagagagcctgccacccccgctgtgccgagcacgggacctgcaaggatggcaagtgtgaatgcagccagggctggaatggagagcactgcactatcggtaggcttactgcaagtctgtgtctgtccccttcctcccagagaagagcaccgacggtcagctgttttcaacttggaaaaagcctatttctttacgttattttttacttgtctttcttaacacgaaattattttttaaatatggttgtcattttataatggcaattcagttctttttagaacagctgtcacaagtatgagctataaacttttttattcattggtttttgggacggccacaaaaatggactcacataaaacagacttaatgatttgtttatgtgaagttttatcgaatattacttcttgatgttccatattgtcattgcatttcttaatagcagattttccactttagaaaaaaatgctttaaatttttttcaaatatatgcccttgttggcctctgtagtttccagaatcacatagcttagacttgtccatatcttgagtctctgcaaaagaggtttgacttattatgacttcattttgtggtatcatgagaaataaagtagaatcaaatgtacaaatctcgctgctcttaaacaaacctgtatggttaacactttttcatatatgatgacatttgtgaacatctgtaggttaaataaaaccatcagatagatgtttcagatcaaaacattagtatataaacaatatttagcatagatacaaaagtatccaaaacatatatatcatgttttcaagatacttagtgtctttgcttttaccatttgtcactaaaattaaaatgtttaattttaaaagtacaacaaaagtaagtaataaatttctatatcacttcagtgaaagtacacagtattaattataagtggcacggtcctaccaaaatttcagaatttgtggtatagtatttctccacattgttttacatccctagggtgaaatttgataaatctgttgtggggagtgtcagtgtcttttaaagatttcttcttccgatgtatccgtaagtattatgtacttcgcttttttgctcacaggatttggttagccgggaactttgtcatgggaaaattgaaatcatatgtgtcttataaattgtcacaagtgtgtcattatacacttcatgtaagtttttttctaatcttactgacatccttgacatctgtttcaagggtcccaccacgcccccacgctggtgatcttcaagaagaactcaggacccagaggtagttgtgtcatggctataatgtatcacaaccagaaagaaaaaagacacatccggcagagtctgcagaaatccatgcacaggcttcctatcttccttctctcccactaggagaggtcatgtgtagcatgctccttttcccagcagcgaaacgaatcgacatatttgcagtatttctgcccagggaagcctgttcgagacttagagcaaacttgtcaaacctgaggcctgtgggccgtatgcggcccaggacagctttgaatgaggcccaacacaaattcataaactttcttaaaacatgatgagtttttcctgcaattttttagctcatcagctattgttagtgttaatgtatgttttgtgtggtccaagacaatttttattcttccagtgtggcccagagaagcctaaagatggactttcctgacttagagtctaagatttttattggggcttctccaggaggtatcctctgtctgccacaaccaccaaaattccaactctcctaagaagagtaggtgtggacaaaataaccttatcagtgtagggaacatccaaatttccagatgccagccaagggccagcccgccaaaatcctgcagatcaggcccactgttagctcttacttgcacagcatccttggagcttcgcttgttgcattggagcttcccgcctgaaatcaacaacaggtgcccacagtcatagcgcttgcacagggctcgtccccactgatgtggctttcccctcccaaagaggctttgtagggcagtggcagcaggttgttcatgtgaactacattaaggcagaagaaagttgatgagcaggatttgtgtatctttttgtggccatacaagggacaatgcaatacctctataaccaaacagctccatgccccaggtcccagaatgcctatataccagaggcagggcaggaaaactatacctctgatcacattccctcattctttgtgactccaccacccgatacccgatacatcagaagaaatgagttgagtctagctgagggagaaaagttatgatctgactgtatgtatcttaggaagtacaacaaacacgtgtgtatagctttgaaaaccaggaagtgtgccaaaaagttatccataggcggatttaacttaccaaccaatagttattcaacaaatcattttagtgttgttctcagtggccttggtattattacatggataatagtttcccatagatgagctgttcttgaacaaatttctagttgtttaggaacaaacaggatttttattagcagtgggtctttgtattataatttaataaaccctgcaatagttcttaacaattccatttcctatcattttaatttattctgttgcttttatactccatatgaataacattgtgggaaataagggacctgcttcatttacaaataaatcttagatgtgaaccttttaaaagatgtagagcacctttaaagcattctgctcttttatactaataagatgagttatttccaattttggcatacaaagatccaattgcctttcccctgtttccttactacctgtgtatatgcccaccatagtttcctggttagggcccttagtggccctacggggccatttgtgagccacagattaaacacccaggaaactctggtgtgttttctcacttgggatggttactgttcttgcatttcctccccattttaacccctacgcatctggctgaaagaagctgccacttggtgaaagaatgctcataaatcagccagatttttttctttctccatattatgtgccatctcattgaataccaaacaggaaggttaattgaaagagaaatggaggagaaagtaaacagaagcaaacaaaaattcccactagaaagcaaaggacattcttcattagtcatcctactgtcttcataaactctgtctatgctttcataaaaccataggcattttgatagtaaaataggttatgaatttggagtgttcactgaacaccctgtctacctgaaagggttctattctgatatttttattagagtattcatattttcctctcattatgaatcatgtgttcagcaaattaggcatattcgtctgcaggttcatcatcccaagtcctcctttcttgggtttccctttgattggtgatgcatgcagatggaaaatgaaacaaggagaaatctacttttagcaatattgtgattaaaatagatacttctcctttcctccccagaaagcattcatgattattagaccctttaataaataaagaaaaagagaagttacatgattaaaccacatcaaataagcaccagtacttactgctaaaatgatttaacagtaatagcaccgatatagatgctccactacaaaaatactctcttttatatgtgaccattccatataagcttcaaaggattatactcatgtgctgccactgtttttcatgggtaggaaatatgtaaaaatatttagaggattcagagacaagttaaaaataaatataatgaaatgttttttaaataatagttgacataataagaatattatctggctatctctatgtaaaaaagcttcaacagttctgtcatctgagagttgaggtaggtcagagaaattgggcttcttcttgcttagaaaaagagggaaaatctcctatgggactgtcctgtggatgcagttagttggccatagatgcaatgcaaatgcagtggtaggctctgctgaacagatggttataggcagagtcaatcacttttaagtgtaatacgaagtaaataacctggacaatgataaatactaagtaccaaatttttactactgctaacctatcacttccacaagaaccattctttttagtatttgttgaagaggtttaccccagaattcattcatttgtatcccagagaattggaggctgtaagtgagattgagaccatagcagggtaatgattgaataacatatttgattgttatctactatggagggttgttgtgaaggaaaagaagactcagctctctgtagacaggcaagttgtcttctggaggctgattggcattttccatttatccaggagacagaaatggagaatatgggtttacaatgtataaatgtttgttagatataatgaagaagctcgagtcagaaagcatatttaaatcctggaacaagctactcaagaaattttggaacctcccaagtaatcgtagtattgttaaagtttaatactatgattacttaggtgtgaaacactggaggtttcgtcagttctttttgttagcttaaggagtatttttagaatgggagttttttttttaacttctctccatccgttatcctaaaagatcaagtctcttgtgtagtagccctatttgaaggacccctcaaggtctcttgcagttctaggattttttcgctgttgataatttctgctttatttggaaaactactagatttaaacatggggttctctttttatctctatgtcatttaactttttgtttttcctatggcattgaaacatagtgagaaaccatcttcactttttcagatcatttggggtttgttttgtgggatgctctactttgcatgcctcacttactttttatttgttaattaattcatttatgtgtccagtaagcaattattgaacatctcttctgtgatactgagaacaatttcttacaaaagtcagtgtaagataataaaaaaggtatgggctttgacattttaaataaaatgtttttaggtcagttttacaatttattcactataactggtatcttttttttcttcttttttttttctttcgagatagaatctcactctgtcgcccaggctggagtgcaatggctcaatctcgggtcactgcaaactccacctcctgggttcaagtgattctcctgcctcagcctcccaagtagctggggttacaggcgcccaccaccacacccagctaacttttttaattttttagtagagatggggtttcaccgcgttggccaggctggtgtcgaattcctgacctcaggtgatccactgcgcccgtcctttagcttttatcttaactgttcttagcctcagttgggttttttcgcaatgtaaaatggctataatagtacatatatgagattttgaagcagaataatgtttaagagctttgggaattgaaattcttgccgtaccactgagtgaccttgggcaagtcatttaacctgttttatatgaaatgtgaatattatgtacttcatgggattattagaattaaatggaatactagaatgtaaagcatttagcaaataatgttcaataaattcaagttttaattttgttattaagtgtaaatgagacaaagtacaacccagaaaatgttttgggtgccaacattcaaaaacaagaacaacagaacaaaactcctgtccaggacatttactttaaagagttaatgacatttgcattttattattataaaatataatctagtctcataatggatattgtttaacaagaaatttgtatgtttgggttaagggtttgagggttggttttatttttttttaattttcatttatttttttatttttgagacagggtctcactcagttgcccaggctggactgcggtgatacggtcacggctcactgcagcctctgcctcctgagcccaagtgatcctcccacgtcagcctcccgaatagctgggacctcaggagtgtgccaccacacctggctcattttttgtatttttgtggagaaggggtttcttcatgttgcccaggcgggctggtctcacactccaggacgcaagcaatccacctgcctcagcctcccaaggtgctgggattataagcatgagccaccgcacccagccgagagttgttttttaaaatcgtgatgatgaaagaaaggtggaggatattgatgtatttttcttctagtaatgtctcaaacacagagttgtatattgagctacattgattttcatgtacttttaggcagttcacttggaaatttggcctaggggaaatcctaattcctttaaactacaaaagagcagctatttgtttttattctaattcttagtacattaggaaacaagatcattaatgatcacaaagacatgctttgtttgctcagacaaaactcacacatgcagtactcagcatcctctgttaaacaccagggctgcccttgggctttgggatgccgaaggttagaaattgagaatgaaatgcacacagctggggaggtatttcggaaacaagatggggtggaaagagagaaagagcaaaacttttactgatacagacaagcttaggcttggtgttctaattcttatctcagataatggtgaaagaatagtactttaattgttaaattaaaaagtaagtgacaaatttgaaaataaaatgaccactctgataagtgcttcacttaaattacaaaactcaatattctttgcaacttttgtagtgtttcccagattgagcatcatatccaaaataaaacaatatgtaattctaaaaatatctttttagattttaagtcacattttgtttataatttccaataacagtggatatggggcaccacatcatacccacaaatagctgttctgggaggcatttggcttcacatcagtcagtggttggtagtggtgatgaaaggcaaccttgcgccaaactaccagcgtccctgaccttgccagagacaggtttactgtgaagctggtgtagcataaatgtcagggtccttcatttgcactggcacctcctaagatcccacaagggaacacccatgggttcaggtgtcgtatgttaatataaaacttgcaaatcagctgacttctgacccttcacactccaacatcctctccaccacacttttccttgtgcagggtggcattggggtggctgtgggcattttgagaattccgataaggagaatttgatctgggggtacatttagtttagatttaatgggatatgcatatgaggtgtgaaatcacttctctctgtggctgttactgctagccacctaggaatcttcctacctcccactgactcacctagtgacacgaaagtacagggtcagggagttactagatgaagatacgactttgtcctgtggagctctgcaccagaagcaagtaggtattggaggagaagtaaggtttgaaatgtatggaaacagaagctagtctggaaaattcctcatgtcatcaaatacctaaaatgcctaattaaaacagaagttttctcccaccaggcatgtacttgataatagaatttatataattataaacatgccatagctttttcttttagatgaatatttctcctttgagtatttatcagaattcctgtgtttgtagggtataagtctgtagcagtactgcagatactgagttcaacagtgtgtgaaatcacatgtgttactcatcccagtgtatcactgaatcacatgagtgcaccagaaaaagtcttgtttatgtgacgtcaaatactgacattgcaaatttaacataaaactcaaaatagtctactctacagacatcacaacaaaatagttaatgagtattatcaactcagcatatttaagatcagtttattacacaataaaaaaaaagtctttccaaacttgacagtaacggcacaaatttacatgacactaccaataacaaattttgaaggcaaatgaactactgttgatagttttatcaataatgaaaagtaaactatcgcatagaatatagactcaattatctctctatactctctatagaaaatattacaaaaatcgttgtcatataaagaggcaatcaaagagtaattatagcccaaaaatataggaaaaatgttcattagagacatggcaagcactgaataaaaaatggatatggggccgggcacagtggctcatgcctgtaatcccagcactttgggaggccaaggcgggtagatcacgaggtcaggagatcgggaccatcctgaccaacatggtgaatccccatctctactaaaaatacaaaaattagctggatgtggtggtgcacgcctgtaatcccagctacttgggaggctgaggcaggagaatcgcttgaaccagggagtcagaggttgcagtgagctgagattgtgccactgcactccagcctggtgacagagcgagacttcatctcaaaaaaaaaaacaaaaatgcatatgacttctctcatgtttgtggtattaactgaaaaataaatgttttgttgcggtttttctcattctaaatacttttatacctgatttcatttttatattttgatattctttttcttaaagagggcctcccaaattatgtaaatttcagacccataaaccctggatttccccctggttccagctctgtcacttcatatctgtatgatcttgggaaattacttaagccccctgtgcctcagtttactcatctataaagtgggaatgaaaatagtaactacctcgtagagtccctgagagtattaaatgggtcaggtcatgtggaagagcacttagcacagtgcctggcacacagtaaacaccctatagatgtttcttgttgttgttgttgctggtcgttggactgaaattcataacaaactgactgtgactaattcctccctgctaaatcttgtctctaggcagaggaattagcctcggctaattcttccagaaaaaacaggagtgcatgctggatacaaggagagctaatcccctctgcctcctggcacatgaatagtctggacatagatgcctcatgatctgtcattcacagtggaaagtgggtcgccaaggaggcagcaggcgtggagttgagggggagattctcctaaactgacctgattggcgctgaaaatctaggggaaattctcctaaattgacaggctgaaaaaccttctgtgaagcttgcagaacgagaacttcttgaggtccctcctgctctgcaagtcccagtgattctcagtaataagaaatttgatggacagaggggatagagatccctgagagagtcatggaaagcccccttcagaactcgggagtatcacccatgttctgagaaccgggctgatttcggtgtctgtttcttccattgagatgacagtatccactggcagctatccactgggggccttccaatactgtttttctcattttagtctagtttcttcagttaacagttttataaacactactttagcctctgtaatcccctcagacttgtaatttttaaaagaagaggtcacttaatctcttttctacaaatgcaaacctggttcctctgacctttctaaaaggtggaggccctgtttggttgtcagtattctctactgtttcaatatttttaaaactactacaaagataatgtttattttgatgttgtaatctatgttgatgttgcagtttgtctgtccttcaaattcttctttcgtatttgcttgtctttacatacaccaatttcatcaaaaaaaggacatggagccttgggttccgcttccttgcagccagcattgagagcaatggcagatctgcactctgagccaaattcgtctttcgctcagtgttccacagcctgttgagtgagagagtaatcaaccaccaaaaacaaatttagtggcctaaatttgaaactttagtaagtttgactctgtgtttctatcatagtttagccttaaatactacctgccaagggtttatgaaatcattccatttctactgttacaatctgtatactataaagccccaaaggtggtagtaatttggactcttctaccaacctctggtgaagtgtgttacagatttaaccttgtagtgtccctccttccttatctccttcaccttcccgtgtgagtcatacgatgacgtctccaaaagtcccattagaattacaactgcaactcagtttacagattacatcctcaaaaaagtaggtgagactcctcactgacttctgcacctgacttgctgtgtaaccgtcaggaaaagtcacagtcccgagggccatgtggatacacgttctccagtcatgttggtgatttattttccactaaagaatttcccaaggcctcggtttctgtcccttagaatgggagtaagtgtggggataaacagctctcactattgacatcaggccttgagttccctctttctccaccctatccttcatgccgtaatttatcctcatgaaaaagacaggcagcagcatagtcatcagctagagctgcgtggtttcatatcagacggcagtgccagtgctactgagaggtaaatttctaggacaggtgtgttgttttgggaaacgttagatgtgttttttccatactttagaaaaggaacattttttgaggccttctgagactcaattctgagtgtaaataattgcttggtgggtgaatacatctggatttaacatacgtttttccactgaagtgatttacacatagctgtgaggatgagaagttagaattcttgaaaagaaatacgcttcacatactcttcacgtccttgtttagggtcatatgataaatgaattctatactgtggtgtttacttgtgcaggaatttctttccggtctacctcctgtggtctaacttgagtcccaatagctattgctaaattaagctttctcctacaaggcccactggaaggcgggcccactggcattagaagcagctgtttcagaaagaatggagagttaaacctgttgtgatttttctcaactgggagcaatacataagcaacttgaggatttgtattgttttttgataagttagatgtcattgaaatatgcctgattcctttaggcttggcaaacccgattccttcctttcccaggacctcgtgtttgtttcccactgtgaaattaatggtttgctaactagttcttttaagtctcaaaacagtttactgtgtagtggctctgtgtcttagggaaacaatttataaattataattattatctcaaggaaatttttgaatccattaattttaattacagttatatgccaggccagaaatttaaaatatgaatatagccatgtattcatgcctgtggtttccatttttctttctgaaaccgcatgcctcatgttaagccaatataagttgttttttaaaaagtttattgagagacatgttatctgaataaaagccgagtaagtgatatgtcaaattcatatgatactgtttcattacaaacttgacattttgttcctttactaatatactagaggatcttttttccatttggaacacctcattaatttgtatcttttaaaaaccatctaagatctaaattaccaccgaaaccgagtatattggaggttttaaagctcagttgactggatatacaatttaaccagaaataaagatagaaaatgctccttctgcttgccaagttcatcagaagccttttattgaaaagtttagatccaaggcatttaagagtgaaaccagctgcagaataatatgttgtcagctatttcacaatatcagcaaggaagagaaagattctctcgagttccagattataaggatgccacatgcttcccaaaagtaagccaggtaactggagagtgaaaggcagctagtgaggtgtttatgaggctttgaagtaatattccttatatgctgagatccttattacctaatggggtaaataaaatgttgggacttttcattcagtttaatgtaagggtagagaaattaagcccacaattttaagaagtatgattatcccttcccacatggtatgttgttatcttttcaatggcagaatttatctttgccatttcttgaatatgacaagttgaaaatagcctcttttcattttaaaacagtccctctcccacctccctattttaaagtgcaagtttggttgtggtgtctgtccatacggaagcacagccttccagcagccttcgtatttaacatattcgcagattatggtgtgactggagccaatttttgtctgttgctcttcatgataagttcagtgaccctctcttttttgagtgcctctttaatgaagctggaacccagctgtctgaaatatgactatcatttctgggatttaacaggcatgtaccttggataaattaaggagcagtcaaaggaggtccataaatttgaatactttgccagctgcttttccattaaactctgttggttgaatgaaattagtaaataattatgttggtggggaatctactacatctaaatgtgatataatgtcttcctttaacaacagagcttaatttttcttatatactaaattagtttttagggtaatctacattgcaaattggtcaatttgcatcaaaactatgcctagttgttctgatttgtcaacacctctttttaaaaaagtctttaactttaagcatgggtgggtaagaccatctgcttgtagagctcgcctgcagctccaccacttagtgcacgagacaggttacagctgcttaattgttatggtgttgaatgattaccattctgtccaaaattaatatttatatatgtgtccacagaaagcatgtggttaaacataagcaatctaattgtgaattaatgacataaggtattcattaatgagtccccacctgaacaataaggggtaaaataatgcttttcacatacagtccaactcttgacttttttttttttttttttttttttttttgagacagagtcttgctctgttgcccaggctggagagcagtggcacgatctcggctcactgcaagctccgcctcctgggttcaagcaattctcctgcctcagcctcccgagtagctgggactacaggcgcccacaaccacacctggctaattttttgtatttttagtagagacgaggtttcctcgtgttagccaggatggtctcaagctcctgacctcgtgatccgcccacctcggcctcccaatatgctgggattacaggcgtgagccactgcacctggccccaactcttgacttttaagatgagtccccagtagtgattatgtatgtgagtaatccactgcaatacattggtatagataaggaaaaaaatcaccatgtagctgccatgaaaagcaaagaggaaactatgtggttatttcacttactctaactcttccctgcccctacaagcgttgtcctctgaattgtgaccagtgtaagaacaaaccgcatagcaaaagtctagatatgcaattatgactacatgtttgtgtgccacccacagctactagaaaggattgtctcagccaagggtggccttcctcctgtatttaagaatggtgacatataaacttacaccattctgctatgaaaagttagcaatatatatcctgtctgctcagtatatttcataatgaaaaatctttagcaaactcacaatgtaaggatagggatatgcatgtaaaatataatatttgaatgtcttagtttccaaatagttactgtaaatacatgacttgtatttctgaatttgagtggactatatgaatatttgtgtgagtatctacacttttttagaaaagattaatttatcttgctcaaataaaattactagtgaaggagcagaaaatatataagggcaagttgtgatgtgttctttattccaaaaagctgaaccccatgttgaccaggaattgtgcatctaaccagcagagggtttgtgagagacaaggaagaaaacttcctgattccaaaatggagttgtccctaccctgggaacaggccagttcatataaagaatgttctcagcaaaaggagggcagcttggggaggcagagtacaaggggcttctcctgctggtatggagcagaatggaccctggggcttatgaaaccaaatcattgccaatcccacatttctttcctcaaagtcagactttttcttttcttcatagtcacttaaaaaataccagctccctcatgagtttgtcctttttaaactctccctattaataagatgaatcaataatatttaatatgtattgagcatttactacttgctaaggcccaatgcaaactgttctacattaattatcatgtttaattctcaggtagaagctagtaaaatctccactgaagaaactgaggctccaaaaggttatgtaagttttctgtggacgcacagctagtaagcaacaaaatcagaaccatgtgagcgatttccaagcccacgctcttttttttttttttctttttttgagacggcgtctggctctgtcgcccaggctggagtgcagtggtgcgatctcggctcactgcaagctccacctcccgggtgcagccattctcctgcctcagcctcccacatagctgggactacaggcgcccaccaccatgcccggctaattttttgtatttttagtagagacggggtttcaccatgttagccaggatggtctcgatctcctgacctcgtgatctgcccgcctcagcctcccaaagtgctgggattacaggcgtgagccaccgcgcctggcccaagcccatgttcttaagccctagatagactgtcctgcctcctgaattatttttcaattgttcttgtgtgtatgtgtatagtggaatagatgaaaattaatttttatgtgttgaaaataaattaatgtatatgtccctgtcacaaaagattgaattgtcatagaaacagatgcaaaaacaataatgccggtgatgtcttagtaaagtaccacacttttttatccaggaaatgttaaatgatagctgataacagaacttgtaatttgccaaaataaaaaataacaattacaacaacaaaaaatggtttgaggaaaatcagtttatactgtggaggatttaagaacattgggagctattgaacactctacccacttcctttcaaaatttaaattaatgtcctgttttcctgtcactggaagttagtgggctggaatctatgtagacattagccaatggaaaactctcatagaaagtgggtagattatttgtgtcaccagcatcagctcatgagaaaaggctgagaaaagtgtatacaagtggtaaacatctttgcatactctcacctacaaatacagcaaaattactttctatatcaatcacctttgagaacagccatttgtttactattttcataaaataaatcataatgtatcctaggtaagttaaaaggattgttcagttttgtttattattttccagttatggtcaagaaaactgacatgagaaagacccattatatttttcatacgtaaaagtgttagtctatacatttttcttaaatattaaatgttgtgaatagacaaaagtggcaattacagacaaaaaattctacccattgatattgcccagatctctggatgattgttctggcttcctgtgattggatttattagcactatccagacaccactgtaatcactgttataaccaacttcatttttcctaaatcttaaatagccaaatattcacctagtataaaacattgtattatagttttttttaattaatgttaagagctgtctctgactagtttcattaccaaattggagtactaaaatataccttttttttttaatctaggaaatcctaaaatgtgttttttgcttgtgtcattcaataaactcacacaaggaataaaaaataagggagatgtgttactaacacgtgtatgtttatggttcagtggatgaaatcatcccacatgcaaaggctaccacaaaactcatacatcacacaccacacaaggcatctctttgcataggctatgcacatcccaacatcagtgagcctgccttctgcaccttgagtgttccactgttacttccattatgtgtatgtagtccatggtcaggcatgaaatcctaaattgaaggaaaataccaaattctgttctaccagtcatctctacaaagctctgcagcttataaaggcactctttcagcagtgctgactttataaaatgtgatttatctcaaagcagctcttccatagaatctggatttttctgggctgacttaaatcaggaaaaatattatttctctcgtttggaatgccttggtataaataccgttccaagttgaagtatggtattttgcttgggtaggtgcatgtaagaggcaatgtagttattcagataatttttacaccaagtttccaaactgtaaaaagaataaaatatgtaaactttcaaaagcagtttatttgaagcaaatttttgaaaaagtattgccaattgtaggggagcagatccctttaaagcacgtgtgcacacatgcatacacacaaacttttttttttttttttttttgctgacaccacctcacttactagttggtaaaatgcaaattaattgactttcctaaataggaaagaatttttttgatgtttgtccataatctgataattctgtggtgaaagagaacatattttaaggagtcttgagtaaactcttaagaatatgtaattgttttatggtgtttaaaattatgtcactgtcataatcctttatggtatggtaatcagtaataaaacattgcagtgagcagcagttaaggaacatcaaatcaatgggtgtgcaccttgcacgctgatttaaacagttgctgattggaataagtggatttaatatgtacgtatttgtagactgtagcttttctgtcatcctgcaggaattggtacttgactaatctgagaatgatacctacttacaactttaatgaggtactaatgtgagtcattttttaagtccgtgttcggaagtattatgaaatgctcaatgctaactaaaaatctgccctctactccaaggacttcacagtaattatcatagtgaagaatatgtctgtattttatgatgtacgtatctgatgtctacactataccgaggattcaagccagtagcccggtgaaaatattatacggtactatttaatatgcctccaccaagcgcattgttgacagcggaaacaatgtgagttgttcatagccatacacatcagcaactgcttatatacagtgaaaccgacttgaccttcccttgtgagctacctgacgtctatataacccgcttggtttgcctttgttgcttctctgtgtttatgagagtcagcctgatggcaaaaggaagcaaacttggaattaaccttgttccatgtctcagccggacaggaacatatactccttagacctcatttttaaatgagctgccttcttgggaactactactcagcagatatttctcgtccaacatttgtacatccattcaactgcttctggtctttgaggctttttggtttctggttttttcaacttacttgtttttatttttcctggttttatccctagttctactatcttgcccactggttttccaaacttcggattttttagaacagatgacagcattaaagctttctttagtttatataaggtactgtcatttatgaagcggtgtcatcagataaacattttaaattcattcgggttttaagcttatttcctttaactgtcagtgttggaactaaggatttccacgttgtttagtctgattttttttattccagtaaattccttgggaaatctataaacagatgatgcttctagttcgccttacacaggtacacagttctggttcttctgagttgtaactataacgtttatttagaatatggattttggtgtcagactgcctggttggaactttgtctttgccactgctagcattttgatcttaggaaacttctctaatttcttgtgcctcagttgcctcatttgtgaaataagggaagataataatgtacctgttaccccacagggtggtgaaaattaaaccggttaattcacattaaatgcttaggagttttcagcacataataaatggtagttattgcgaataccactgtccatagttagaatacatgggaggggagaggaacagatgggtgaaggacaggggaaggatgttgtaaataaggttttgctcacttttgcttctttctcaaaagatggcctctgtattacttatagaatttcttcaaaagctgcagacacatagaggacatactaaggccaccaaaagtacatttggtcattttatatggtcattttatctgctttaatataaagcagatattaacactctgctttagccaggcacagtgactcatgcccgtaatcctagcagttgggaggctgaggcagttggatcaccttaggtcaggagttcaagacaagcctgagcaacagggtgaaactccgtctctacaaaaattagccaggtatggttggggtgcgcctgtagtcccagctacttgggaggccgaggtgggaggatcacccaagcccgggaagttgaggctgcagtgagccaagctgtgattgcaccagcgcactccagcctgggtgacagagtgagaccctgtatccaaaaaaaaaaaaacaaaaagactctgctatgagccaggcagtgggaatgcagtgatttacgtggcctagagtttacctctctaatggggacgatttacacattaagtcacctatgcctagaaaggtcattaaagtctagtattttcatggcatctgttagtagaagtgaattcatcacggccaattcttgattgttctcttttcctgttacatgcactttgatgtgcatactcctagaccttatccaagagaggtgctggggtagagggaagaaaaaggaagaataagataacagaagagatggaggggcgcccagaatgttgatagataagcagatgaggcaacagcatgaagatagaattccaaaaagatgctattccttcctgatctgtatgggaggaatgaagcatacaatactatatatgagtgaggcccatcctcagagacctgagagtccaggtccatcactaaggggtgcagaaaagagcaaattatcttgtgtcctcctccacctatctttcccaaaatacaaaggaggaaatatggcaattaggggctttacaaaaaaaaggaattcttaaaaagaagcacctagaggggagatgtgtgaaaagaatacaggagtagtcatttgctttgttgatattgaaaatttatggactaaatatataatataaacattttcgatgagccacatttgtctttcacattcaaaacttccatgagtctttgcctacctgtaccagcaagtagaccaaggacccgcaggtcataggcttgaaacccgaatacttgcctcatttgttatgttccagggatggctgtgtatctgaatgtattttgaaaaacagttaaggccaagaattagccttggcatttagagtaatctgtagatctgccttgtgctttcctacggaatccatgtagaagccatgtaaaagaaggtggaactgcctggtggctttggagaacgaagtgtctggttctgagctcctttcatcagttttttctactggggggaaaaaacacctttttttttttctttttttttctaaatctccaagagacgacattgtgatagagtggtttagagcaagctctggagccaggcagcctaggttgccaaggtgttaccttgcccaagttaatcactcctctcctctgtttcctcatctgtatttactgtctcaactgttattacatcatagggttgtggtgaagatgaaatgagagaataatatatgcacttagaacagtatttggcacaaaggaagcctttattattacctacagcgagcagggctggcggcaaagtgcttcgtgtgtgtccctggatcattctgaacctggtcagagctacgagatagaggcctgggccagagctagaaatttaggaatcattaatacatcagccaggtgttcataatctgtacattacagagccagggctcatggaagagctaaaatcaaggcggcattttgtgtttgtgaacatatgtgaatttttctgggaagagaacccaaaactttcaccagtttactcaaagatctgagacctggcggggcgtggtggctcacgcctgtaatcccagcactttgggaggccgaggagggtggatcatgaggtcaggagatcgagaccatcctggctaacacggtgaaaccccacctctactaaaaatacaaaaattagccaggtgtggtggcgggcgcctgtagtcccagctactcaggaggctgaggcaggagaatggcgtgaacccgggaggcggagcttgcagtgagcggagatcgcgccactgtactccagcctgggcgacagagcgagactccgtctcaaaaaaaaaaaaaaaaagatgtgagacccagaaaagagtaagacttgccatctcacaggaaatatggtcctactcatgccgtgtgtcccacgtgggtgttcttccaaggtaaataattgaaactccagggaaagtattttatgactgcaacattttactagaaagcagtgggtttttttttgttttttgtggttttttattttgagacagagtctcactttgtttcccaggctggagtgcagtagtgcaatctcacctcactgcaacctctgcctaacaggttcaagcaattctcctgcctcagcctcccaagtagctgggactacaggcacgcaccaccacaccccgctaatttttgtatttttggtagagtcggggtttcaccatgttggccaggatggtctcgaactcctgacctcaagtgatcctcctgcctcagcctcccaaagtgcaaagattacaagcataagccaccgcatccagctctggaaaatagtttttttaatggttcccattttatatgtctagcacccatttttgtaagagttttatcgtataaaacaaatttcaacttcttagtagattgaaggaatgacttttctctagtgtcagaacatactcgttagttttcaaagtaattttttgcaacctaatatgcatttcagcaattgttaggtacattaatttttaaatatgctgaattgtttttatgattattatttctaatggcttcttacaaaatgtctgcatttttttatttcctattgtggtttatataatgatgtttatattgttgcaattattacttttaataattatttgaacctcatatattgacatctccttttaacttcttcattatttagaaccaggtttttgtggtatttcagaaagttttttcttccataccaaaatatttcttgttgttcttccttcttttgctcttagttttaagctctcaggctcacagttctctatgatataaaatgcaaatgaagaatcgtggtatctttctcagtacagatatttttcttacggttggtttttagccttttgcaaaacttgtgttaagagttgcaaatattttaagtattatgttaattttgaccggctatatattttaaatgtattttctactttgctttctacttctgatgttctggtgacccaaagacctacctttacctgtaaatcaatctacagctttgcataattgattctgttggcaaaaataatctgattggctgattagaaataattttgtccacccttaaaactgctaatccagatcagaattaagttgtgttatttattttggttgtgcaggcctaacgtaaaagcaaaaggtttactctctaacagtgatcagcgttattaatttttgtaaactaagaatttctgtagaaatactaccctatgagaatcagaaactccagaagtttcgatggcactttctttatgttcaaatcatcaattaagctgttacagggttctactagtttatatggcatgtaaagtatatagcatggagaaggaattataaagaaattatatgaatgttatgcagtaatacatttttattttaatgtttaaaaggtaaattatttttattattataatttcagagtagcacctaacaccatatgttcttcactgtaattttccttgcatcatcttatcaattagctgtaaacatgcttattttaaaatgccattcaaacgcctctaatagaatcctgtggcaaagtgaagaatccttttacatacacagtacagatgtatcaaaaccatgtactgttttgtttacacacatgacagaaccaccacacctgagtggcccaactgagggttacagtttcagtcattctgttaggagtcctcctaccacttgcatatgtcagcagtgaaaaataatcaacaaaagcatctttgaaaagcaattttagatcattaaagatgtatgaattttgacaaggcgggagatttgaggctgattaagatttattaggtctccacattgaaggaggcatttatgtctcatttccaggggaaaggcatagcctaattgtagcctcatgaaacaagtggacaggggcaggtacaggtacagaaaaagattcagtcttagtcctgactgttcctacacaccttttgtgagaaaaagagccttttccagtaggtttctgaaaataaacaggatcttagaatagtccctgtttcctaatgggctatatatgcgataaatcattgtctatctggcttgcagtcaagagatactgggtaatcgttttctaaagaacttacatgtgccttttccaaatataacatcaaaatattacatttgctcaacagtctccatttctttttcttctttttgcttatttattaacttttaaagtttcattatttgtagatctcatagttgtaaatttccaaagttctttaagaataaagaattgattccatttgttctgctcagctattataaaggagaatgttgaaatgacgagagtggagtgcattccaaataatctgtgaaaagtagtgttagttcagtgagttgaaaatgctgagtatttgctggaatcatgactacatttgctaaaaatgtgaatagactggatttttaggagatacgaagtgcatctctgtcatgtgatgtgagtcttatgtcagctgaagctactcaatttgcatgtagattctgaaaattttcttgtcccatgtgacacttctgaaatgtctgtctgttcttttttcctttttaatttcccaagctcactatttggataagatagttaaaggtactgtatactcgctctttgttgacatatctacatatatatctctatataactgtatatcactaggtttgacaatagacttttccatgcatatttttgtaaattataaatcagagttaaattatgtaaaatgccttggatttaaagtattgagacttaagtgtctgtgtctcatttttataattttgggttatcacagatttcattctttgtaaaagcgttagttttctctagaaccagaaactgaagataatggtacatttgctgttttttggttttggaggtttttttctttcttttcttttttttaagatcttcactgttggcaattcagcttaatgagctttaaattctaagctaaagaatcacaaatactcttatcacagaataagaaattgtcaatctaaagaagatcctggttaacatgttgagagaaatttcgtttatttcatatggaagcttctttggtttttttcctaaatgtttcaaaatatatgtggtatcacaatttgtgttttgttattttttaaaacctataaatactgtacagtctattaaaaaaagaactgataaccttgttcagcagaaaacagcagattctcacatcttcagttatcgtagaaatagatggaaaaagttttttcagaagagaaaattccccttccctttctcctcagattacctactttctattccttgtttgtgcttttcattagaatatgaaaatattcatggcaatatccaggctttcatataccaactcctacgtgcagtcagtcagctgccgcacctccttgtcagtggggcaattcaacctttcgttttcattaaaaaaaaaaaaaaaaaaacacatccataaggaagattcaccttttatttattgaataatccataaatacagacggtaattgtctgagcgaaaagaagcagcaaaattaatctcttcctgacctgatggtatccataagtgtaatttcattgtactcttccatgagagacagtcgaaatagtcttctttctgttaactctaatcttaagagacagaatgtctcttggcgatattttcttttcaagttccacagtggaggaggggacaccaatatatgaataattcttctaacacagacttaaacatctttaaaaacagattgttccctgaaattttgtcaccggagcaatagtagcattcaaatgataagaagctgtaaaacaaaccccaattgctatagcaagtatttttattaatatgttttataccaaattataaatagctctgtccacagaaatctgatgaatagccagttattcttagaattttagagcatttctctccttgcttctgtcagtgtcatatcacactcataaacaaggacaccagaatctacccaagtgtcatcctcataaacagatcacattggctgcatgccagatatcatcagtaggaagtggcaaaaattgttttttttaaatgtcatgttagactgaaacaattatagattttggatatattaaattattttaattgtttcccaaattttccctccttgcccataaaagcagacaagataggatataaaggtaacagcataaaagccttagggagattgtcacaaaatatcactcttcgctatctgtcttgaagcacgtcactaccgtgtttttgttcagtctatcaatgttttattgtggtccttatggtatttcattttgtccgtcctaagtaatccaatatgcacagctattacatttagttggaaatcctgtcggtcctgtcccatccgtatgcagcctgaatcctaatgtttgttagaatagatgctaagctgcttcactatttcctgggctttgcttattctgtgacaaggaatgtactcttggcataaagtatagtcattaatcctggcctatactttgtgcaattatttaatgcactgtaatttcacatgaatgtacggcaactccgaggccagataaaattaatgttctctttttgacatcattcatatcctcatacccactttcatgcttttggagtttgagggaatttttttaagcaacaaggtgctttaagaaggcatgtcttgataaatgaccagtaatgtttaaaacagattacaaatctagactagggattctgaaattattttgttgagatggcttttccacaccgtacaatataccttgttgcttggctaaagggaaaaaatttaagttaattttgtctggcctgcagctatttagtggatcgttgcatatatttctgtcctgcacaggtaagtggtgtctcaagggtcaggccaatcaaagatgccacttggataagaattagattccatagataacgttgctgtttctatccatgtgcaattacagtatttgtgctgtttataaaggcctgttcccactaagtgtcccttatctgtttattttaggtgcaaaaactcaatactcaaatcactggtgttttccttctttgtctcgacagagggttgtcctggtctgtgcaacagcaatggaagatgtaccctggaccaaaatggctggcattgtgtgtgccagcctggatggagaggagcaggctgtgacgtagccatggagactctttgcacagatagcaaggacaatgaaggaggtaagaaatactgagcatgaacacgagtctgtgccagagcacaggttcgtaagtgacagtgagtacatagatatctgttgccaaaaaaaaaaaaaaaaaaaaaaaacctgatccccatcgattagattgattgaaaaatgtatgagtgctgatagaatgattttgctctccatttttcctgaaacaaatgcaagattattatcattcagggaaaaggcaaggtaaccaagctactgcataatgtccattgttctccattccttttcctggtccccaggtgactcttctcctcaaccacagtatttagggctctgtgaattgggagctccaaagcagtattttaataactgacattccaaaagatgcaaagaattttccagcctcttctgttgaaaggcatggatggaaaaaaacaaaacagtaacagagaacagtcccctggatgctgtactctagtgacgttttatccttaacttgatactcggttaaaaagatggtgagattccacccagttgaagcccttggttaagaataattattttcaccgttgacctcagcctccatgtactgtattttaatttcagggaatagagtgagagttggtgatttcctctccagtgatggaatagttggccctgatagctgttttgttttgttttttgttttttgagatagagtttcgctcttgttgcccaggctggagtgcaatggcacgatctcagctcaccgcagcctccacctcccgggttcaagtgattctcctgcctcagcctcccgagtagctgggattacaggcatgtgccaccacacctggctaattttgtatttttaggagagacagggtttctccatgttggtcaggctggtcccaaactcccgacctcaggtgatccgcccacctcggcctccaaagtgctgggattacaggcgtgagccaccgcacccagccagctgttcagttttgacatagctttagcgctgcatttttaggagggctgtagttcctatccgggcctctgtggacacttgccacgtgtgttaggttgtgtttccctgccactccaccagccccaaccattctctctgctctttttgagactgtgcacatggatgataaagcactggctagagtgtaggttttggagcagacacatcttcactgaaccatgtagtaatcatgtgacctcagacaaaatctgtaatcactttaacctcaattgccgcatctataaaataggaataaaagagtttttgaaaggattaagtgagaagatgcatgtgaagtgtgtagcatattgccaggcacagagcctgctctaagtagcagctattattatccagtttcccttctttgctttcaaaagtgctcatcttgactaagtgaacttcatagaaggttgtcagagaagattgaatagcctttgcctttctatacctatagagggcctcaactactattctgtaggaaacagagcgaccagaaccaacccctcaacctcccttccaacccaaaacacacacactcacacacacacacagagacacacatacaagcaagcctgggccgacagtcattctcaaagcaaatgttacttgtgtcttatccttccgacaaggtgctgcaattctctcctttagtttctagcagactgttcactgttttctcttaacttggacagtcaagaaacttgagccacaaattctgagctaaagcctttccttcctgctccggatagatttaggtggcccgtagccttcacagcttttcctgcttaataataccttgttgcctctgactcctcttaactgtgtgctttatagacatggcagcattaatcctctcaaaaccacagtacagatggctcctctcttcgttactttcccccaaagaaccccctactccaatgttgctattgcctagggaggaaggagagcttctctttctccttgatcatatagttcagattttgcttctaagagaagattgcactgaggagtttacagagtctctcagagggaagcgggctgcaggaccaagtctgcagagacactgccgagtaatttaggggctaatcaactctttagtggtattatcagctaaagaggtttttccttttcctcaaaatttatcaactgtgaattggcctcattcccctttgtttattctgattagcatgaaactatgctatctctaggctcccctctcggaggggaaatctgagctgacagaagacctcctgtggattctctgcttatctcacataatttgtattcctgcctctaacctaattttgctgatcttttaagaaggaatctcagtgccagccttcttatgccctgagattgtaacctggatgctttataacctaagccagcgggttctttgaacttaagcataagctacatgtataaagatggtattttccacaccaaaccccaaatcaaaacacgaaagatggcaatgaaggatgtcaattatatgaagacagtcgaacagaatgtttaggaactataaatccactccttatttaggactagactggattttattagactgaaattctaggatatatggtgactgattgtagtgttatagatccattgtctaagtttagttatcaaaatggtgacttatccagagagtagctaagtaacttgatttagcatattaaggaactcaggaggaggagagggtgaagagcccaatgtggccctagtcagcaattgaacactcccaataaatagctactatagtttgagcaattttgtagaacacagtgtttgtaaaagaagagcaaaggaagttgcgtaccattcccggaactaaagaagtatcaaaaaattttaaaagagacatccatcatatagggagatcttgaaatatcttcttaggccaagcatcttccttcccctgcaaaatttattttacttcaccccgtcaagtttgccccatcaccactgttcaatggtaaagagtttaaacatctgaatctcactaaataggtgttcctccttgccttcatgtatgtctgtccccctttatctctaaaaagctgctttagaagggaattccttatgaggaataggaagaacgtagatgggggcgacttatcttcagccacccttttaacacctgtgctgctttccaataggtccttgtttcctttcagacaaacagctgtcatgtacgctgggtaactgtagcttttcagagctaagggcaatctgttacccgtaataagggccctgacaaaggtctccactctctatgaaatcagtaaggtatccccctcatctgcttctcaaatccagctccaggtaccaaatagaggctttgggagcagatccttttgacaaaggcaagcaatggattactagattcttaaatcacacagtggaaatcagaaacaatgctcactggaccagataattgtggataatatccccaatggggcacgtagacactttgggagcaactagttgctgtcctgtcctaattgagaaagcttttagagcaaatgatcaccagtacttcacatggcttataaatctttcttcttcaactccaactttacttatgaagacaacagtcctgtaaattgagcatttgttgctcatatcccaaaacactgtgatcatgaagttgctgagtccagagaataggaaggtgaagagatgggagctgctcactcctgaaggaagtgcgatctggagtgggggttaagacagtgactgttaaccacagtcttcggttcctcaagtacctcttttcaccagccatttgcattgaagtctgccctgtctcacagtgaaccctaccacagacttccactccccctcaacaggaaaaccttctcctttttgaaggttctacttgaccattctgaccaggaaagaccctggtctcacatgtgagacgttcaactcaaacattattacacgtaaaaaaaaaaattattagcttatataactgaaaaattcagatagagttgcacccaggtgttcaaatgatgacaccagaaacttaggtatattcatctgttaactctgctttcttctaccttagaatcattctcaggccatctcctccccaaaaaggccaccaccagctctgagtttacatttcacttcctaataactccaccacaaagaacacacacctttcttcatggttgtgtgtggcctgggcctgagcctgagcctcactctcgttggtctgaattaggtcacctgcccaaaggaaaactgaagtgctgtcaccagaagaaaggggcttggatgctgggcaggcagaaaaacggtctactatgggaataagaatagttctccacagcattcagctttagtacagtcagatcatgtactgcagtaactagttcatatgctcatggactgtcactttcagaaggaatcttcttctctctgtctcctccttccttgccaaagtatagccttttgacttgacaagaataccagtgctgaacctctgatgtgctttttagtgcccaagattagcaaggcagctatctaattctccccatatacttttaaaagcatcattgcttttatttagcctgctgcgaagactcattcggcaaggggttgcttgactttaaatagctctccaaatgatggtctcactatgcaagcaccaaaaggcaatagctcgccagagataattctgtctctatggaaacttaagatactttttaacaagatgatttctccacaatgcattgtccctggcagtcgttaccaagctcccatcttctccagagggagatctagtcagttccctttgacaccttgcgtccctgtctggtcctccagtggccagctcccccgtgggcacctgagacatgagactcaagccctgtcctggagactggctggttgagggcacaagaatgactttaaaagatacatactaaactttgtgcaagaatggtggaataccaaagcataactcctgccaagaataatacatattaccagtaaaatagagttcttttttttttctttttttttttttttttttttttttttgagacggagtctcgctctgtctcccaggctgcagtgcaatggcgtggtctcggctcactgcaacctccgcctgccgggttcaagggattctcctgcctcagcctcccgagtagctgggactataggcgcccaccaccacgccctgctaatttttgtatttttagtagagacggggttcaccatgttggccaggatggtctcgaactcctgaccttgtgatccgcccccctcggcctcccaaagtgctgggattacaggcatgaaccactgcgcctggcctagagctatcttttatcctttagaattattactttttggggggtatatcaggaagatgtacctaaaacaggccattttttcaagcctctaggggctgattacagttgagaagaaagcacaagtcaactgaggttattcagaaataagaaagatagaaataagaaataaataattagataaataagcaaaagaagcagaaatacaattcgaactgcaagaaagctgggtgcagtggctcatacctgtaatcctatcatttagggaggctgaggcagttggattacttgagcccaggagtttgatatcagcctggccagcgtagcaaggccccatctctacaaaaaatataaaaatcaggcaggcgtggtggcacacgcctgtagtccgagctactcaggaggctgaggtgggaggatcacctgagcctggggaggtcaaggctgcagtgagccatgatcgcgccactgcactccaggctggatgaaagagtgagaccctgtctctcacacacacacacacacaaacaaactgcaataaaaagtaggaatgtgctatcactagaaaaggggagtgaaggattgaaaacaaatggatgaaatattaatataaacatgagaatgagtataatgaatggagagatctatatttgtagattactcagtgaaaataaggaaatgtttgaaaatagaatttttaaaaatctagcaagaaggtgggactattatgttctctaaaaacagatttaaaaataaaaataatgaaatggcaggaaacagcactggaaaggaagcgggggagagggagtttaaaaaaaaaaattacaagagatcacaagtatttcccaaaatgaatccagatattatcagacatagagtggtgcttacagtctcagagcattaccctgtattattcaggtagatgatggtttggggggaaattactattaatttgaaagactctactggatcctacctaaagtaagaaggagattcaggttactctgaaccctttggctatccacagaattttagaggatagtgaatcccattctgggggaagaacatccagcttgtgccctataaagcagaggacttcagtagcttcctgctaggactcaaggaacgtaagatttaaccactgcatcttaatgggttttagaagaagaggaaaatcagagccacacgggttggtactaaaagtctcccctcttttttttttttttttttgagacagagtcttgctcttgttgcccaggctggagtgcaatagcatagtcttagctcactgcaacctctgcctcctgggttcaagcgattctcctgcctcagcctcccgagtagctggaattacaggcgcttgccaccaggcccgtctaatttttgtatttttagtagagacgagatttcaccacattggccaagctagcctcgaactcctgacctcaggtgatccacccacctcagcctgccaaagagctgggattacaggcgtgagccaccacgcccggcctaaaagtctcccctctcttttacacccgtgcccagcagctgccacctgaagcttaagaatgtggacgtgggcactgcgtggcatctctttagaaacaggcctccgggctacatgtctttccatgttaagaacccctgcattaaggtaaggggttttattagaagtcgtggtacagagatactacactctcattgtcagaagagttagccaccatcagtaacttcgtgggcatctcgtgaattcatatgcacatttatgttattaaacttaaataaatactattctaaatttgattcttccaaggacgatatcttagagatttttttcatgcccgtacacataggcccatctcattctttacaacagaaacctggtgtactaattaatttcaccactgctacactgacgataatttaattgtttctaatttttttgcccttagtatagagacaaatctgtagcgaatctgtgtgtgtgtgtgtgagtgtgtatctgcatatgaatctttgtgtaaatgtacaaatatttctttaggatggatttttagaggtgaacttgctggttcaaaaggtattttaatttttaattttgatagctactgctcaattgctttgcaacacttcatcaatctgaaggtgttcatagtctatctgtaattattgtaagtaaacaaaaatgttcaacaaaatgaaaaatatcaattttgtctgatgaaaatgaccccatttttatcattttaatttgcattttcctaattactagttagattgatgatctttatatttatttctttttttgctaattgcttatttatttcccttgtttttttctattgagctgcttgatactttctttttaactcttaggacttcattatatattctacttattctttgttaggtgtgttgcaaatattttatcccaggtgttcacttatcttttaactttgtaatttatggtgcatgcagaagctttcagttgatatgacataaatttgtctgaggtttatctttttagtcgtgacttctgggttacgtgtcttctaagtagagcctttctgagatgagacatagtgttacaggatttcatataatttcttctaatactttttataattccatggattgcttaatattcaattaatcaagaacatttttaagtacctattggagtaaaaaagaaataggaattcaaggattagcatagtgtctgagggtagggaaagcatgatagaaaaaaagcagggcatctctcatgtgcttctaagccttttcaactgtttagaactcacaatctttaggaacttaattcattttttccttcatttagcaaatgtattaaatgcctacttggcgccagcaagtgtgcaaggctctggggatacgatagtagggatggatagtgaactagatgagccctcaaggagcttaatgagacagttgtctgagatgattgctgaaggaattgagggctatgtggagaagtaagagagaagcttagagatctccgggcaaaggaaacgattgtggtgaaaggtcttataagccatgttaaggagttgtgactttactcagaaggcaatggagaccaagtaaaggaagcattttagccagagaagtgaaataatcagatttggtttctctaagggtactctggctaacatgtagagaatggatagttggggcaagactggaacctgggaaaacacactgttgttaagaatttgtcaagagaggaccatggtggcctgatggatagtttcagggaaagagaaagaaatagactaattcaagagagatttgagatgaagaaaagaagcaactggtgattgattaggtgccagaaaaaggaagagacgaggagtccaggataacgttcaggtttctatgagaagctgagcggggtggatggtggaaccattcattgaaataggaaattgagcagcagcgtatttggaggagaagatcatatacagacatgttaaatcatattacacatgttaagttttagatgcctgtgcaatatccaagccagatatctagaaggcaattggtggctttgtagttcaggagaatgaccagcctggagtcattagcattgaaatgatgtgaacatgaggtccaaagccaccaggagagcactgatgtagacaaccaagaatgtgtggaaacctagcatgatcccaatccagaaatgaatgcatatttcagtttgtttcatgcatattacagaatgtgactaaaaagaataacaaaagttacacctgtatacttttaaaattctgaattccacaaataaaatattacatgggaatttctaattcggacttgaaacttggaagttgaggggtgggggcgaagtaccaaatactgtggggaaggacagtgggtatcaattatcttttgagtaaaaaagaaaattcatgactttttgtccagtctgtaaaccaaggttttgaaaaacaaataacaatatccatagctctttgaaagaagaaagtgagagtattgacaagcagcataaagccagcatagaaggtaacccaggaaaagacctgtagtcaagagttttaataatccaacaaaatgtgtattgtttaaatttgccagaaaaaaaagaatcaagagtgatgtgtaaagtataataggaaatatgacaggatagagaccttgaagcaggaccagggattggcaaacagtggcctctgagccaaagcctgattttcttaatagttttattggaacacattcatgcccattcattgacatattgaaggcagagttgaacagtcgccatagagactatatggcccacaaacctgaacgtatttactctttggttctacaaaataatttcgccagccactgtaaaagaccagtgaaaatgcccaaagaaagataagagcatgtttaaaaataatggacagaaaagctaacgagagcaataatattacagactgagcggagggaagcataaacagtatgatctactttacatcagagtaccacgtagactgcaaagcctaaacagaagaaagacaggctcttaactgatcactgcagttattattcagcgggttttgagcatttctgatttatgtagatttttatgattaatgctattagacatggcttctataccaagataaatttaagccaacctaatattcctgaaactaaaatggaatctcgatgatttttgagaagctattccacaaagacaattttactacactatacatttgggcaagtgggtaatcaacttagttaatactacataaccttagctgccgtataaatacagaccaaaaaatgaaaaatgttttctcaagttataggaagccagattcataaccatccgtcacttgcttgggcaagttactgataaactctgcagaagaataacaaacagtgtgtccctgcaccttggctgttgaaaatgagatctttctctgattgatgttagcagagaggcttgtaaaaatgcatttccaactgattagttcagaaggtgtcaatctcatgcagttttatgacctgcagactacatgccagatgtacatttgctttttataaactaacaaagatgaatgactaaatttgagcattcctctttggcaactgtaccatctattgcctaagggaagacactggcagcattatggcgggggagaagagggtaaggagcacttaacccttaacttaccagattaatggagaaaaatataatatttggaaatacttttcctattgaatcatttctacttttgttgaagaatgactgcaagggaaaacctgcaagaatatcagatatttgtgttgttattctcccaagcatatgtacccattcgaaatccatcaagtaagaactaaaggtactatatcataaaacacatttgaaagattcgtcataaacatcaaacatataactatgaattgggatggaaaggttgaggttttaaaaaattttttggtttgtttgttgttttgggttttttttttttgaaacagggcctctccctgtcgcccaggctagagcacagtggtgggatcatctctcactgcaccctcgaactcctgggctcaagtgcctcccaagtagctgggacttcaggtgcacaccaccatacctggctaagttttctaactttttgtagagatagggtctcgctgtgttacccaggcctgtcttgaattactgggcttaagtgatcctcccaaagttctgggattacaggcatcagccactgtgcctggctaattgtttttttgaagccagaaatgatattggagcagtaggtcaacagtctactacttcagaattctgaatcttaacaactatgcttctatttctttgagagagagggagaaaaaatgttttacattattattatatatcctcatgaaaaataagccaatagcatagtatagtctttcttccactagaaatattgagaaatatttatacatttttcatcttcatgcccttttgcctaggaaagtaatattttgataaatttatatgaaatttccaaactcagtttcatttgattttcttttcttttttttctttttttttttttctttgagacggagtcttgctctgtcacccaggctggagtgcagtggcgcgatctcggctcactgcgacctccacctcctgggttcaagcaattctcctgcctcagcctcccaagtagctgagattacaggcacccaccaccacgcccctctaatttttttgtatttttagtagagacggggtttcaccatgttggccaggctggtctcgaactccttacctcaggtgatccacccgcctcggcctcccaaagtgctgggattacaggtgtgagctaccgcgcccggcttaattttcttaaaacatgattttagcttttttccagagaaataaacatgcagtttcaaatggttaacaactcattatcttagaaatataacagacatgaaaatacatgctatcataaggaaaccgtgtgtaatcagatctgcttatcagaaatcctgacccacacattttcatgtgtatggaaattatggtaacaaaaaacttaaaatattagtgtgaaaagagtccaactttataaacttaattcagatattcacttattaagcctttcccccctcccccaactacaaaggaaatagtgaagagatttttagttactgtctctggataagctaggtctctgtcaatttcaggtgacagaaaattgaattcaaacagacttaaggaaaaagggaatacgtttctataactgaaaagcccaggaggtcaagcgcagcttatgtctgtgtctgacctgttagtttttgctccagcccttgctccgcttgcctggggatggctccattcccagcagcttctataccggcagcaaggtggctgcagcaatcccagtcacacagcctcacagaacaagcctggtggaggggtaagaatctctttttagattgtttgtgaaattcgctcttgttagacatgttaggtcacctgtacatttctgaaccaaacaggaagggaaggttatgcacatggcctgagaggtggggaaggccggatacgcaaacgaaaagtttcatctgttgcccaaagaaagggaaagggtctggggaagcacagcgtccgctacttttattcttcagatggccaaaatgacctgctgagccaggccttctcacgtcttgtttcttaccttaccgtgttgttgctgacctgccttttagactgggcaatttaattcaactttgtctgttttcttttatctcagtttgctgtcagataatgaaggagcaagctaacattctattaataagaatagcctaacttaaatcaatggctagtatagtatttttttaaaaaaagactttattttaattgtataaataaaacataatggtcatctagatattttcagctgagcttgccatcacagtggtcagacccagacttgatacttaagttggaagattttaaaactattttgtcagttctcctaagagtgattaaagtcttcagaaactgatatttttattaatctataccaataaatgtaattaccaaggagataaaaattcatgttttcagctgggctgagtggctcacacctataatcccagcactttgagaggcctaggcgggtggatcacttgaggtctggagttcgagatgagcctggtcaacatggtgagaccccgtctctactaaaaatacaaaaattagccaggcatggtggcaggtgcctttagtcccagcttctcaggaggctgaggcaggagaatcacttgaaccagttaggcggaggttgcagtgagctgagatcgtgccactgcactccaacctgggtgacagaggaagactcagtctcaaaaaaaaagaaagaaaaattcatgtttttcaactggtcagtaaagcctgaccttaaaggataatgttatcaaatgatcataacctgaaacactcaaccactaatggatggttatagcttttaaacaggatacttgcatgggccattgagtgtagtttccttctgatgctcctggagaaagcactggcaaattcttctcatccattattccttttatgtcatcaatactataggtcaatttttcatgatggatttcttattatttctaatattatggctgatttacatttaccacattttaattaatacctccattttagtgagtgtattctaggagtccaggctcttgtttaaaatttgggaaatgcctgattttatctggaacacacttaaccttccttagaagaacttttttttttttttttgagacagttttgctctgttgcccaggctggagtgcagtggtacgatctcagctcactacaacctctgcctcccaggttcaagtgattctcctgcctcagcctcctgagtagctgggacaacaggcacctgtcaccccgcctggctaattttagagatggggtttcaccatgttggccaggctggtctcgaactcctgacctcaggtgatatgcccacctcagcctcccagagtgctgggattacaagcatgagccactgcaccggccagaagagctattttattgaaaggtggttggctcatctcatccattttatattgatttgtgtttgctacacttcataaactttcactttctgaccctctcccaaattttagagcttcgtcctacatagattcctatttatcatacacacttactgtgctaactcctagtgcattttctctaaaatatagaatatttgagtagctttacttacaactaatccatattccttcatactcctaccaatagattgttctaatcactaatttttttatttcttactcagaacaaacattatatgattcttttcagccatctctaatccaaatatttactctctatgaaggcagatgcaagtagatttatgtgtcacatactgatggggatatgttctgagatagttgctgttaggcaatttcatcatggtagagcatcatggcatgtacttacgcaaatctagatggcacagcctactgcactcctaggctacccatctgtacagcatgttactctactgaatactgaggcagttgtaacacagtggtatttgtgtatctaaacctagaaaaggtaccgtaaaaatacagcattattatctatgggaccactcttttatatatggtctgtcattatgtggcatgtgactattgtatttctatttcttctggtttcaaaaagtatgcctcatagaaattactatcagatagtcgggagaaatcacttgatgtgaaaaaaaaaaaaacagtcaagaaacaaaactgattctacattatggcatcaaaaggaaaattctcttactggggaacatttctctctacagatggactcattgactgcatggatcccgattgctgcctacagagttcctgccagaatcagccctattgtcggggactgccggatcctcaggacatcattagccaaagccttcaatcgccttctcagcaagctgccaaatccttttatgatcgaatcagtttccttataggatctgatagcacccatgttatacctggagaaagtcctttcaataagaggttaatgcttcttttccatatgtagatttgtaatgatgttatcaacagttacatacacttatgtgaaatactcatgactgtgaacctgaggaaagtgctgttttttaaatacagtttttcctctttctgcagattcttcaccaaactttgtatttcaagcatttttgacacagttcacatactttgtcaatttcagtacctgagacataacaggacattatattaaagagtcaataaatcttcatttaactagttgattttgttagcacagttggaaatgtttcaaaagaagcagtgaaaagaccccaaaaggcagaacagaagtgcacttttttttttttagctgagctcactaaataatataaattatgaatgaatgtaatggaactgctgacggcatggcagtaagattgcataagctgtttgactggtgctttgcagagcagtaatgacctgaaagtaaagcagtaagtgaaagcaggtgtcttgtgtctcactgagcaaaagaagatgatttacaccagaactcctgggtctgcagtaatttaacagcattaatgcagttatagccagcagttgattcaaagttgctgtacaaatgttccttatcgcccccttaaatcttatacttcttggtccctgaagatttactgattgcctcagaattaattggaaagtctacttttcttcatgtgagcaccatatatatgacttatgaaaaaagcacagagtttatcattttaaaaattcatctctaaattattagtcttgataacgctccaaaaaacagattgccacaaattaaaacccaggataaacacaagccctttagagaatatgcgttacactgaattaaaagggacattgtcttgggagtatttcaggtctgatttttgtgaataacgatggattgcatagcatagtgttattttatccttaggttgaattatctataaatcatgataatgttggcctgaaaagacagatgttcattctcattcttctgcttttccaacagccttgcatctgtcatcagaggccaagtactgactgctgatggaactccacttattggagtaaatgtctcgtttttccattacccagaatatggatatactattacccgccaggacggaatgtgagttagtcccatcacactatctctgaaggatttgaaatataaaaactagaccttcctgtaccactgtcatgtttgactgtccttttaaatatggaaatgcagcaactttttagactctacaaacttgtgacagtacatatggcagagatttaaagtcatatactcacatacttcttcaaaagttgattttattttctaaggcatggtaatactgtagttttgtaggagaatgctctttgtctcagcagatgtatgttgaaatctttaggggtaatattttataatgtctgtaacttgagctcagatggttccgagaaaagagtcaatggaaagcaaatttggaaaaaaaaattggtgaacttggtgaatacacataggacacaagagtatttattgtataactcttggaatattcccatagatctgaaaatatttcatataaaagttgggagaaaaagttgattttctttataaagcatattaacttaaggaggtgtgtattggtagttatgtgggatccagacaattcactaagcataccttgttctttcttaggtttgacttggtggcaaatggtggggcctctctaactttggtatttgaacgatccccattcctcactcagtatcatactgtgtggattccatggaatgtcttttatgtgatggataccctagtcatgaagaaagaagagaatgatattcccagctgtgatctgagtggattcgtgaggccaaatcccatcattgtgtcatcacctttatccacctttttcagatcttctcctgaagacagtcccatcattcccgaaacacaggtaaaatattctcacaggcagtacttgtaaatacaagatcttcagatcatgttttgccagagaatcttaaaaataggttatagagtccgggcacggtggctcactcctgtaatcccagcgctttgggaggccgaggtgggcagatcatgaggtcaggagttcaagaccagcctggccaacatagtgaaaccccatctgtactaaaaatacaaaaaaaaattagccgggcatggtgatgggcacctgtagtcccagctacttgggaggctgaggcaggagaatcgcttgaacccaggaggcagaggttgcagtgagccgagatcacacactactgcactccagcctgggtgacacagtgagaccctgtctcaaaaaaagacaaaaacaaaaccaaaaaaacccacggattatagaattccagtgctatctttaaataattctataagaccctgtctcaaaaaaagacaaaaacaaaaccaaaaaaaaccacggattatagaattccagtgctatctttaaataattctatagaatgaatatatagtgggtgttggggtgtgtgtgtgtgtgtgtgtgtgtgtgtgtgtgtgtgtgtgtgtcctacagtagacattgttatagtaggatatctagttatttcttttttctttttttttttttgagacggagtctcgctctgtcgcccaggctggagtgcagtggcacgatctcggctcactgcaagctccacctcccgggttcacgccattctcccgcctcagactcctgagtagctgagactacaggcgactgccaccaagccaagctaattttttgtatttttagtagaggcagggtttcatcatgttggccaggatggtctccatctcctgacctcgtgatccgcccaccttgacctcccaaagtgctgggattacaggtgtgagccaccgcacccggcctttctagttatttcttaaagatctactcaaacaaaatactttttcttcaggatataccttatatatttattaataatagtcaaatgaaactgtagcttaaactcaatcactaataatgtctttgttcatttatttatttattgaaaaaaaactttagtgcctaaatgtacctgacagcttgactgacattgtaccaagtgctactgacaccactcactattgcacatggctattagcctcaataacttactgtttaattattgttgtcagtaaaaagtgttttggaaaaggtagttttgacagaaaatattcattaatataactttttaagaaatagccatgcattccccattcgtttcatctactgaaatagctgaggattgtgttccgtcccacatgtttccagttagaaataactttcagatcttaaaagtaggatgttaggtgtaataataatggattttgccaggcggcgtggctcactactataattccagcactttgggaggccaaggcaggaggatggatcgagcccaggaatttgagaccaacctgagcaacatgacaaaaccctgtctctacaaaatatacaaaaaattagccaggcgtggtggcatgcacctgtagtcctagctactcaggatgcagaggtgggaggatcacttcagcccagagaggtcaaggctgcatgagccatgagtgccactgcactccagcctgggtgctgggagtgagaccctgtctcaaaaatatatatataatcataatagactgtattcgtaaagaggtaaggaaaaatctgtggtcattaaagtacactagcacatagcagctttgtcatattcattctcccgatatttcttgaaaacccgttctgtagcaggcgctgttatgtgagaacaaagcagtaaaccactcagatgaagtacctgctctaactgagcttcccaactcatgagtggagagaggcagtcaacaagaaatatgtcaggttgcgatgagacttatcaaaaaataataaagcaggggacagtggatagaggtatgatcttacatagtatagtttgagaaaatctcttcaataaggtgacatttcagcacaaactttaagaaagtaaaagaataagccctgaaaatagaaggggattcttggcttgttcaaggagtggcaaaaaggacagcaggcacagctggagtgaaggcggcagtgaataaatcacaagccattggagaccatggcaaagataactctttgagaattggaagccattgaaggtgtttaagcagagcaatgacagtcactgatttcctcctttaaggaatttctatgctgagaatatcctatattgggcaagggtggaaacaaggaggccagttaggaggcaacctcagttgtccacaggagaaattatggtggcttggacaaaagtctttggaggtagaagcagacatggaagagtggagtccagggaagaggttgaaactaaagaggtaaatttgggagtcattcgcatataaatataaagcataaacctagggagggagcacagatagagactacaagaggtgagccagaaaggtctaggataacaaaaagtcaaaaaggctgacaggcaaagatgttgcaatagcaacacctcagggattcattgtaaaatggtcaagccaactttgagctgaaacttttaagaagttcattgtaacctcaatcaatttaatacttcctccccaggcccatcttgcaggaactctaaacttcgtagtcagtcctaaaatagactttacctagagtcagtatctgtctgtaggtgccaaatttctagcaaactaggacattaaaatgggtttcagatagtcaacaattccatgaatacatggagtcttttctccattcgttcattcattcattcatgcggtaggcaaatatttcataaaaatttactgagagcctactatgtacaaggtactttactaagataaaaagaagaagacgtgcatcctgccattctaaatgcgataaagattttaatgaagaatgatacaagttcaaaggagaggtcaattcctaagtaagccaaagaaggaatcactgaggagtttgggctgaaacaaggattaggctggagagggaggaaagcacgtttcagattgaagatgtgtaagcaacagtggagtggcaaaaacaagtcatgttgtagaggggacaatggggaaggaggcagaagatgaccccagggccagctgatgaatggccctgagaagcaatctagtggagaccttgaattccttaggtgatgcggaaccaagaccccagtggagttttttcagcatttctctaaagttaactcaagtggcaaaacgcacttgaaagaagcgcagaagatattgatagaaaagagaaatgagtgaacaggctgttcttgtgaagtgtatatccatgcgtatccagggctcagatggagagggcctcgcaatcacaatggtagtggaaatgaagaagagggaacacattagacagggattggaagatagaattggcaggacatggttcctaaccgaatgtttaacgggatcaggaataggatttaaagctcacgcagctggcaagagtaggcctgatggtttattttcccactttggctggatttacctttcctactaatgcaaaataacatggtcaagttaaattacatcagagaaacacatgctttaatgaacaaaattacagatattaaaatcaagtacaacacatgatattttgaaatagagaggcagcttctggaaggtcacaggaaatacatataatattcgtaagagagtcccttactcatggaaaacctgtcaaatgtatcggaaattattttgaaaataagaggaagcaaatgatgggctttagggttaaatcacatgttatcagggtcattctggagtcacagaatctatttttcaaattaactccttgatatttcactgattatgggagaacaatgagttatctttaaaccattcaccctaacaacctacagtcttacaaaagtaccctcaatcttaaatttaatggtttccctgggtctaaaaagtttctatatgtttgtaaactattttgcttaagaccgttttgtggctgaattcagtcagcatgtttgaaggaaaactccaatggtaataaattcgtgtatctacattagaaatgcctcttactgtactgtactgtaccacatcgcgtccctcttcatgccaacactgactgacaggccagaatggaagcttccttcgtccattcattcatgctgcttccaactgtgtgattgtttatattgaagctgacagctccaccctcagtacaaggggtcttggagggttttactgaagttattaaagtttggaggtggcagatagacatcatctttaactgttctatgtggaggtggtggggaaaggggaaacattgctgaacactgaatcactattctaagatctttccaacatgaaaaggcagccctttctgtctgaatagtgaatcttgatagggcaatataaggaagcctttgagagtactgtttaattcttcgtggagaaagtagtgagttcctggtgcacgttcttgaacacagatagccttgcacttacagcctatgtagaaagcctatgaagagctgttcttattcaccaaactaacaggagcattggtaaagagaatctgaactctttagaaaaattgtgtatgctgcctaaaatacatttttcaaaataagtaatgttttggcataatgtattttgcatttcttaatataaatattgtcagcatacactgactggtaatctatggggttaagagtataattttttttaatttgtaaaggagataattcttatgcacataattatattcatttttacagtccagtttcaaataaaaaagtgtgaattgatatgttctatgtgcatttaataacatattagttgctctctaggataaattgtatggagctttaaaatattagctaatttaccatcatatcaaaaatccatggtaagttggagctcaatctttaattatgacaatgtgctattattacattacctctcaacatggatatggaatctgctacaatctaacccaaacgattgggtgttttttgttatccttactgtctttataggctgtgaccagccagctgatgaggctataggtactggtttagtccctaaatgagccagctggcacaggccagatctttggcctagactgcatccctgttctgagctaaccatcttacaaatgtctgctctaattctccagggtgatggggtgaaagatgggttagtgagaatccactgtgactactgcactaacaagtcagtgcatgtcagcctgatggagcagtcacagtgtttcccgtatgaagagtagcacccgaggtatgattaactcagaataaatgacaggaggcttttaggaagagacatttgggctggcagcagagttatttttaattattgaataagataacagctcaaatgcatatttgtgaatagtgattcttttgtgttttattttagttgctctaaagcagctaaaataagcacattgtctttgtgagtaagtaaactaagacacagagagtcactattcacaaatatagtgaatatgtgctacataaatatattttatctaatcgtcatacgtgatcacagtttgaaacttctgctttattcaaacttaggtactccacgaggaaactacaattccaggaacagatttgaaactctcctacttgagttccagagctgcagggtataagtcagttctcaagatcaccatgacccagtctattattccatttaatttaatgaaggttcatcttatggtagctgtagtaggaagactcttccaaaagtggtttcctgcctcaccaaacttggcctatactttcatatgggataaaacagatgcatataatcagaaagtctatggtctatctgaagctgttggtaagttccatataaatctttgctgcagtgaagtttttctcaaagccagaactatcataaattaattgtaacccagggaagtcagtggataaacagaatataaagagaataaggttgtcctagggatattataccttggctggtttagatctaccgtgggaaaaggaatgtactccatgtggcaagaagaagaaaatatcagccttttctggctgaaattatgttgtagaggaattctgtgaatgaggtttcagcttgtcacatcctttctccccccatgtttctttccttattttgtccctttctttttccattttcttcttctctttataactttacctccctggatttccttatttgtttttgttttctgtgtctaacactaatgtagtttcagtgcatactgatgtttaacaggatagcagacatttgtgtccatgaattacatcagctgttttcactagaacggccggttcattcaatgaaaggataatcaaaccagttgttttattgaatgactgaacagtgcaatcaaagtgtgacatgttgagagacagacagagagaaagagaataggtatatagtatagcttcaagctcaagctcagaacataaaaaactaaagaatgatatgtttttgttttaattagtatttaccttaaaatagaacattgtactctgaaattaataggtaatttggatttgaattagttcaaatcaatccagtaattgccacttctcctttcattttttctcaattttaaattccctgtttcattgtgaactctggaaagcttttcatctgtggtttattcatattactgctagtttgtttatttctgataataatatgtcagcataatgtcataatctggctagcttttttgttccattgaaccttacttatcataaatattttccataatttaacactcttgagtgaaaactaaagagttctaattattcagatggcaaacgttatttttagttgttatctaatcactgtttgagactgactgatctaattacttaaccggctgcccaatctggactttattttgtgctgtgaacccctcatgaaggggtggtatggggaaaaaaacactcattttctattaaatcagtggaaaataatatttggagatctttttttaaaaaaaaatctttggtgaaatcttcttaaattaaaaaataaactgctcataaataagtggaaatacagtctcagaacacagatgtgaaaaaggcagttttttccaagtaagaaaataaattgcatttcccccagtcgttggaaagatgagctgtgatttgtttggattccagtgtcagttggatatgagtatgagtcgtgtttggacctgactctgtgggaaaagaggactgccattctgcagggctatgaattggatgcgtccaacatgggtggctggacattagataaacatcacgtgctggatgtacagaacggtaagctcttgttcatagataactgatgttgtaatgtattgttcagagatagctaatgttgcccactttccaactcatgagattgtagcaacattttatgctatccatgctgtaggattagaaatggcagaaaaaaaataaaggtgaatttttaaagattataaaagcctaaagtgggaactgtataatactttcttaatatactttaaaatgttcatgaattgatcgccaaaatgattttcccattagaatgtgaaagactgactttggtgttgtaatggaagatctctgagtgggagtcgtcagcacagattcacctagagtgtctcattctacagtgagtcagtgagtgtgagccaaagtactttagaaaggtttaccaaaaatggagggaggggggatttgttttttaaaataaagaaaaaaaaatcatgtgacttcaccaaaatatttttagtagattttaattctcgggtaattattctgagtatctagatttttttttttcagttcttctcagactattagggaaataaagcattctgccactcaaatggggtcacatatattgttacttgacttggtgaatattaggggaaaaaatgaataatctgagaaaaaagcaagaatcaaaagcgttcctaggagtagacctgataatgtcctagtgaatatgctctgaagaaacatgtttcaaatgccgcagaccaaaagaggagtatttgcaaaatatgaccagcttaatctcatcaagaatattatttatatgaaacacaattctgttgtctagactgtgtttccaacattttgcccacatgctagctgcatctcagacaacctgaagggtgctttgctggaaaagcaggaccgtaagttaatctattatactttagcatcctgtcctacaccatatcatactagtactctacttttactgatagccagagaaaaaagtcacagtctcagcaaaataatctaactcttgactttgcagaggtttttggaaggttcagaatattgacttgaccatgtactacaattaaatgtttatagctaatggtcagtttttcatattaatgttgcttcagtgttcattcctgcttgaaacaatttttttgtgtgtgagtgtcagagagggtgcattttaaccttccaaatatatacagaataaagtagttttaagaccattacttgaaaatgctcgtgctgggcctgatgcagtggcttatgcctgtaatctcagcacttcaggaggccaaggcaggtggatcacttgacgtcaggagtttgagaccagcctggccaacatgataaaaccctgtctctacaaaatacacaaaaattagccatgtgtggtgatacgcacctgtagtcccagcaactcgggaggctgaggtgggagaatctctggaacccaggaggcagaggttccagtgagctaagatcgtgccactgcactccagcctgagtgacagagtgagactccgtctcaaaaaacaaaaaaggaagaaaatgctagtgccttccctccaggaaataatagtctgagaaaaccagtagtaaggaaaaacaaacaaaaaagcagaaaaacccttccctgcttcactattttatagcagtatattaagctctacaccccttccagttacgtcctggacatcaggatgcagttcagtttgcaccccgaattaaacagagcggataactagtgccacatgcagcacacattgaaaaggtgggactcctgactaagcaggggactccagtgttctctcagagcctctcttaactcatcagtggtgtctgaagcagtagtagtttcattctgttatattagtagcacaaggttcaatcatggtcttttaaaatgcgaagccatatggcaaacatgctagtagctgctcttgatgaaattgtgtaaaattatatttcacacagtttgaacatatttctgtattccttcagaaaccctctaaaaacaaaactaggggaaacgtctctagatgccatttagttatgatgagagtatagggtaaagttcataaccagttagctacaggatttcactcaagagattacgaatcaataggaaaactacaggcatctctgtagctccgaaaaagcccatgcctctgtaattcaccattgtatgatacaacacacgatattatattcaggaggattcagaaatatgtagatgttctgtatatgtataatataaatacacacatattctaaaccagaataacatatgggtaacttctattaaaataccagggcagatgtaaaaaccgaactttccaaaatgctgtcctcaaaaaaaaatgttctaaattataaaatatatttaggccgagcacggtggctcacacctgtaatcccagcactttgggaggctgaggtgggcagatcatttgagatcaggagttccagaccagcctggcaacatggtggaaccccgtgtctactaaaaatacaaaaattagccaggcttagtagtgggcacctgtaatcccagctactcaggaggctggggcaggagaatcacttgagccagggagacggaggttgcagtgagccaagattgtgccactgcactccagcctgggtgacagagcaagactccatctcaaaaataaataaataaaagaaaatatgtgttatttttaaatgtgagataacctcagccacagggtgaacagattgcagtttagaattttatccaagaacattttgacaagtagtggctttccaaagtgacatgtgtctaattgaataaacaaagtgatttgtagtcatgacaaggtggatgagctatagaaagacatgaaggaagaagagaatacggaaacgtagatgctgacagttattcgtgcgggcgccctgaaacatggaaataaatattctcatgttcatctttctgttctgtcatcatagagaagaagcaggaagggccaatcgttcaaagtaatgactgaataaatcagatgttgtagagcggtagtctgacttgtaggattcttctgatgaaaattacacaactggctcttataggaaattatagctccataattatcaactaacgtaatcacagaaagaagaatcttagatatcactaatgcattctttgaatattcaaggcaaaatgcatttcacctcttgttatgatccagccttatttagcttatttttcttaaatttgaataaacctgttttattttccctgatttctttatgtaaatttgctatgattattacatcacccaaatagcaaagcattaaagaagtaatcacagaatgcacctaaaatgtgctgagttataaggagaacataattattctaatttcttcttcactttaaaattatcccgaagtggggggaaaaagcactttctcaagtttcctgattgtactttcgtgggattattctttcaacagtgtatctgctaagaagtagggccattatctctgagaacttctttggaacatagaacattcaataaatagaatatatgccgctctaaagtcaaagcagcaggtggtgtatacagatgataacacattgagaagtgtcataaactgtgcatggaacaatagcagctgactaccccgtgtgcatcacgccaaactggaggcactgatctgtatagagcaatggcaaaagcaataaaattacaatctcaactcaaatctaatttctaaccatgaaaatatttaatattcatttggaagcttttctcagattttcactgaagaccataaaagagcagactggcattttgtcttgataaaattattggcacttccatgccttaaagcagaattcactgtaaataatacattggccttctacaacagttttgttatgttcgacattttgaataaccgcatgtatatgcattctcctattggatgagagtgtacgcaggaatagtctttgacaggataggtagagttaaaataagcctgtattatcgttacagctttggagtttgatgtctattttctacctttgttttccacaaagtttgttaactttaaagaaaattataaattcaaaagaaatttgtattcctggttcacatttttattgactgaatattttcaatattgattaacaatgaggcaaacttgttattccctaaagaacattatgtagagcctgttctcaaacctggttgcacgttaagatcatctggagagtttttctaaatttcagggctaaggctgcacctcagacaaattaaaccaccatctctctgggtgagaaccaagcattaatattttttggcaactccccaggccattccagtgtatagccatgactgatcatcactgatgttgagaattggggttttaattcttctcaggcttttgttcctttcaccagacatgatttcagttcacagtagacagcactgttggtatatatcctatggactttatcgtgtaatattttacactaggtagttgaatacaattcattccaatggagcttcaaataagaatgtcttaatccagacctgacaggcattgaattatagttaaaacaatcatgaacatgtttgcttttcatctttacactttttcatcataagaaaaacaatgcactttatttcttctaggtatactgtacaagggaaacggggaaaaccagttcatctcccagcagcctccagtcgtgagtagcatcatgggcaatgggcgaaggcgcagcatttcctgccccagttgcaatggtcaagctgatggtaacaagttactggccccagtggcgctagcttgtgggatcgatggcagtctgtacgtaggcgatttcaactatgtgcggcggatattcccttctggaaatgtaacaagtgtcttagaactaaggtacgtctttcctaaatttgggcttttaaccaaagctaaacgtgcctctttaaaaaaaaggttgagtctgatgtactgatttattcatagaaaaataccatcctaaggtttaaaatttcccccagaaagaagtcaaattcttgcttaaagttaagagaagcataacacatataaattgtcccataagtgtattaaagagcataaagtcacccaatatatcaaatatcttactgatttcagtgaattttctgtgctctaaaaggctagagctatgattcttaaatctctttcgctttctttagaataaccctgtgacataggtgtagctcttttatttcatagtggttgaaattaaggcataaaatattttcctgtgatttcaggacctgatattaaatggactaaggctacaacttttaactagaatattggatcttcaggttgggttaatccattagccataatgccaatagtaaaagtaacatattgtctttgctttgttcatttaagtgtgactttcaaatcattctattctgtaagttatttggtaagccctagactacagaattcatttccagtatcatttctgccaagttggcaattttccatacaaataattaaaatctcagaattcaactcattatattttagaaggcttttctaactgtgctttctttttttttttttttttttttttacctttttttatctgcttccaccaagaaataaagattttagacataggtaagcatcttaccttaaggttattgtatattttcaaatatcctttttacatttcaatgtgaccctctgaaattgttttctaagaatatttcatcatgagagaggaaactcagtatcacacatcatcgaaggaattaaaagtgcttaattgaacaattattatacaatatattgcgagttatttacgtgatataatttgagaaatctttctcagttggttcataaaataaatttcattacaaaaaagtataaggaatatctctctataacaaaattatttccaagcattagttactgaccgacacaatctaagccatgttgaacagcatgaaacctgaagcacagtaaggaggtttgagaaggcctgcctggttccaagaaaacccctgacaggttgggttttattggagactgtttaagaaaaagaatctagaaatattttaccttggcaaattttttaaaacatacgattatgtgaacatgtggcttggcagagtgagaggccccaaaactgaagcttaattattagcttcccgtaaattcctctttgcctatagtttatattttcctaagttgggagaattactagatttaagaagtaatgttttcattgccattattatggaggaaatgactttcttcaaagtgaaggacgaatatagttgaagcaaatatatagactcagaagtgtttcatgtctgctttctgtgtacacgtagctgcagaagatacaataaagacttgtatggacacatttgattgaaaaactttgctcgggatagaaaaaaaaaggcggaggaaaccaatgttttaaagtaaagctggcaaaaagctagacaggttagacatgctagatctagtttggtcattaaaatatctaatgaaatgatatcagatagaaatattaataatattttatgtgaggtcttttagatgaataagtcaacataacccatttaaactgttgtgtagtgattagcaaacaaaaaccaaactagcaaacaaaaaccaaagttctactgaaagatggatagctgtcgcatatcagggtgaccaaacctggccccatgatcttttcctgagatcccctattgatcttaaacttgcagctaatagctcagtcacatgctaaaatcaacacttcatctccccaggatactgagcgtgcaaagctctgctattagaaaccacaatagaatttcaaaaacttgctggtcttgttttcttggtagctgtggagaaaagaggaaagacagacaggttgcacaccaagtaaatgtgaaaatgctggaggcaatacagaaaaaactatcaaagcagctaccttttaacaagcgggcctattccatgccgggcatggtgccagatattttatatctgttattgcagatccacacagcaacccctcagggttataagtgacgtagtagaggctccaggagattatgtatcttccccaaaatacatatctaagaaatgggtagcagacagttaaaccactctaaaaatatgttctttccacggcaccacacagccggtttttctgtgtcccagtggccaagattctaggggctcattccctgggtatgcaaaaagcaagacttatttcacaatcattttacctgttatttaaagccataatctctccctctggaaaaaaaaaaatctatgaggttagagttacgtctttattaacagtagaaattcattttgtactaactcctggtgtttggcagtgatactattgtaatccctctctcatgatcctccataatccttctcctctgtccatcatcctaactacatttgtgcttctgcatttcctttatgtgccatgcatgaagagtacactttttgggttttatatggatatttaattacatgaaatcaatcagcgttaactgatcacttaccgtgtgttaggcactttgaaaaataataatataagacaaaatacctcctctcagaactcacaatctagcagaggagacaaggtatatatgtgacaccttaaataacattatcagtatcattctttgacacttaatcatacccgtggtccgtggtttcaaatgtgagaatagttctgtaaaggaagagattactgggagatggcactacggtaaggaaacgttttctggaagggctgatatttgagctaggtctaaaaatgaagtctgcttaaatagaacagcaagaagaaaagagggcagtcatgaagaaatagagaaagcaagtaaagttactggagactgggggagagctgagcaagacatgttctgagagtaatcagacccacctgaatggaacagggggttcatggtggtaatcacgagagatacaggcagaaaggcaggggagggtcagattgcttggggccttgagggctctaaggaattattctctcctataggatacctgagacagtggggacccattttaggatcctgaacaagtggcacactcaaagtggccttttaggaagagtaatttggtgtcagagttcaaaatgattgaacatcagatcaattagaaagctgttgcagcttgagatgctagatacctaaaacaggatggttagcagtgaagaaagccaaacgataaaataaacggaaggagagaatggagagtatttgtctaagtgataagaaagaggaagatgtagagaatgtgtaaggtctttgagcccaaatcatcaaacatgatcatgtcattgataaaatagggattccatttgcttagtaagtaataaaattgacctagcaaagtcaacatattttagttcattggaacttcttcttttagcttaaaaaattaaagttcttttcagatgcttcttcctgtgtacctgcctatcgttaccttccctttcctggttaataagatccttcctggcgtgctccttatcctcgctttcttgggcagcatgagtcatgagaggcttaggaacaggtcataggaagaaaaagaaatggaaaagtgtgtctaaatctacaaaaggaatggtattgccagttgttaatgattaaaatataaaaatgcaaactttttatcctcttctatatttcatatactgtaaacagtctcgttagttggactaatgggggaataataaaaatattgaataaaaattagtataaaaacacattgtcttattttaaaattcagagagtgttctgttatatcaaactaataagcaccaccaggatattacctgaaataaaaattcttagctatactttagtgaataggtataaatgttactgatcaacatattaaactttttacatacatagaagctgctacaattctttaaaaatgtctttcttttagatgtaccaaacatttccttctctgatgtttatagtattagtttgctaaggaacccctttaatatgtagtaagttttacctcatccttgttccaattctcacacattgcaaaatttaaaaattacattaattaactaataccagccaaagggcacttaaacatgtagaactaaaaatcaactttgtgaattttatattaccaattaaaggatcaaagaaagtgtcaatcataagtctgtgaatttgaatccattaaagtgtagataccaaattataaaaattttattcagtaccccttattgacttaatatttaaaaatcaagcaggcatggaaatatcacaccccaagtccctgcttgcaatattctaaacagtcttttggttaccataaaagaagctgttttacttttatatgtgaatatagtttgttatgcttcttcaaatgtcttgtgttctaaaggctgtgacacagtttccaactcagaagatagaagtgctaataatatctgttctctggcttgttctttgtgaatatttctctagtctaagaaggttgaattatgacaaaataaatgagcaaatccagcctgcacttaccactggatctgtgtctaattgaatgagactagagaagatgtcttgataattgtgatgatctaggcaattcaggatgagttaagaatcaaggtgtaatatactaaaggttcttaacttgatctcagtttccttggttttgctattagtcaaaattgtaatatttcaaacctttctgaaatagtgaaatctcaaccaatcacatgagaatgctgctgtgcttccgctcagcagagatttcccaaaaccaagcattttgaaaatccctgtgctccagctgctggctgcagccggttccgtcgtggtagcctcacgttttcacagtagatagattactgacctaaaaattcaccactcgttgtacccacacacccgcctcttcagtgctttggcttttcagaaagttggaaagcaagcacgagctcacactgtcaactctctatgctcaaattaggtgaccttgaatcccagtcctatggcatatgattcagagcttcactgccaccagtctgtcaactagaaatatccagactcactttttttccttttagtacttccatgctgatccctcttttcatttaggagagaccagcatctaacaaccagctctaatttgccatcctagcctgcgctgctgggaatttgtcaagttctcatttcctaccatcctgtgggaatatttccagaggctaattctcttctctagggccacgtagactcccccacatttgttcttctggacaatagagttgtgtccaaaagtacagctttcatttatcagacatttttaaagccattgacatttgttgcttgatggagaaatttctatgtcttctaggaaggagatgcttcaggacaggaaataagcaaatataagcaccactttgggcattctctctttacttccccactaggataaaactgatgacaataaaggcaaagcttatcacttgaatgtccattcgtttttgcaccaagaaaactcacgtcccatagctaaagaggatgccaccaccactgaagctgccacctcaataatctgtttgtttgttttttctcaaaatgagggcatcctgaggaagtgtgcatgattcatttaccatgaatgaatcatcattgttcatcattactctctaaacaatttaaagtgggtatattgagtcttcattattttaatagtttaggatattataaactgctgttataacagcagaagtaaaaaaacaaatttaaacctaaccaagtttaggtttaacaaacctaaacctaaaccaagtttaaacctaatcagtttttttcttttaatattttcagaaacaactcatactttagttaattattgtattcctgcactttctaaggttataaggcaaaagacattgcactgtaggaagagacaggacaaaagcgagtataaggacggttaattcttagtgagtatgtagtatgcgctaggccctgttctaaggatcttacatatatagttcgtgtaatcctcccagcatcctgtgaaatatgtattattatcaccacctttacaggtaaggaacctgaggcacagataagttaggcagcatgcccagatcatacatttagtgttagtaatgaagttaggacttaaacccaggcaatcgggtacagagttcatactcaaaagatgtacaactgagaagaaaaaaaagtatgtgtgttatgtatacacatgagtgtatgcataccatgtacacagctagtcacagttaactgtataatcagggaggtaggaaagactagaggggcctctccaatgtcatgtctttcaaagtagactcagcttggtggagttgcaactctgtcaccaattatatatacctgaaagaccagctgtgtcaacattagactgtttatagaaaggaaaaaaaaaaaacctctaaaattgctctgaatgttatattgatttgtaactcttcacttcttacaaagtaataagctgccacattaagggatgcaatatgtgttgctgcattaagattgtaggcatcagcttaggaaaatgatatcataacacttagcacagcaagttgatcacttggcataacccagttgttctgaaatgtttttcttgcacaatgacttgcatctttctgagttcatcttactttttaccatttcacacacatttacacactctaagatgtcttgccctagtctgtcttttgtcactcaaaggctggaaaggagatcccaaagctgaaggacatacaaagctcaagcctttgtatgtctttgtatttctctgtatactaacatcacagcctaagagctcttcagagctccacaaggcctctacagactccatgtgtgatctgctggcctcctctaacaacatgagaaacacttaaacaattttaagaatagaatctcttacaggaatgataaagtacagctattcagcacttagacggaaaatcatcaagtagtgaaaattgttttattagaacctaacctcattggtaatgaggagactactgcatcactattagaataaaaatattcatataggtagatttattataaatattttagatgttcacaaataaaataaatggaaacaagcatgtaactgtgtgtgtgtgtgtgttcgtggctgtatgtggaaagagggagaggaagagagggaatgagaattaattaatataactaagttcgtcatcaaaagatacatggagtttgatagattcccatcatgttgacgtcttggttgggacaccaaatcatttaaattatttttcaggtttttgttcagaagacaatctttgcacatgtacaagattacattaattttaagaatgtggcattgagtgtctgtaaggatattaactttttaattccaatgatacgtcataatttgtcccctccttaacagtgttgggcttaccattttttacaagtaatgggacataaaatgttttacatttgcatttctttatatttataaaactgaggcactacattttgtatgtcactacattcatagacaggtttcagagcagctcagtatacaaactttggaaagaaaactgaaggatccagcatcctagctcactgccacaggccaccaactaagactcccccgtagacttgaatgacctcattttaatatttaaccccataggacagacactggcacttttctggattatgatagagcaaccaagacagatacagtggtacatttcttcagggggagggtttttagtttgaaaggataataccctatggtgaggtatgagcggaatcagtagtatattgtacttcactggagaatttgatggagacatgcttcccctggaataaactttatgtccctcattcaggggcagttttttaatggctttgcattgagcacaaaagatttagacaatttgcttctttgttttagggtagacacatactgccttttaaaggtaatattttttaagatgactgttagtaaattgttgaatcctcagcgtcaggcaaggaaggcaaacagtaatatcagagaaatgctacctgtgagcacattcttttgagtcattattaaatagacagtactattcatgtctaatctttgatcatggattccagactataatcagtttctcatgatctgttttattttgcttttaatttccctctgtgtattaggagtaactccctttgatgtttatctatgatccttttcacagcagcaacccagctcatagatactaccttgcaacggatccagtcacgggagatctgtacgtttctgacacaaacacccgcagaatttatcgcccaaagtcacttacgggggcaaaagacttgactaaaaatgcagaagtcgtcgcagggacaggggagcaatgccttccgtttgacgaggcgagatgtggggatggagggaaggccgtggaagccacactcatgagtcccaaaggtaccggcagttggcgatttgaggatttctttttatttattaaaaaaaaaaaaaaaggggttgaaaatccatttagtgcctagtcatgtttaatgctgagtctaactttttacctttgacagtgttctggaaagctgtttcacatctagggtttttaaaagccatgtagcatgaaactgctagcatcctaacttggttttacagtaaatactaggttcttggcattttttattatcataccattttatcagctcttcaaagaatgaagcaactaactactctatataattcaggccacatcctgttcaacttcaaggaagtatccaaattctttcatagtcctggaatttctttgtcatgaatgagtcccaggcttctttaaaacccatcactaagcaaccctgtgagccctcaccctctttggagagctgtgaaacttttgtttctatgccatgggaaaaaatccttgctgagaggaattttgggaggtaacagggctaaaaaaattctacgtgataaaggcttttaaaccaggcaggaatgattccctgctcatgtattatggcactgaatacaatgtttttggtttggggcctttatttttttcatggtagctgctgactattatgtgaacaaggactggaaaaaagtatctgtactgaattattcataatagaaaatttcattgtaacggggtcaacaaaacactaaccttggcttagatctatttttgttagaaggatatggttactgtaagggagctggaatggaatttgaaactggttctgtaatttatagaccacaacattatataatcattgtaatttatatttgaaacattcaggtattacctgtgtgatacatatactcacaggagattctgacaaaattggattatttccttactgaattttttttttttttttttttttgagacggagtctcactctgtcgcccaggctggagagcaatggtgcgatctcggctcactgcaacctccgcctcccgggttcaagccattcttctgcctcagcctcccgaatagctgggactacaggctcacactgccacacccagtttttttgtgtgttttttagtagagacagggtttcaccgtgttgcccaggctggtctcgaactcctgagctcaggcagtccgcctgcctcggcctcgcaaagtgctaggattgcaggcgtgagccaccatgccctgcctccttactgaatttttaatttatttgtattataaatgcctgtgttggttttttctaacgtgtttgcaatctgcagtcctacctgctacctgtcacccgtgttgtcactggggttaaataactgagtttaataatgggcctaatagttaatcaaaagtaaccatttttgaaaaattagtaatacttgcttctctcaaatacaggaatggcagttgataagaatggattaatctactttgttgatggaaccatgattaggaaagttgaccaaaatggaatcatatcaactcttctgggctctaacgatttgacttcagccagacctttaacttgtgacaccagcatgcacatcagccaggtagttaaatactaagcggacttgtttgtttttcctctaggtgacttgacttattcagtcggtagactatgatggcaccatattaaactgcatatatcatgtgttgcagtggttctgatagggcagttccatttacatgtatcacaggagctaataaaaagttattttcttctataattctacatttgatgaattcagtgagatacagaacaattatcactaagaaatgctaagcatttgtaataaaataccagtaaagtaggagcatgcaggtattctaaaaagaaccaaacaactgaaatctctaatcttttgattgcatgagctccttaagtagtagagagaacccactatgattagtgccaagggacttatatttagaaatagaaactttactgttggcctgattgaaaacacaatagaatactaatctattcataacctagaaagccccaacatttggtggttattgctgccataaggaacatgtgtgttcatagctcatcgatatctgttgactcactacgtagaggcctatttgctatttgcctgtaactagcaaatctttctgtgagctgaattttaaaataaagtgttatttcctgtatctatcttcattcattactttttggtttattttactgaggctattgaaaaaactattatcagacagtttatctcagattaatgccaatttccctgaatggtctaatttactcttctggcgaattaactgtagtgcagtaacttactaaccaggccatttctttttttattaaggtacgtctggaatggcccactgacctagccattaaccctatggataactccatttatgtcctggataataatgtagttttacagatcactgaaaatcgtcaagttcgcattgctgctggacggcccatgcactgtcaggttcccggagtggaatatcctgtggggaagcacgcggtgcagacaacactggaatcagccactgccattgctgtgtcctacagtggggtcctgtacattactgaaactgatgagaagaaaattaaccggataaggcaggtcacaacagatggagaaatctccttagtggccggaataccttcagagtgtgactgcaaaaatgatgccaactgtgactgttaccagagtggagatggctacgccaaggatgccaaactcagtgccccatcctccctggctgcttctccagatggtacactgtatattgcagatctagggaatatccggatccgggctgtgtcaaagaataagcctttacttaactctatgaacttctatgaagttgcgtctccaactgatcaagaactctacatctttgacatcaatggtactcaccaatatactgtaagtttagtcactggtgattacctttacaattttagctacagcaatgacaatgatattactgctgtgacagacagcaatggcaacacccttagaattagacgggacccaaatcgcatgccagttcgagtggtgtctcctgataaccaagtgatatggttgacaataggaacaaatggatgtttgaaaagcatgactgctcaaggactggaattagttttgtttacttaccatggcaatagtggccttttagccactaaaagtgatgaaactggatggacaacgttttttgagtaagtatatgaaaattctactctgattataaaatactgtgatataataatatcatctataataacaatataatcttaagagctggaggattccatgtttttgagagtctagagcttctgtaatttttggatcccggctgggcacggtggctcattcccgtagtctcagctcctggggaggctgagacgggaggattgcttgagcccaggacttcgaggccacagtgagctatgattgtgccactgcactccaggctgagtgacagagccagaacgtatctctaaagaaaaaaaaatggccgggcgcagtggctcacgcctgtaatcccagcactttgggaggccgaggcgggcggatcacgaggtcagaagatcgagaccatcctggataacacggtgaaacccccgtctctactaaaaatacaaaaaaaatagccgggcgtggtggcgggcgcctgtagtcccagctactcgggaggctgaggcaggagaatggcgtgaacccgggaggcgcagcttgcagtgagccgagatcgcgccactgcactccagtctctgggcgacagagcgagactccgcctcaaaaaaaaaaagatacctctttctgagaaagaagacaaaattgcaagatacaagatgtagggccttggaaagggaagggactcgtgtaagggagaagcccaaagcttaagtttcagttggcttcatggtaaatttacctgtacttaaggattaacatcttgcttccaatagacctagcatcttagcaaaccttctgagaagcatcccgcagctgtggtttggggcataaagcctttggctctaggtttgcccacctgataaagctgactgtctcaggaacttgcattgaagaaaaacttcaaaaacatttacagtgaactttgctgattacgtagaagggcttaagtttttgtaatcgttaccagagaagctacactgtgcctcaaagaaccttacaactaaatgcaagtcaggaattgcagtttgttgcctgaaagcatgtgaagaggtaggaggctcattcagccagggtgttccaagagatagcatggagtggtggcccgggcactgtgctgtctgaacagtcacatcttgggagtcactgagaatgaaaggagaatcagctgttgagtatgttagggcatgtataaatgcattctcaattgcttgttcacttgactcggttgtacaagccatgaggggaaatgagatatgcagagatggcatgttgacaaacgcaaaatagtctttgaaatgaatcctgagttccttagtgtggttttcacaatgatacggtgaagcaaaggtacttctttctgtaggagcacacctctgaaattatcataaaagtcagtagaaaaaatgactcaatatacaaatattttctgtatagcttttctggaatgtgtcttatacataaagcttagttctcctgtagcttgaattgcttttcttttttgacagattcccttttaataaaatgaatgttagccagcagcatgattttgtcagaggaacaaaccttttcaattgaattacattaaaattctgttcttagcattccttttgctcattttagtatcgcaataggaaaggaataaattggaagttaatggaaagcacttcctttgcactgttttcaaagtgatcgcaggctagattgccaacgaagcaaaaaagagcacaagaaaagtgctgccatcagatgagactgggcaggagagctgctctgattctaagatcttcaggaggccgggcgcggtggctcacacctgtaatcccagcactttgggaggccgaggcaggcggatcacgaggtcaggagatcaagaccatcctggctaacacggtgaaaccctgtctctactaaaaatacaaaaaattcgccaggcgtggtggcaggtgcctatagtgccagctagttgggaggctgaggcagaagaatggcatgaacccgggaggtggaggttgcagtgagctgagatggtgccactgcactccagcctgggtgacagagtgagactccgtctcaaaaaaaaaaaaaaaaaaaaaaaaaagatcttcaggagatggtggcggcattggtagggtttcagtttagttgaaagtgggggaaacatagagaaataagtttttagtatagtctggtactcaagccctgctctccgggccatttttgaatatgtccttactcgttcccaggagttcattgtatggattagtgctgacacttgaacttcctacagcagatacagtggtttgcttatggcctacaaatgcattttaatcaagtttggaaaattagagaaatttcactggtggagctgatgtgggatagtataaaccaatttggattttttaccttttaaagaaatgatagtgcaaaaaagaagatatatttctctagtaacaaataacctccaagaatttcagacttaggaatcggcagactggctgaagtagaggttgggttggcaagccaatcttgtatataatgggaaaacattattttaaagaatgaaagattttaattaattaaaatacagcaaaatcacattttcaccaatacttattacatgtcatatttaaagtatatctattaaatcttataactagataaattgctgtaagggcaactacactattccaaaaagcattattaaaatatcttacaaaatatcaccctcacaattttatatatatccatatatataaaagaatatcatagtttaacaaaccagtgtttaaaaatgacttttctaataaaattagcagaaagactgcttttaaaaaccagcgttttgttaattttcctcataagctggctacagcaaagacgactaaaaaatgtctaagaaacctttatgcattttgcaaaataatgtgttaaagaagagcacttaacccaaggaattcagaatcatcgtgtcagaatgacaaatgatcattttttttcttcccatacattcttgtaatttggctgtgaaagagcaaaggccgcctcttctaagggtcagaaactttaaaacacattcaaaaggaaatgcacaaaaagaaaagggtggggggaggtgtcattatcaggccgcccctccagaagcactgtctgtgttcagacacagcagcacgtattgtctgtgtaagtttgagatggttaatgggcaaactcaacccctgtcgctactcatcagagccttgacaacagagtttctgctgcttgtctcccgacctgggtgtgcggcgggatgtgagcatcctaatagaggcagcggggggcttctgaatccccgtcggaatgcctttgtttttgtagttattggtgaactggccgactcccagaatattagtacgtgtctgtaatatttcccttcatttttagagtaccatgtgtctatgtgtctactttagaccttacaaagggcagcctgtaagttcacaaagaagggatttgacaggtttgacaatggccagagtgtcaccaaaaccacaacgagattgtgaaaaaaaattgccatcccccactgaaaaacacctgctttctgtgacttccatgacaccagtcccttgagctctgataacaggctctataatcatcttcctgcacaaatacctcgcacagaaaagttaaacttttcagctcaaattcccatttgtgtatggccagctttctgactatcctggtgtctaaaaagccttgagattaaagcttttgtaggatagaaacagatggaagaagatctggaatcaataaatttgcctactgataaaaatacacttgtcatagttccttccaaagaaattttaaaagagaattagttgcaattacttaccttacatgtttttcttggtacaaacttgagtgtaccattaacatgtcacagtattggtataagtacaaaatgaaatgtaaaagtatttcataaaatgcaaactcccattatctttgtggctcccaccactcctggaatgttgctgtgggtatagaactctcccaacagctatttgttgaatgaagaaatagaaaaataaatcagagatgtagacaggtcagtgtttatttgcagagaagagtctggtaaaaccagaagctggcatttgccaacgctccactgagagaacacctataaatgctcttttgcgttctaagttagttcacacctccgtaccaatactgaatgttgaaaatgttaacgttgcccatttttgttactgatttttaaaaatatttacccaatattgcatgtttgctcactgtattttgctttataaaataaggacttcctcagttgatcttcttattccaataattaaacaaaataataacttcctattgatagcactttcttctgaaatgttggtgttaaacacagaaaacttttcccatgcaaatacagttaaaggatattattgtatctggtatcaggaagaattctaggagaagaaagcctgattcccaataaggtttttatcaatcaccaataaagtaagtagggtgattcttcggggtacacagatggggtttctttagcatggtaactgtcatttcgaaaactagagatatcatctgcttcttggcggcagtttctctccatgttacttgtaattattatgtccctattgtgattcattagagaagtggccaatatatttagacatgctactggatggtatggtgggaagactacattaggtatcagatggtttataactcagctttgaaatcactgagttagactaatatgtttcacgagctaaataattattcattacggactgagtaaaccatcttggctctgacctcctcttccattgacttgctgggctgtagaaaggaccccaactagctaacagggtccccttgtatgaagacactgtgtcttcagtgagtattagggaccgcttcatgctgctcttcacaccacttaaaaacagtggccacacgcgatcattccttagccagagtaattccaaggaaaccaaaaagatctcacctgctaaatatttattatttaaaaagtttatgcctgaaaagaaaccgcggttcttacactcgaatgcacaaagaagtgaaatccagtgtattgaattggggaacagaatacgttatttaatagtaaatggcatttcacagttctctgcttgcttacccacatcaaatacaaaccgtttgggcatatctagaggctcttctgtctggttaaagaagacaacatgaaaaactatgaattctggccaatatgtacatgcacaccagcaggttagcgacatttttttaaatcttgggactttgaatatttggagctctgtatttgtggagctgactctgtgatcttttgtgagctatattcagattcacagagcaaataaatgagtttcagcttttacacattatgtaggtatatatgggtctccggcttctcatttgggtggtttattgtccctcattcaagcttttcaatttcagaatgagcttctgaaccatttctttataatgaacttaactcagtgcccatggcaaacccacgactcccactgacatcagttctcatgctgtaggagtgcctcagagaagggatccccgaagaggaaagacaggcaatgtgaacagcgcatgtgctacgcctaagcctatttcaagttcaaaactgtataccaaaagcacaaataatgcaggaaaacgcaatgataattattcattaattagaaaagatatcattaattagaaaagttatgcccattcttgttgacactgactcctattatttaaacagcctggctgcagtgccatgctgtgttctccttacaaaagtgaccactgcaatcgcttctaatgttagaagaattatagaggttatcggctgggcacggcggctcacatctgtaatcccagcactttgggaggctgaggtgggcggatcacatgaggtcaggagttcaagaccagcctggccaacatggtgaaaccctgtctctactagaaatacaaaaattagccgggcgtggtggcactcacctataatcccagctactcgggaggctgaggcaggagaatcgcttgaacccgggaggcagatgttgcagtgagccaagatcacgccactgcactccagcctgggtgaaaagagtgaggctccatcccaaaaaaaagaagaagaattagagaggtgtcttccacaggacaaaactgagaggatatcctttcctttgataagcatctgccatccaaccctaaaaactgaaacactgaaccttgcatcattgttatttctgccaaaaactgcattaaaaactgagcagcccactttataagtatatatgtatacacacacacacacttatacacacacacatatatatcttaaaatggtgctcagccacctgctttattttccttttcctttttctttcttcatgaaagaaaacatttaggagtttaagaatgatttgcaagagagtttatcagcagatcacttaaaatcatgggaaaattctatttttgatagaattttaaatatttgatttagtagaatcaaatagtttatttctatttttgatgttttgtttaattgcttaataatttttgctttaaattattaaccaaaacgtgtatttccagggacatcaataaaaaaatgcataggcaagtttctaaagtgactgctgtacatttcaagcattaacctgaacactatgaaggcaatacttttattaatacttgatctattccaattaccttctgcagtctagtttttaaaaatcattagttctgcccaggtttcaaaggagaaaaggaactggggaaagagtatgttgttcagattactcaaaaaattgcacaaaaaataaaaacagattagtcagattttctcagttcatcggctgtgtccctggagtgtgttgatagttgcaaggttgaattaactctttcagggtgttccatttggcaagtcaatattccggatgtgctaacttgttccataacggttcaagagtaaatgcagcttccacaagtgtccagtttcctctttaaactcgttctgcaactgtctagattagatgatttgatggcctcatatctgtgtgcatcatcagcttcccttacacggtgattgtcagatatttaccctaacactaagctgtgtacaccagccatttaaaacgattgataataaagcaataagtttacacatggacgatcagtgcaagagaacttttcatgttttacaatcacagaactgaagattgacaaatgagtgttttctggagactttgcagcatctgtggctcattcctctgacaataaaataaaagcaatgccagcagctctcactcctggatcccgtaactcctcagcctcccaggaaggtgttcagcacagagaaagtccctggcctatgtttcaggatcctagagtggtgtcagaatatcttgaggctgcaaatgcagaaccagtgtggacactgcacttctctttggagctctctctgggttggggaaggcagtctatgaaggagatagataggatggttggggatactatcatctacatgcttcaagtcaccctaactcctcacttagctacaccgccctcccctaccccatcatcaccactaccacttctcgtaaacacacgtactgatgatatacttcaaaaaagatttcctagacttcaagttcatcccaaagtttggtgaagccatggttcttcaagagagaccccccacaacttctagaaaatattgatgtaaagaaatactcctttgtagcgctctctaaaaactactttttgttctctttaagtgtattttaagagtgtaggtccgatataacttaagattttcccatgactgggctttttaataaaaaactgtataaaaagcaaaggctgaaaaacttatagtgtattttaaagtagttaattgattaagcatttaaagaatgtaagtcaagcatcagctagaagaaagatgtcattctgtttcaaactcaagaaaagatgggggcgggcgcggtggctcacacctgtaatcccaacaacactttgggaggctgaggcgggcggatcacgacgtcaggagatcgagaccatcctagctaacacggtgaaaccccatctctactaaaaatacaaaaaattagctgggcgtggtggcgggcatctgtagtcccagctactcgggaggctgaggcaggagaatggcgtgaacccaggagttggagcttgcagtgagcccagatcgtgccagcctgggcgacagagtgagactccgtctcaaaaaaaaaaagaaacgatggaaccaagttctaataaaggcaagcataagccttgccaaaattagaagaaagtactcatttatagaggatgatgtttttaagctaggtcagttagcgttatagtaataaaagaaaggttacaggaaccttatatctggaggagcagaatgtgagtgtctaaatgcatcagactattcctagagaagtcaaaaaatattcaggatgactaaacctcaaacctttaaaccctcaaggaaggtcagaatgggtttatgcagtggttatttataatttagagctagtgagaaatgttatgcccaggaatttatctttatgttcatatcggtgtatccatatccaatgaaagattagctcattcaccccttactaatttaataaagatttctagttttttaacttaatgtttaaagtgtaccccattctccttaacacaaacaattaaccacaagcataggtaatcccatatgggactggtccaggcaacaccagcctctgaggaagcacagtttccaaaagcagctatgccacctaaaagaaaatgaaagtcttttccatgctacattgcaaaggcaaacagattgacaaattattaaattatttcaaacctcttaggttttgataaggtgggaagttttctgtgctttttgatcatcaagcatttcctgtttagcccgtaatttcctggcattcattcattcactcatgtgctcattcattcagtaagaatttattatgtgccagctactggccttaggtgctggaggatgcagagctagatgacacattccctgctctcaaggagctcagagtccactgggagagaaagacaagtaaacagtgataagaatggtaagtgctaagatagttgttcgacaggccgtggaggtacagaggaggatcatctaaatccgattgagaactggggacaggatgaggcaagaaaaacttaccaagggaggtaatttttaagatcagtgttgcaagttgtgaataaaggctacccagaagagagagaaagagactgctaggccagaggaaagcatttacccaggagcagaacgtggcaggctttggaaagaacacacagctcagaatgacaggagcatcgaatgtgtgtggggaggagggagataagatgaaaccagggagggagatggtgcctctgcgcaagtagggcttgcaccgctacgtgaagagctggactgcgtggatcttccctccggggtaggcgggactctgttcaaggagtttaacagggacagcaacatagccaatctggtgacaatgtaaggatagatttaaggtagaaaagtaggttaggaaaggaaaggtaggaggcagtagaggtcagtcagtcattaggacatgaaatgtaacttgctgtctgaatgtaagaggtaagggcaaaagaggatcaaggatgagtttcctttttcccaacttaggtgactagtggacacggagatacggggaagaattgtaggttgatcaacaaaagatgagttccgattcgtaaattatgactttgagagtaccatggcacagtctagcatgtgattaaaaaaaaatgtctgattggaacttagaggacaattccaaagatgtggacacgagagctattgagagagccgaagctataagtgtgaataaaatcatattgaaagggaacatagaagatctggtgacaagtggaaaaaaagaaggtgcaaatatgtgagtttacagactggagtttcctgtggcttcataataaaagacaacagctgtgttaatactgaaggatccactttctcctactggatactctatccctaattttttgaaatcttcaaatctgtgtcttcccttgtattttgcatcactttctgtatttgatcttctttctttgctcccttttgctccttaactgcccaaatgtggccattcctctgcctccccttacttcttgcactttgctcaatgttcattttctctcttaaagcttgtgagtaggtaacatcttagtctccatattctctcatcttaggctttttttccttacccttcctccttactcacctccgtttcccaagtcattgacactcatgagatgaaactaaaaacctgggttccggtcgcgattgtgtcgcttactcctaactgcatgactgtgagagtcagagcccctgtctggattttcctgtcctcacctgtaacatgaaaggctccttagtaattaaaaatcacttcctattcacaagaaaatatgtgatttttaccatttccttccaacttctcataggcccctgtcaaggtgtattccaaaagaaataacacttaacaaaagttaccaaatttcctctgctaaaacagttatgcatattgcatattgcatttcggtcaaactagtatcttatatgttatgttggtggtagaaatagcaatttatagtaataaatagaattttctctttccaaatgtgccacctactttttaaaaatctttcccacttactagaagcctggcacagccctccttgtcctcgctcagtgccagggtgtggggtctgtgtacggctgaacaggcaccaggatacaaggagaacaaaagagaaggaggggtttgtcctctgagcacttccagacccatggaataaatccaggaggatgagggcatgcacagttctgttttacagattctttggagcaaaaattttcctcgccatcagctgtctaggaggtctccatttcaagaccagatagctaaacaaataagctgtatcctacccatgtcagccttcctcactcgataaacaatttaaaaaagaaaaaaaaaagacagactgtcttaaacatgattcttctcttaatgatggctaacccagaatccttcgaatccctaagggaactaattctggaatgccctgacttggatggctttgtctcaaggcctgtgaatttcagagctgggcattatcactttgtcagttctccctgatgtggtaatgactatgaaaggaaagaggcattgggtcactatttttgaatttgattcttgaagaaaatgtcatttctgtgaccatctatcactatgctcagcgttcaaaagggctggaccagagaggagtgggggaggctctgcccttgtctacatgcctctgaactcatgttagctggggggtgtttgaaaaaaaaaagaatagcagcttgactgcagactgctaccctttctggttttatggagcaaagcacgggtcagaatttgccccatcagcaagacctcctaattaaatgcagcagcaacaaagacattcgcattggggttaccaacacccaccccatacaattctcacccctttctcatcaggatccccttagcaccaagaccaaactcacgtaaaataatactttcttttgtcttccttcttttgcattttccctgccatttttgataataggtaggtagcaggcaggggagtatcaggtggtgccatgatgtgggcgtaggcgactgctctgtttcccttggtgatagaagcattttctatccagaacctgatttttgaggatttcttactaccttgctacaaattatgatttgtctttgagatgataattgttaaaatacataaaccataggttccttctcagaagacttacatgtaaaatctttcgctgttgctgttgcaaatcacattattgccattaagattccgcatcagcccgccgttccgggttcgctgtttgtgcacaagtccctcctcaggaaggacgatcaaggagtgatttatgcctacatgtttagtcatgacggggttagtagttgtgttccacttcacctcaacaacagatacgaggctgttacaaattagcaatgtgggaaaagtcttgcggtaaccggtgacaagatggaggggattgtttgtttttgttgttgttggccgttaaactatggaaggaaatttgagcctacgcaactctgttagatggaagaaaagattctccctctgtataaaatgtgtgtgtgtgtttctgggtgggtgtgtgtgtatattacatacacacgtatatacactacgtatactatatatacacatcacacacatacacattatagtgaaagtgggagaaagatgggttaattaagtccttcatgtgagttcttactgggatccaagtctgaaagcaaacccgtgtaacccacgaagcagctctcaaaagcaggctagctctgggatggccctgaggaagacccgaggaaggcccactcatgaggaaacttgaacatttatcccatctggaggccttcagaatgaacccaaaccaacatctgctgctgtcttgcctgcccagaacaggcttggttttgaccggagaaagcagtcacatttcagtgactctcactccggcttccctaggtgaaaatgacagaggtgtggggagggcattgccgccagtatatacgtaacgacatatgctggtctcgtgtttgagtcgggccagttcagggtcaggctgaattctggactgacaatccacagaagggataaagagcacgtcactccgcaaaagagcccacctccagagttagaatgacttctctgccctggtgtatgcgcttctctaaagctgtgctctcatttacacgtacttttctcaaaagcagaagataattttaaaaacataacctttggttaaagaagccattttatggggaagcaccaaagacgataaatactcctgttgtcaagttgtaaagaaagttttcgagaactgcaaattgtttccacttgaataaatttgcaacatcaataggctgttgacattgggttggtaacagtctaaatcacttgattttactctcagatgagcatctactgaagatgtttaagtagaaaggtattataatcatggtgtttcagattgatttggtatcagtgaatatgggaagaggcagatagacccattttaaaagtctagggaagctctgggaatagaaagataaatatctgagagacattaccaaggaaaaggagaaagttaggagcttcacgtcaggttgaatatagcattctcagctgagaatgactgaggctgtgattctccgaggcatttgtcgataatcccactacttaggaaactttaaaaagagatttaaaaatataccacaaaagctaaaacagcaactaggcaaacatgcaatccaaattaaagaccaacaaacagataaacatcaaataagggcatctcatcagtggaagagcggtaggtcacggagagcctgaggaagtttgtcctttccagcgagagtcctttgtaaagaggggtcaggcaggagcaggaaggaatgtgctgtgttatgaatttgaaaccatgaggctaaggccagaggaatgcaatggggggcatgaagttgatgttctattcaaattccctggagcctattgcattgtacattcaaaaagctaataaaggaaaactacctctcaaatctataagctgggcagggctagttcaccactaaggccaagcaacgttcagttgagtcacacagttgcaaataagcaagagaatctgaatccgcccagaggcatatctagttgttggaaaggtctttttaagacctggagtcagagtatttcagaggctagctggacattcgtgggtgcattggttttcttcttttgtggaggtaaagaagagttagcctgatgtttatggaagtacctgagagtcgtctttgaagacattttctttcactcccttagtcagagtccccgggtcatttttctgatgtctttccttcatctcgttttcatttctgttgacataggtgctaatctgtgaaaaagtttttactcgtccgcactgaaatgaaaaaaaaaaaaatgatgtggagaatgttttcatcataaagctttattcattgcttttaaagagcagtcctaggccgggcgtggtggctcacgcctgtaatcccagcactttgggaggccgaggcgggaggatcacgaggtcaggagtttgagaccagtctggccaagatggtgaaaccccgtctctactaaaaatacacaaaaaaattacagaaacagtggcaggcgcctgtaatcctagctactcaggaggctgcggcaggagaatcgcttgaacttgggaggcggaggttgcagtgagccaagatcgcaccactgtactctagcctaggcaacagagcaagactctgtctcaaaaaataaataaatacataaataaagaacagtccttttggccgggcgtggtggctcactcctgtaatctcaacactttaggaggccgaggcaggtggatcacctgaggacaggagtttgagaccagcctgaccaatatggtgaaatcccgtatctactaaaaaatacaaaaattacctgggcgtggtggcgggggcctctaatcctagctactcaggaggctgagggaggaggattgcttgaacccaggaggcggaggttgcagtgagccgagatcatgccactgcattccagtctgggcgacagagtgagacttgtctcgaaaaaaaaaaaaaaaaacagttcttttgaaagaactcaccctacaggtaggtcccgcctctctttgatatgtttaaatggccttatgaaacgatgggagtaacgggtagtagtttttaatttaaaaaccctgtgttgatccctgatttttttcatggtttgtaaaattggcaagtcagggagccactctcacccccaccttaggttcctcgttaaaaccccgctttctttaaaccttcttcagcacctcatgttctccagtgaggagatccacccaaggctcccttccagtatgactctgtgctggccactgtgcctcagccgggcccctgcaccccgacaccttcctccgcagccctcccagccccacccgggcccctgcctgactgcctgatcccacagtctagttcaccactaaggccaagcaacattcagttgagccacacagttgcaaataagcagagaatctgcccagaggcatatctagttctattccgggacctggccaggtccccacctgggtgcagctcttccccagctatgtcagcgtgaacacatctccccttctgctcactctggtgagtggtagcctcacaggacactcatttgtaatagttaaattgtcacgtatatgacctctgctcacccagacttctctgttttcacaatatcctcacgctttagcttgcacggaaaggctgttctgaaactgttgggtgccgggttagataggagctctgaggaccctgacaccggagcagccttccttgtgcaaacacttcagccctgttagtgcctgcacttagcttcagctactccttagaaggcacaaattcagaacttccagggctaaactgttaagctgggccgctaggatcccagcttaaccctctgtcattctaactgtactacctacaaaggttacttgtatttttatttcccaaagaaccaaaggctaataggtgagagtctgaactttcagcttcctgggctgtatctccctgtgccgaggatcctgtgatatagaatgcctgcccagcagggaatggaatgtgtggtaagccaatgaaagagcaaagtcagaggttgcagaaatgctttctacaggagaaaggtgaagtttctgcttcagattgaatggggctagaaaatataaaccagcaaaagggtcaaaaaagggcagaggagaatgaatcagcaagctgcttgcaggtggtacaatctatataaagctagagttcccagctttaaatcaggcactgtgatctacaggagggctagtgggcctggggtcagctgcacaaaagtcccagttatggtccagtcaagagatagcgtgagagccagatcaaatcagctaaccacgtcgtattttcattttccgtctctgaaatgggggggggggaaatagtacaatacagaattctcctatgtagaggcattcaaaagggcattaattttttttaacccgatagcacgttcttcacatcataccatgagatgtgtaatctgctgcaagacttatgccaaactgaacgacagaactttaggctggttttgtcaataattctgtaactctgcgctgcttgttcttaaataaaccagtgcgtgtttgtttcttcaagagcagtaatttcttcaaaaaagcgatcacagcaataaactctgttggatttctttcatttatgccttcctttgctaggggcgtttgggttggtggggaggacatcttcagctctgccttttgtgagtctaaacaatgattccacttaatggtgcattggcttcctctgtgtctccatccctggcttctccctcctgagtgcccgttcctgccgctggctgagcagcgtggcaggttgtcagatcatgtcagtcaaacccatgatctgaccgatactgtccccaccgaattaatgggatcagctcatcaccgggcacggaacagacctccgtccctcgccttcctcctctctttcttccctctctctactgtaacattgtcctggcggagtcttctctgtctttatcacctagaatcttctcctgatgaacaaccacatttttcaaaatgaatgtttcacgaaaaacccctatcatctcataaacaagtgaaattgaaaaaacaaacaaaacacctctatccttttattcccaaatatcactcaagtaccttttttactcctcactcctgtgtggccccgtgttttcacctacgattatgatcccctgtcactgttttcctgccctggtaacctgtctttctctaacagcattgtttctctgttagttctgtgtctgggcttacttcaagtaggatgttgattcaggtctccatctcactgggaaccttcgattagtgaagcagtcttagaatcaatctgaaatccaccctttagtatattgtggtcccaaggaaactcctaatttctcatccagatttttgcttttttttttttctttcttcagacgacaccatcatttttgaaattttctctggtgctgccacaaatagaaaagtcacaaaaattcaattcttcagtcaaatgttgtatctatgatgcatatttatgagcacagaacagcttttaaaatgtattttaacactcaaattataagttactcttgtatttgtctgctaaaaagagtaagtgtgtaaaaaaaaaacaaataatcattaaatgtcaggaaatattgcatctcatttcagtgaacacagtaaatcaccatgcaagatattccccattctttcaatatcactgtagacaagatgggttatcatcaccactgccagcattcaagctctaatttaccattatgaagtatgtcaatcactgagaaataagaaagtctttaaaaggttcttattttattaatttgttgaagatgtctgaagatactaaaaggattttttacatatgcaaatacatacatgcacgtaaacatactgtactgtactgccaccgagggagtaagtcagtaaatctttaagaactgatgtaacagtgaattaaatctactttgtagaaaatatgaaggaatactaaggaatttaatatcagcaaacatgttccctttgaaacagcaaattagatgtgcaggaggattttggtcacacttcaaagaatcatgtgctgagatggagagctggtctgtttactcgtgttctcaccggtgaggtttttctatgttaaacgggtttttgattacttcaaagcatgtttgaagtcttcactctgcatcgctcatccacgaagacaaatagtcctccaaatttgtgcaactaatattgctacacattatatttataagtcagaagaaactgcagtttcctatttaacaccaagttaatgcctcttgtatttagctatgacagtgaaggtcgtctgacaaatgttacgtttccaactggagtggtcacaaacctgcatggggacatggacaaggctatcacagtggacattgagtcatctagccgagaagaagatgtcagcatcacttcaaatctgtcctcgatcgattctttctacaccatggttcaaggtaaacacgaaagcatcattttaaacaagtaccaccagcacccagacagaatgcggcaacacccactttccaaggtgaaccagaaaagggaaggtgaaaatgtaaacctctagaaatattggtgacataatctacagtgtacatgtaatatttatttacttgtatagacatattttaaaaccacatataagataatctgtcatccttggaatagtgtctgtttccattcccatgtattaaaacaacttcattccagcccttcacatgcatcatcaggcgatttttgcatcacctaagagttttccagagcaggtcttctgaccgccatctaagtacagtagtttgagacacagcactttttgaggccatatgtgatgcagtattttaatctgcatgtcatggaaattttatcccaaattccaactacacattcatgtaatgcctggagtgtccattttttcattccatctatagtcatatagatgccatatctccataatggaccctccttgccatattcctttctaaatttgaaaaagcctgtctacaatgacatttgtaattgtgagttcacaactctaagaataattactaaatctgtattcaactttttgactcattttttttacctgttccatgaagtaatctctaaccatctaaaactgctattgcttgaattcattccttccccaaatggtcctatattatttcaaaattttaaactgaggcagtagtctacaatatgagcttttttgtataaaatataaaatgtcttcctttattgaagtcaatttcggagggaacattgctttctatttttggtattcaagatatagatattaatcctttcaaaggatctttgacagaagatgcagggattgggtgcaggggagggaagtcttccaagaccttggaggtgtgtacaccgcgctcctgagagatcacatatgtgcctctttacaaaatatttacttagtgcacatcccatggaagctgagctctcatttcatcaggcaaatgagaaaaagaagtctattaaactgcagaaggacttcaaattcccctaaagtttgcctttaatatttagccaaacctctgacagcatgaaatgccaaggatcaaagttgttttgtttctttctaaaaggacatcatcaggtactccttattcctagtcaacttttagaaatttagaacctatctcacggcacaaccggccaagtatttaatccatatctaatagttcatgttttgtgcttcttgttctttagatcagttaagaaacagctaccagattggttatgacggctccctcagaattatctacgccagtggcctggactcacactaccaaacagagccgcacgttctggctggcaccgctaatccgacggttgccaaaagaaacatgactttgcctggcgagaacggtcaaaacttggtggaatggagattccgaaaagagcaagcccaagggaaagtcaatgtctttggccgcaagctcagggtacgtacgtgttgtggagcaggagatagctgcagccctctgatctgtgcagatcatcctgagggcaggttgcgtctcctgctcacccccctatgtctacactgagtatgagcacctcgctcagtgtggttccaatcccacatgggcctgttctggcaggtgcagctggggaggctggagggaggtcaggtcgtgagagggctgagaagaaaaagcaataggacactagagggaaaaggagatcaggagtgaaggtaaagccatgaccatgaaaaccagctccagacatcttccaggtcactttcacagagctatggtccattcccaaagcggactccagctgctgctctttgttctgctgagccccagacactgccgccacctgcatccccgtttgctgcctctactcactgctgcttcccagggcccctgctgccttgggccactgcaaacgcaaggctagttcacaggcctcctcttgctcagctgtcctgaagcaggggtcacatgcacgtgtgcacacagcgtcacacctgttctcagatgcaggacttcatcaaaagacacaaagacatggatgacagctgtgcccctctctctgcataccaaagacacagcacctaactagggttcaaaaaattatgggttccagatgaggctctactttttgctaatagtaaaccttatgggagaatcagaacatctctgaatctgtttccttatctatatcatggtatccatattatgatatagattacacattatctaaataccataacaagatagataggagatatgtagatgatagatagatagatagatagattatatatatatagatagataggagatatatatagataggagatatatatatagctatattgcagataaatgaaatttaccctatactacctctgttttacacagttgttacaagaatcaaatgagataatgtgaaagtactttgaaaataggctgggcgttggtggttcacgcctgtaatcccaacactttgggaggccaaggtaggcggaccacttgaggtcaggagttcgagaccagcctaggcaacatggtgaaacccatctctactaaaaatacaaaaatcagccaggcgtggaggtgggtccctgtaatcccagcttctcaggaggctaaggcaggaggattgcttgaacactcgaggcggaggttgcagtgagtcgagatcgcgccactacactccagcctaggagacaaagcaagattctgtctcgaaacaagaaaagaaaaggcatggttatatattccctgaccctaacgcagatagcctcttctactcacacaccagatggataggaaagggctgttgagcttgctggatagtaaaatttcactggaaagagggaggagggggaaatactttgtccagaaactgaccacataaccataacatattgcctgctgttcttggagacaagttataagtaagtgtgcactttttttttctttgtaatactgctttgcaagacataaaaggaacttaggcagatgagagggaaagagaggaaacccagtctgaagtccctggttctctgcctaatcctaaatgaagaaaatacctcacttgaggaaggaagaggccagtgcacacaggcatgggtgttactttctttctaaatggcagagccacaatgcctcagcaagacgttttagaaaatacgctatttaaaatggcctgtgccatcccactgaaaggagatttccagctgatatgtttgattgctctcggagagacaatgccaagatcacaagggagggcttcttactttcaagataagattggatgtgccagctctgactgctaatttcattcctctgtggattctaagggagaaattctagggagaaagtgatgatatgaaaatctggtttaaggactgagcctggagtctgccaaaatagagaagaggggagagaaggggaagacctgagcccaccaagacagtgagaatcagcccaaagagccacccatttctcttccactctttcctgagacagaggatgccacctctcttaccttgcattatttcctagcagaatgtcctgttcatttttaagttgttgacctaaatttagctatgtgcctgtcacatggtggacactcaaatatttatccaataaatgaaagaatgaggaaagccagcctcacaatatgaattctctctgtgccattgcacctagatcttcccaagagaggggctatgtgaacacatccttgcaaatgtttgactgctataaatctaacactagaaataataggttaaatggagataatagagatatcattctctctgtctatacataatgtgtttatgtgtgtgtgtgtgtgtgtgtgtgtgtgtgtatttcttttttttttttttttttttttttttttgagatggagtttcactctgttgcccaggctggagtgcagtggtgtgatcttggctcactgcaacctccacctcccgggttcaatcaactctcatacctcagcccaccaagtagctaggactacagacacacgccaccatgcccggctaatttttgtatttttagtagagacggagttttaccatgttggccaggctggtcttgaactcgggacctcaagtcatctgcccgcctcggcctcccaaagtgctaggaatacagcatatatatatatatgctgttatatatatatatatatatgtttaaaaagtaaaaaaggcagggagtagaaatggaaaaatcatataagaaaacagcaatgtaaaaagcatttctgtgaaacagtacattaggggacaggctggacacagcagaaaataacaagcacaggaaactgtgatagagatgtaaggacgcagaataaagacaaccattctgtacttacttgtttgcagctcatttttttaaaaagacacatagatagcagttgcttacctgtgctttataatatttactaaatattcctaggttttatcagggctggattgtagaacctgccttcagtcaattacaaaaaattgtcatggtgttctaataataaaattcatcccctaaagctgcccagattcagaggcttagagaaaaaaaaatcgtagtgaatcattttaaaaaagaaaatctcaaaatttgaaagccaaacgtgtgtttaaaggcatgcataaatatgatagtgtatttaaatctcattatgccagtcacatttgcgtagtggcctatttctcactttaatctgagcggcacggcctagcgtgggacggcacaatgcacttggcacctgctgatggagcaggcacacaaaacaacctgtagcaagttgatgctctaccagggacaaaagagagtcttgatatcgccacccagtgtactggggaatgagcctgcccttccttacttccccccatgacatcttggctaagtgagtgtaattccatctgctggtatcactccctgggaaaattgtgtagcgtcatattcttttcaagcatattccagagggaagattatagctgcctgctcccaacatcaaagtgatgttgtgattaattacaatcatgctggacatgatctttgaaaatggagatttttttccatgcttacttaaaggaagtatacatcacaaaggaattcatggtgatctcattcatacacaacaaatggattcattttcatatagctggaggtgtagcagcgatctgagataaggtttcacttttagattgttatttaagtgtgtgtgtgtatgtgtgtgtgtgtataaatatatatttttttctttttttttttaatgtcttgaagaattgttagtacttttagttttattttagagacagattttgttactggttttactaagaacaatgtgttctttttttttttccttttcttttttttttttattatactttaagttttagggtacatgtgcacattgtgtaggttagttacatatgtatacatgtgccatgctggtacactgcacccactaactcgtcatctagcattaggtgtatctcccaatgctatccctccccgctccccccaccccacaacagtccccagagtgtgatattccccttcctgtgtccatgtgatctcattgttcaattcccacctatgagtgagaatatacggtgtttggtttttttgtacttgcgatagtttactgagaatgatgttttccaatttcatccatgtccctacaaaggacatgaactcatcattttttatggctgcatagtattccatggtgtatatgtgccacattttcttaatccagtctatcgttgttggacatttgggttggttccaagtctttgctattgtgaatagtgctgcaataaacatacgtgtgcatgtgtctttatagcagcatgatttatagtcctttacccagtaatggggtaatgggatggctgggtcaaatggtatttccagttctagaaccctgaggaatcgccacactgacttccacaatggttgaactagtttacagtcccaccaacagtgtaaaagtgttcctatttctccacatcctctccagcacctgttgtttcctgactttttaatgattgccattctaactagtgtgagatggtatctcattgtggttttgatgtgcatttctctgatgtccagtgatgatgagcattttttcatgtgttttttggctgcataaatgtcttcttttggaaagtgtctgttcgtgtccttcgcccactttttgatggggttgtttttttcttgtaaatttgtttgagttcattgtagattctggatattagccctttgtcagatgagtaggttgcgaaaattttctcccattttgtaggttgcctgttcactctgatggtagtttcttttgctgtgcagaagctctttagtttaattagatcccatttgtcaattttggcttttgttgccattgcttttggtgttttagacatgaagtccttgcgcatgcctatgtcctgaatggtgatgcctaggttttcttctagggcttttatggttttaggtctaacgtttaagtctttaatccatcttgaattgatttttgtataaggtgtaaggaagggatccagtttcagctttctacatatggctagccagttttcccagcaccatttattaaatggggaatcctttccccattgcttgtttttctcaggtttgtcaaagatcagatagttgtagatatgcggcgttatttctgagggctctgttctgttccattgatctatatctctgttttggtaccagtaccatgctgttttggttactgtagccttgtagtatagtttgaagtcaggtagtgtgatgcctccagctttgttcttttggcttaggattgacttggcgatgcgggctcttttttggttccatatgaactttaaagtagttttttccaattctgtgaagaaaggcattggtagcttgatggggatggcattgaatctgtaaattaccttgggcagtatggccattttcacgatattgattcttcctacccatgagcatggaatgttcttccatttgtttgtatcctcttttatttccttgaccagtggtttgtagttctccttgaagaagtccttcacatcccttgtaagttggattcctaggtattttattctgtttgaagcaattgtgaatgggagttcactcctgatttggctctctgtttgtctgttgttggtgtataagaatgcttgtgatttttgtagattgattttgtatcctgagactttgctgaagttgcttatgagcttaaggagattttgggctgagacaatggggttttctagatatacaatcatgtcgtctgcaaacagggacaatttgacttcctcttttcctaattgaataccctttatttccttctcctgcctaattgccctggccagaacttccaacactatgttgaataggagtggtgagagagggcgtccctgtcttgtgccagttgtcaaagggaatgcttccagtttttgcccattcagtatgatattggctgtgggtttgtcatagatagctcttattattttgagatacgtcccatcaatacctaatttattgagagtttttagcatgaagggttgttgaattttgtcaaaggctttttctgcatctattgagataatcatgtggtttttgtctttggctctgtttatatgctggattacatttattgatttgcatatattgaaccagccttgcatcccagggatgaagcccacttgatcatggtggataagctttttgatgtgctgctggattcggtttgccagtattttattgaggatttttgcatcaatgttcatcaaggatattggtctaaaattcttttttgttgtgtctctgcctggctttggtatcagaatgatgctggcctcataaaatgagttagggaggattccctctttttctgttgattggaatagtttcagaaggaatggtaccagttcctccttgtacctctggtagaattcagctgtgaatccatctggtcctggactctttttggttggtaagctattgattattgccacaatttcagatcctgttattggtctattcagagattcaacttcttcctggtttagtcttgggagagtgtatgtgtcgaggaatttatccatttcttctagattttctagtttatttgtgtagaggtgtttgtagtattctctgatggtactttgtatttctgtgggatcggtggtgatatcccctttatcattttttattgcatctattagattcttctctctttttttctttattagtcttgctagcggtctatcaattttgttgatcctttcaaaaaaccagctcctggattcattaattttttgaagggttttttgtgtctctatttccttcagttctgctctgattttagttatttcttgccttctgctagcttttgaatgtgtttgctcttgcttttctagttcttttaattgtgatgttagggtgtcaattttggatctttcctgctttctcttgtgggcatttagtgctataaatttccctctacacactgctttgaatgcgtcccagagattctggtatgttgtgtctttgttctcgttggtttcaaagaacatctttatttctgccttcatttcgttatgtacccagtagtcattcaggaacaggttgttcagtttccatgtagttgagcggttttgagtgagattcttaatcctgagttctagtttgattgcactgtggtctgagagatagtttgttataatttctgttcttttacatttgcagaggagagctttacttccaagtatgtggtcaattttggaataggtgtggtgtggtgctgaaaaaaatgtatattctgttgatttggggtggagagttctgtagatgtctattaggtccacttggtgcagagctgagttcaattcctgggtatccttgttgactttctgtctcgttgatctgtctaatgttgacagtggggtgttaaagtctcccattattaatgtgtgggagtctaagtctctttgtaggtcactcaggacttgctttatgaatcttggtgctcctgtattgggtgcatatatatttaggatagttagctcttcttgttgaattgatccctttaccattatgtaatggccttctttgtctcttttgatctttgttggtttaaagtctgttttatcagagactaggattgcaaccccggcctttttttgttttccattggcttggtagatcttcctccatccttttattttgagcctatgtgtgtctctgcacgtgagatggatttcctgaatacagcacactgatgggtcttgactctttatccaatttgccagtctgtgtcttttaattggagcatttagtccatttacatttaaagttaatattgttatgtgtgaatttgatcctgtcattatgatgttagctggttattttgctcgttagttgatgcagtttcttcctagtcttgatggtctttacattttggcatgactttgcagcagctggtactggttgttcctttccatgtttagtgcttccttcaggagctcttttagggcaggcctggtggtgacaaaatctctcagcatttgcttgtctgcaaagtattttatttctccttcgcttatgaagcttagtttggctggatatgaaattctgggttgaaaattcttttctttaagaatgttgaatattggcccccactctcttctggcttgtagggtttctgctgagagatccgctattagtctgatgggcttccctttgagggtaactcgacctttctctctggctgcccttaacattttttccttcatttcaactttggtgaatctgacaattatgtgtcttggagttgctcttctcgaggagtatctttgtggcgttctctgtatttcctgaatctgaacgttggcctgccttgctagattggggaagttctcctggataatatcctgcagagtgttttccaacttggttccattctccccatcactttcaggtacaccaatcagacgtagatacggtcttttcacatagtcccatgtttcttgggggctttgctcatttctttgtattcgtttttctctaaacttcccttctcgcttcatttcattcatttcatcttccatcgctgataccctttcttccagttgatcgcatcggctcctgaggcttctgcattcttcacgtagttctcgagccttggttttcagctccatcagctcctttcagcacttctctgtattggttattctagttatacattcttctaaatttttttcaaagctttcaacttctttgcctttggtttgaatgtcctcccgtagctcagagtaatttgatcgtctgacgccttctactctcagctcgtcagtcattctccatccagctttgttctgttgctggtgaggaactgcattcctttggaggaggagaggcgctctgctttttagagtttccagtttttctgttctgttttttccccatctttgtggttttatctacttttggtctttgatgacggtgatgtacagatgggtttttggtgtggatgtcctttctgtttgttagttttccttctaacagagaggaccctcagctgcaggtctgttggaataccctgccgtgtgaggtgtcagtgtgcccctgctggggggtgcctcccagttaggctgctcaggggtcaggggtcagggacccacttgaggaggcactctgccagttttcagatctccagctgcgtgctgggagaaccactgctctcttcaaagctgtcagacatggacatttaagtctgcagaggttactgctgtctttttgtttgtctgtgccctgcccccagaggtggagcctacagaggcaggcaggcctccttgagctgtggtgggctccacccagttcgagctccccggctgctttgtttacctaagcaagcctgggcaatggcgggcgcccctccccaagcctcgctgccgccttgcagtttgatctcagactgctgtgctagcaatcagcgagactccgtgggcgtaggaccctcccagccaggtgcgggatataatctcctggtgtgccgttttttaagcccgtcggaaaagcgcagtattcgggtgggagtgacccgattttccaggtgctgtccgtcacccctttctttgactgggaaagggaactccctgaccccttgcacttcccaagtgaggcaatgcctcgccctgcttcggctcgcgcacggtgcgcgcacccactgacctgcgcccactgtctggcactccctagtgggatgaacccggtacctcagatggaaatgcagaaatcaccgtcttcggcgtctctcatgctgggagctgtagaccggagctgttcctattcggccatcttggctcctcccccatattttttttcttgagacagggtcttgctgggacgcccaggctggagtgcagtagtgtgatcttggctcactgcagccttgacttcacaggctcaagtgatcctcccaccccaggctcccaagtagctgggactacaggcacctccacacctggctaatttttgtatttttctacagacaggatttcaccatgttgcccaggctggtctcaaactgctgaccttaagtgatctgcctgcctcagcctcccaaaatcttggaattacagacatgagccacccctcccggtcttaacctgatatttttaataataattaaaaatatttattaaaaggctaccagaagaccagacgcagtggtttacacctgtagtcccagcactttgggaggctgaggcgggtggatcacctaagcccaggagtttgagaccagccagggcaacatggggagaccctgtctctactaaaaatacaaaaattagccaggcgtggtggcgcacgcctctcgtctcagctactcacggggctgaggtgggaggatcacttgagcccagacagtcgaggctgcagtgagccaagatcacactattgctctccagcctaggtgtcccagccagaccctgtctcaagataaaaaaaaaaaaaaaaaaaaagccactgaagcctggaataatgctggtactttatgactgtaacaaaaaaaaaaaaaagacttgaaaagttgccctgacatcataaagatgtggtgaagcaagaccatgtcctggaacgcaggtgccccttgtctgttcttttgttcacaacacccaaaggagaaggtccaggcatggtaagggggtgaaaaacatgagagctcttagtatcttttgaaatgttccgtactgaataacagagagcggtgtctggaaacagtaagaatggttaaagccttggcttgtgttgggaatttgggaaaaaacatagccacattctaactcattcctcattactttggtttgaggatacaagaaaggcacggcatccagtatttgtctggataaaagaaaaatcataccttctgtccagatgctgggtctcactgcttccaggtgcttgtccaaggcacgcacagtgatggcatcatctgacttgcatctgggtgtttcggtgtcgcctagccacactcacaaaccaaaggtgcaaatcggaagccagggctgggcacggtggctcacgcctgcaatcccagcactttgggaagcggaggcgggtggatcacctgaggtcaggagttcaagaccagcctggccaacatggtgagacccccgtctctactaaaaatacaaaaattagcaaggtgtggtggcacatgattgtaatcccagctactcaggaggctgaggcaggagaattgcttgaacctggaggaggaggttgcagtgagccaagattgcaccactgcactccagcctgggtgacagagtgagaccccgtcttaaaaaaaaaaaaaaaaaagaaatcagatgcccgagcagcatggggttccatgcctgtctccctacagcagcacgtcatatccactctgtggtccagatttcccatactccaaccaggggaaataccgcagagatgaaggagggtccaggaagcagtaaagaattaatacaaattaaaatgaatgccaaggaaaatgcaaacacatgggcaataataacatggcagcactgtccctggaagctacagtcagtcttctgtagttcctccaaagcccgggataatctaaggaagaaaaaaagggcaaccttaaacattcagggtattttttcctttcaaaacacaatcacaggcgctcaagagccctaagaaaaccatttaaattgtgcaaaacctcttcttgaggcatccaaaattagagtgcaggtataagctgaagaacttgattctgccatttatcactttgatacaaatatttctacagactttaaaatatatatatgtaactagccggtagcttctttccaaggtacacaaagtattctacaaagctcaactcataaagtttcacaaaattcacataaggcagggagcaactgatatgcagacagttccgcatggaagctcagaaagcctccagctggctggtcagaatcgaataaaactcactgaaagacagagcctaagggatctaggccaacctctttatttacagatggacaaaacagactcagaggggttgaaagccaaggtcaggctgcttcaggtctggagatcaggcttcggactcttgggttcctcccccaaccaccactccggactatctgctgtgacacggtgttgtggggtttttgcccacatcagctgatagaactgaaaagttaagatgtaatttctaggccaggctcggtggctcgtgcctgtaatcccagcactttgggaggccaaggtgggtggatcacctgaggtcaggagttcgagaccagcctggccaacatggtgaaaccccatctctaccaaaaatacaaaaattagctgggtatggtggcaggcgcctgtaatcccagctactcgggaggctgaggcaggagaatggcttgaaccccgggaggcggaggctgcagtgagccgagatcgcaccactgtactccagcctgggcgacaagggcaaaactccacctcaaaaaaaaaaaaaaaaaaaaaaaaaaagatgtgatttctctccagggctctgcctccttatattttgtaaatcagctctctgggtgcttcccaccctcaacatcattgctttttagcttatcgagctgccattccacggacttcaccatactccccttgaacagccaataggaaaagtttaagcttaaggattatttttgcatgggacatgtttaatgtgaatgatagaatgcaaaaggcagttttattccaaattttacaaatatatatgatgtatgtatatacacatatatttatatataaacgtgagtggttgtgtgtgtgtgtaaaattggtcagctggatctgtccactttgaaggttctagctagaatatggttatgtaaaattaagatgttcccatttaatttttaacaatcaaaacagttaatgagcattttggaatgtacaagccacccctcccacaaaggtgctgtagaagaccagagaatgaataggccatggtctctgcccttcagaggttcacagcctgcaaacactggagactattggtaaagcagaatttaatcgggaccacatttctattgcaataatgaaggctgggttgtgtatgcctcggatggcagacggtaacagccagatttagtccaaggctctggacgtggcacctagccacagagactctatgacaacacatggtgctgaatttgtcagataagtacaatattcggatcatgtgtatgtgttagtaaaggactctgaagtccctgccagttaaccagatcttctccaaagaaagacgccttctcaaaaaactgtgacgttgcagcactgggccaaaagcaatgatcttgtttataacctgctgctattgaaactcattaataatttacagtaatgtgggttccaacttctacttaactgctcttcaaagggccagagtcacattaaccgctgtgttttatttaatgtagccatgattaatttactaagcaattattttccagtgtcttttgggggaggagcttggagtcatatgaacaggtgtcatgtttatcacctttagagctcctgaacaaactttaagacacatacattttggtatttttcttatcagttgctttagtttacaaaatttaattgaaatggttttgaacaaatgccaggctgtctttctgcttaataaaacattttaaaagagcagttaatctactgccttgcacttgtacccaagaagttgctaagttaatttactgacaaagagaatcaatcatcgtaaatggtgtttaaacaatactggggactccggtgttggaataacatgatttattttatcatcttgttggtgttgtaacaggttaatggcagaaacctcctttcagttgactttgatcgaacaacaaagacagaaaagatctatgacgaccaccgtaaatttctactgaggatcgcctacgacacgtctgggcacccgactctctggctgccaagcagcaagctgatggccgtcaatgtcacctattcatccacaggtcaaattgccagcatccagcgaggcaccactagcgagaaagtagattatgacggacaggggaggatcgtgtctcgggtctttgctgatggtaaaacatggagttacacatatttagaaaaggtatgcctgcaaactaagctcaacaatagggaaaggataattcacatttttcagcaatcatccagagcactaaggggaaaaaaaacagtggcacatgactgagttccatttgttattcgaagtatcaatacggaagtcacattggcacagcagtgatgaatttctgcattagcaaagtagtttctccttagttaagttctactgtctgagacccttttaagtgatttatgatgtaaacaaataagcattaacgttgtccacctgccaagcttacacattgacaacattcacaaattagaccttgagcgtgtaagtcgcttgtaaataattttcgtgctagctcttccatttaagagagagccttacattagcacagttaaagctgtcagctttgtgttattcctggcagagcttcaacataatcataaaaagcatgtagatcctagttacgcattattaaccaaaagaggcgattttcttagaaagccacactttcgggtactctgtggcatctttcctttcttctacatataaaaggtaagcctcctagattaggctgttttccattcttgagaactatgcatagtatcaaaaatggagacttagaattacacgtgtgcaaaatgctaagttgtatgctgtgcggcttggggtattgactggggtcagaggaaatgaaagtaaaagaaagggaagaaaaaggaaagaacaatctccatgtaattcctttcttaagaaatatccaccgaaaagcatattcatggaatgtttcatttgcctttgagacaaaagttcgccctagaaaatgattctgttttgagttccggtagctctcagaccccagagcatggcaccaccagttacccagcagcgcgtgctacacactactcggcagttactgttccacccctcctgactgaaacgttgcacagaggaactcttgtcacccaaagaaatcacatcacatccatgttgtcactgtgctcccctcacacaatcttgttctttaccagaggtgccctggggaatggctcagtctaaacctaaccccctgaaccctgagccatcccaactaattccagccggcgcctgcacaggctactcttcctgagaaccagtttcagttccaaagctcactgtaggatgctacctctcttacggcagccccccacctctgggatgcgtccagctaggaccctcatggccaatccgtcctcttgcaaactcacctgtccgctctcatcagaagagactcacccttgagacaatgaaccacacctgttagatgacaagcccctaacgcaatgtttctaagtgggagaggatcatggcttcgttctggagcagttttcccaatttaaattcagtgcattacagagaagaataacagaaacatacaagcacaacccttaaaatgtatagtagtgatcataatggcactgggaaatgtttagagggagcccaggagcatatcattgagaagagccgctgtcacagaatgacaaaggcagtgaccaggatcacctgcatgcatccaggaggatcagaaaagacaacagacagatctttctcatcgtctctcccaaaacccatcaaatccacccagactatttcgatgttcttactgggataggtgcactaagccaaaacttactcatagcaaaacaagtaatattttacagaccaccatcaaatatgacttcagatgattccaaaagtaggtattcatgtgaattcggcaaagtccaagctttccttggaacaatgcaaactattaggaacaattctcaggacatttactacacaacctgcatgcaaaaattgcccctgggtctgcccaaagaggagattctacagaagctgaagtcaggcaaaggagaagtcccagcagggctcccaagctccacatcctccctgtgccaatgatgttccatttggcccagcgggttagaggaagcttcctcagagggaagagtcacccacagccctgtgttactgctgagcttgacttaaccagcctgggatgaccttctctcacatttgttggcctagtaactgtcatttgtctttcggcagtggctcatgaaatagagttcacttttaatacatttactcatttcataatttagcaccaaagcagtatgtagtccagaaaccatccttattgctcctgagatacaaatcggatttggtatccacagaaagaaaaggagattttattgtcagtacggatgccttgtaacaatttgcctgtatgtgtatatataatatttctattaagggcatttatagctctcattcaccatgtgattaatttcacaatattttttggtgtcgatgctttgtatacactttatccatttttggctaattttatgtctttatacaataatattgtgactgctttgcccctcccccaagtacactagaaattaaacatgatttgagtggttcttcactcagatgagggggggaaagccaccttactaaataattgctaattatggatagaactgcattccccatatgctcttttctcctcaaaatattgtctgtaaagcagctttgatcatgcctgtattatgactaatccagatccattgacaaatctgctggttggctatgaatgtctgggaaaataatggtactgtcgtgacaggcagcacattgtgaatctcgagccactaattgcagaacccctcacaattaagcatccaagcaaattaggcagagaaacgttaacaacacgcaaggtcaaggataactcaattaaaatgaaaatcattttctctagtggaatgtttctgtgcatctgtggtcactaaatctgcttttgcatctcccgttcacaaacactgagtaacagtatgttctctctttacagtccatggttcttctgcttcatagccagcggcagtacatcttcgaatacgatatgtgggaccgcctgtctgccatcaccatgcccagtgtggctcgccacaccatgcagaccatccgatccattggctactaccgcaacatatacaaccccccggaaagcaacgcctccatcatcacggactacaacgaggaagggctgcttctacaaacagctttcttgggtacaagtcggagggtcttattcaaatacagaaggcagactaggctctcagaaattttatatgatagcacaagagtcagttttacctatgatgaaacagcaggagtcctaaagacagtaaacctccagagtgatggttttatttgcaccattagatacaggcaaattggtcccctgattgacaggcagattttccgctttagtgaagatgggatggtaaatgcaagatttgactatagctatgacaacagctttcgagtgaccagcatgcagggtgtgatcaatgaaacgccactgcctattgatctgtatcagtttgatgacatttctggcaaagttgagcagtttggaaagtttggagttatatattatgatattaaccagatcatttctacagctgtaatgacctatacgaagcactttgatgctcatggccgtatcaaggagattcaatatgagatattcaggtcgctcatgtactggattacaattcagtatgataacatgggtcgggtaaccaagagagagattaaaatagggccctttgccaacaccaccaaatatgcttatgaatatgatgttgatggacagctccaaacagtttacctcaatgaaaagataatgtggcggtacaactacgatctgaatggaaacctccatttactgaacccaagtaacagtgcgcgtctgacaccccttcgctatgacctgcgagacagaatcactcgactgggtgatgttcaatatcggttggatgaagatggtttcctacgtcaaaggggcacggaaatctttgaatatagctccaaggggcttctaactcgagtttacagtaaaggcagtggctggacagtgatctaccgttatgacggcctgggaaggcgtgtttctagcaaaaccagtctaggacagcacctgcagtttttttatgctgacttaacttatcccactaggattactcatgtctacaaccattcgagttcagaaattacctccctgtattatgatctccaaggacatctttttgccatggaaatcagcagtggggatgaattctatattgcatcggataacacagggacaccactggctgtgttcagtagcaatgggcttatgctgaaacagattcagtacactgcatatggggaaatctattttgactctaatattgactttcaactggtaattggatttcatggtggcctgtatgacccactcaccaaattaatccactttggagaaagagattatgacattttggcaggacggtggacaacacctgacatagaaatctggaaaagaattgggaaggacccagctccttttaacttgtacatgtttaggaataacaaccctgcaagcaaaatccatgacgtgaaagattacatcacaggtaagcattttgattccttcccaagagctggaggactaccatcattagattaatacacaaaataactggaaatgcttttttaaaaaactttatactttactcaggcaaaggcaaatggctaaccttttaaatgtgtttatttctttatggaaccatagagaaatcacaaagggaaaatgagacatatttacttcctattctgcctgccattgcccaaggccacaagtttttgaaatgacatgtactcagtcatttaaagaaggggaacatgggggaccaaaaaacatgatgaacacagagtcccaaaattggagtcccaatcccagctcctctcccacaagttgtgtagctctgtaagcaagccatatgttttttgagtttccattcccttaactataaaattgggataataatggctaacttagggcacaaatataatacatgaaattctgcaacagatagtaactaccttacgaatgtgtcatgttgggtttttttaatacatgtgtgaagttctcatggagataattaaggtgaaacacaatacaaggtgacaccatttcatccctgggaggtgtttaattcctgcctcaccaccattgcctcaggacagtcacgaagccatttctcccatcagttgcttagacaatggatcctgtgtctggactcacttctgtcttcttacatcactgtcttcattgccagtgcagttcttgcatggtgacaatactaataggcatactaatttttccacgaatgtgggataattttcagggtacagatttaagatctttccaagtttagtgcatgctacctttttagttatgcaagatgtagaacatcagatcccacttctgccaccatggaacaaccagcatgtgaaacagacaaggtccttgcaagcattactctagttccctttagtgagctgacttcttcactcaacctctactccaagaattctgaatcctgctgctcctaccttccattcctgatatacagcaccatcattaacccctctaccacatttatatttccaggaggaaggttctttcctgttgtcttttttttttgggcttgatttaaggtattttggttttgttttggcttgtgttagatgctcctttaggctgcctcttttctagctcaatatttgaggcatactgagatgtctgttctctcagttctcaaaacagctctcaacaggttgccccctgttcatttcacatctgcttcctacctttccagactgtctaaagcatttcatatctcttccatgtgaaccagctgaaagtccctcctttctgcctcctgattcagcagcacccttattctcattcagggtttttcaatacacatctgccttcaaaccccattattttggcagtacttttcaatacttacggtcctctgattttcactgttatgcagacattgttcagagtaacagaatttttgcccccaatactccaacatttgggagaattttctcccaaaataaggccctcccacccccaaactcatatacactcttacatacacacaaattgtgtcactttgcatcctgtgtgaaccacttaggatttatgtctccccaccaccactactaccaccccatttcaaataaaaagaataccactggttttatagccatatgatgcctggacgaatgacctgccagcctggcaatgaggtgagagtctgtgccctagagaaggaaatgggaatcaagtggctctccatcattctgacaggcagtttaccactggttatttaaggggtgttgacaggggctgactgaaagtctggaaagcccacagctcctgaattcatcctctcctagcaacgtggactgcagggaatgccatagcagcattttctgaaaaacatcaaaagagagatggaacagcataaaatatattaggtgaaatgcaatttcaaattttccagcaatgtgcttaatatataaaataatctacacccaaccgttctcataaagctgcaagcctgctgagtagttctgtaacattataacctccagaatagaataaaagccttattctgagctgaatggcttttggagtcacatggcaatattttaaaataccaccttaaaggtttccgggttctctccccaaaaagtttgtctccacctgtgcacagtgagcctttgaagtcacaactgatggtaatcaggacttctgggcccttggccagttttgccagcttgcagcattcatctttgattaagaatcaactgttgattttaatactctcaatttaggggttttattaatagaaaatgggttgtggaagtccgcatatccttgggcaatcgctttggagagctaataacacacaacttctatttgagaccagccttgaccaactacaaaataaatttcgtttcttttctacaagtatgtctctctcctgctgctgtgcattgttcttacctttgctagcactgttactagcacaggctgcaacttagcaggactgatggcttacccagtctgtctgagcatctattactcgcatttttcgtagcatttgccatagttctgctgtgaaggttaccgtcttcatgtctaaaaacagtaggtttagatttgtaggacgaaagcaaacaggtgctctttttcagattattaattgtgaaattggattttctttttaaggtaagaatttaaatttatgaaaggacaaaacaaactccaacacctttcattctgaacattcttctcctagatgttaacagctggctggtgacatttggtttccatctgcacaatgctattcctggattccctgttcccaaatttgatttaacagaaccttcttacgaacttgtgaagagtcagcagtgggatgatataccggtaagaaacaaaaagacctacggaaaggtgataagtagcttgtgtcttatctacccatatctaatcaaactacccttgtgaaaactgtaccaaagacagtttttaactttttgactgttttagggaaaaaaaacaacacttcctctgcatttgtgttcaacaaaccagaggcctcttaaacaggcttaaatatgttttcagcaatgctaatgaaaacatagaaatgcagaagctcactttcgagtgctgggtttctaaaaagaaccccaagaaagcgtggacctgaaggcaaaaatacaataaacaaaagggcagggaactcatattacaaattagcaaaccacaaacaatgccacaaggttcaacttctttaaaaattaacagtgttttggccgagtgagggggctcacgcctgtaatcccagcactttgggaggccgaggaggtcggatcacctgaggtcgggagttcgagaccagcctgaccaacatggagaaaccccatctctactaaaaatacaaaattagcccggcatggtggggcatgcctgttatcccagctactcaggaggctgaggcaggagaatcacttgaacctgggaggcggaggttgcagtgacccgagatcacgccattgtactccagcctgagcaacaagagcgaaactccgtctcaaaaaaaaaataattaattaattaatagtgtttcataggaaaagattaaaaataaaaataaatgtcctctggtaaggctccacctacaaccaggaaggtttatggaattttcctgagaatagcagatcaagaggcctgtaaccattataagaaataaagaaatataatagaaaattgcaaagtcaaagctgccgcttcagaaagtggtacttctaatccccaccagagaccagaaaggaatgcacagcaaaacaccagaatttccagcttacagtaagaataattagagatggagaaactgggtgactccatgatcataaggagaagacagtgcagactttcttaggacaattaattcccaaccaccccttgagcaatttcctatcatttcaatgaaaacaaagagaagaggcagccatggttaacacacacacaggctatctacagtaccagtacctgttttttgttgtttcatacctaatataaaagcaattcctttttcataagttacaaatatagtcgtgtgtgtgcaacattttggtcaatgacagaccttgtataaggtggtgatcacataagattacaatatcatatatatttttttttaattgaaatggggtctcactgtgtcacccaggctggagtgcagccttgacctcctgggctcaagcgatcctcccacctcaggctcccaagtatctgggactacaggcacgtgccaccacacccagctaattttttattttttgtagagataagagtctccctgcgtagcacaggctggtcttgaactcctggtctcaagcgttcctcctgcctccacctactgaagggctaggattacaggcatgagccaccgggctctgccaacactgtgtttttactgtacctcttctatgtttagatacacaagtacttaccatggtgttacagttgcctgcaatattcagtacagtcacaccgtatacaggtttgcagcctagaagccataggccatcccatacagcctacgtgtgcagtaggctacaccatctaggtttgtgtaagtgcccgctatgatgttcacacaaggacgaaatggcctaatgccacatttctcagaatgcctccctgcggttaagcagtgcatgactgtctacactgatacagtggcatgaagacataccgaagtttcctaatgcatttgaacatgcacttcctaattgtgtatgactttccaacatgcctgaaaacacctacatctaactgtacaaatggacttgccagctcttttcctaagcagccttttaaatatggttcaagttctctgtcaaaagaagtgcaccataaggacagcataggaaatcgtgggcaaagacactgaggctgccccaagtacagaaaaacaactgtttctttcattgccgcaaatgaaacagatgttttcatttgggaaacaatggccagacaaacatctggtggtataagaaatggctgagttaagatgcccccaatttaaaacatttgccagtctagacggtccactgtccctaagtctgagaaaaataattgttttcctaaagtaacaaatatcgtctccagctgccccaccttccactcatccctgtacatttcagttctgcggttacactcaccatcttcagctgaaaactctgccaggagaggggacagagttgacttaaatacaagcatttcaaagcatacgaagcggggccctgtgatcggcactaagtatccccagccgttcagatccctctctgtgtttggtggcttctcagcctcctgtggagaaagctacgagcatgcagatccggatgagctgggttccccacgtggggtgggagtgggaaaagagcatctagaaactgtaagagaaaagcaagaaacaggactatttttcccatgttagaaacgaagaaagctttaaagtgatccacgatgagtgagccatttgggggttccagagcatcgggatcaccttgagggggagggatctcgagtgctccctccacccgggctgtcagccttctggtcagggaaggaccccggggcttccatgcatgccccggcgctgcccccagagtcccgtgtgtgggtcaggagtggggaggctcccggccgcctctgacgcgccccctcttttgtttcgcccgcagcccatcttcggagtccagcagcaagtggcgcggcaggccaaggccttcctgtcgctggggaagatggccgaggtgcaggtgagccggcgccgggccggcggcgcgcagtcctggctgtggttcgccacggtcaagtcgctgatcggcaagggcgtcatgctggccgtcagccagggccgcgtgcagaccaacgtgctcaacatcgccaacgaggactgcatcaaggtggcggccgtgctcaacaacgccttctacctggagaacctgcacttcaccatcgagggcaaggacacgcactacttcatcaagaccaccacgcccgagagcgacctgggcacgctgcggttgaccagcggccgcaaggcgctggagaacggcatcaacgtgacggtgtcgcagtccaccacggtggtgaacggcaggacgcgcaggttcgcggacgtggagatgcagttcggcgcgctggcgctgcacgtgcgctacggcatgaccctggacgaggagaaggcgcgcatcctggagcaggcgcggcagcgcgcgctcgcccgggcctgggcgcgcgagcagcagcgcgtgcgcgacggcgaggagggcgcgcgcctctggacggagggcgagaagcggcagctgctgagcgccggcaaggtgcagggctacgacgggtactacgtactctcggtggagcagtaccccgagctggccgacagcgccaacaacatccagttcctgcggcagagcgagatcggcaggaggtaacgcccgggccgcgcccgccgagccgctcacgccctgcccacattgtcctgtggcacaacccgagtgggactctccaacgcccaagagccttcctcccgggggaatgagactgctgttacgacccacacccacaccgcgaaaacaaggaccgcttttttccgaatgaccttaaaggtgatcggctttaacgaatatgtttacatatgcatagcgctgcactcagtcggactgaacgtagccagaggaaaaaaaaatcatcaaggacaaaggcctcgacctgttgcgctgggccgtctgttccttctaggcactgtatttaactaactttaaaaaagaaaaaaaaatgtgtacagtgtttccaaatagtcccgaattgtcgacctttgcttacaagaagtagtctgtctgcataggatgtgatagctatctctgttcattttacaatgtggggcaaagttactgtttctagacaacccaactgctttccctgtgcagctttgtagaaggacattggcacagtgacttctgcggcggggatttattaatggattttacaatgctaacgtggtttcccttcggggaaaaaactggcaactagaatccttgtcactgataagcaaaggaaatcctgatttttttgtaaattatgtgagacaagttgtttatggatttttatatgaattacaatttactgtacatcaaatcttagtctcagaggagttaatttatgtaaagtgtttaaaaatttatacttaaaaataaaatgataaaaacgtgaactgtgtgatttttttaaaaggattgcaccttttgttatctgttatagctgtacagtatgaattattatattgtagagatataacaacttatgcctataatgtccagaagtgttaatatttttgtattaggttgaaaaaatgtgcaagcttctatcactagatggataggaccgtgcaattctaggtgggtggcgaatcagagagctcctttctcttccctctctcacgcatcaggccagtgtcctcagcattgtcaactgagaggcacagtagacaactagggctggtggaatgtaagggaagaagattgaaaaaacgggaggaagggttctctggccctctctcaaccttgcaagtcaatggggagttgttgatataattaaccccgaggtttttactgttactgttccaaagctctgtctcttgatggaggagagaccacatcagatgctggggaaataggaggaggaaaggttctgatgtagtcgtgatcctaaacacgtgtcttaagatctaggaaagacagcagaaaccgagcagtggtgggtgagccagatggagccggtcagggttactctaagcccacatgaccaaaccatcttggggggctggtttgaatgacagcctctgctctgtctcggggaagccgggggtggcagatccagctggaagtgaactgacagccgcgccctcctgcacacatgcatgcacgcgtgtgggaacgagcccagccgccatctgcacttccgtgtcggctcagctctgacaaatctctttcctgagcactaaattcagccacgaaaatatttttagaagatatttctcagttcatcgagctatagtacacactgttttcctctatgtataatggtgataaaatatagcaagtgaacatgtcgtaaatataaaggttcaagtgatgtattgaaaataattttctaactgctttgtatgtatcacatactctaaattgcacagtaggcgtgtttattaaacagatgattggctgggaaagtttcaaaatagctactgaatttacagtatcagtgctattactgtctttgtgtatttggtagagcataccgaagtaattaatcttctaatgaatgctgatgatattttattagaatgaaagcacagattagcattaatattttttattctggaaatcctttggcaagtattatgaagcccaaatttagaaaactatgagatttcaaaccacataaacatgattctgttttccattttattttttaactgttaggtatttgcagttctgttccgtggaacttctgcaggcctgtatttagcatgctgtaagtacttttgggtgaaataggctctgagtctaaattctcagacatgtttctgatgtattaccatgaaaagcttgtgccacatgacagaagtgagatcatagtcttaacctcttcttgacgtggactggtcttcactcgggcaccgataaataacagatttggagtatctcctggtgcttattttagatgatgaagtcaaatcaacccaattagtgtcctgttagtaggtataatgagcctatttctttctaaaaagacttgtgatctggacatgcttttacaagaaatagtgaccttggggaatatgtaaacaaaagacctttttctaagagttgggagggggtgggggactgtataatgaaaagaattagcttacaaaaaagaaattgatattcaaagtattttaggcaaagccagtcaaaatgctttcatgatattttgagatgtaaattttgtctgatttgtattgttcttttcatttgccttcttaactttatatgtgacctgaattttccataacttgatgactatagattgcacctaggcattccaataaaagccaacccaatgtgtgtgtgtttttatattttttcaagtcttgggctagccagcattgcttttgtgtttaacgtggaggacgcaaatagatgcagttgttggggaattgattcatctgcaacccagttggtagtatcttttttttttttttttttgtccattggccagactgctggctcagcagagtgaacttcacaggggactctcccatggcctactttagaaaaacagtaaacacacccccacaaagccaaacacgctaactgtaaagaagagtttacaaaaataccacccattactacttgagagcaggcctcattcctgtgatcctggcaataagtgtgcttaattaaaacacttgattagaataatcagtttgggcctggtaggcttgcagcctcctggagatgtctaaatctacatatagaccggctgattagaagatgcttagttcagcaattctggccggcaggccagggctttgattttagtcggaagaggcagacttcatcacacttgctttctagtgacaacctcaactgcataacgtgttgatccagcaagaatcaggtcattccacttggcaaactggtctgttttcttctcctcgaattagactttaacatgatcaaaacggaattccagaaaaacaggcgaagtactgctttccttctctacagtcttttccttaaaagtaatgtctgaacaaatgcaaataaaaatggtgccggtaaaaattataccttagaaaaaataatctgaatatgggatatgctgctgccacatcccgtgaaatttgtctttacattcaccacacatatcctaacagttgcatggggttctaactgccagaccgcaacagaagggcagcacctgactgtaagtacttcaaaatcaggaccagtcctcaagcgcttgaaaagatgaggagaggagctggaggttacaacgagctatgatcgcagcactgctctccggcctgagcgacacaagacccagtctcttaaaaaaaaaaaaaaaaaaagttttttaatgaaagaatgccgttgatgctttccctatccgtgcccactcttcactccgttcaccatcttttctttctccttttgccctgggctactcctgaatgcagttgtttctctcgcctgctgacagcaaatcagctgtccgaggtgcttttggaaaggagggattcaagagaggaagccagaaggcactgatccacatcatgttctgtctgggtaaaaccacccgggcagtgctcacagccgctcgcttgctgttgtacagaggaggacaaggtccacctggaccaagaactgccaccacccatctggccggggcggggtgggtatcatttgatctccagcagagtggggtgagtctgcccctgggaagcctcgaagggcaacatattaagatctcacccttccatagatacccaaatttcctcccactttccttcaaggagtgatctgattccagcatcccagtccacaaaatgcatccccatt

SEQ ID NO: 610 - DNA, 8509 bp, Homo sapiens
  source 1..8509: mol_type = genomic DNA
tgagagtaaagctgtcttctgtgataacttcatctcagcatgaggtcagacggggaaaactgggatgggggattaaaaaatgacacagtcggagcagtattcagttccctgctgtgctcctggctgcacactatagcttatgtttctgatctgttatggtattgtctgcctttctctctcggagcagaaagagattgcttaaaacttttcttttttcagctagagggattagttctgtgcagcttttttaattaaagaaactgtatctttttcaaggcaatttaaagctgcaagggaagacccatcaacatccataacttagtactattatctgtaacaaagtctaagctctaaatttgatattcagaaataggggaaaggagctatagaattctgttgtattcttaaccttcagtggttgctcaaatccctaaatgaagaatagtaaataaattattttgtgtaagtcctgaatatgtttctataagtagtaactttcagcctctttgctttttagcctagctgagcttgcttaattaaatcttcatgatgatagcgaagtgcacttgcaaatggtgtaagaggaaatagatttgactatatatccttttctttacccagagatcatttttaaacatttccattctactgaaagtgataacagtagaaaaggtctgcttaatatgggcaatttgcatttaaacagtgcaaagtacaacattatggtactttatcacgacgaatctttgcatgtgtgataagcggtcatcatctttattaatctgagggaagcatggattgaatctatccaaagtgatgatgaatttgtcaggacatatacatttgagttgaatttatagctcaatttaacccaggttaatgtcgaaaatcctcaaatgtttcaaataaggcccatatggttatcactttacaaagcacacaggctctgcgcttcagttgcaacatacacatctccaactaaattccatgccagatcaattagaaacagtcctcctgagcagacaggaacaaacaaagattgtttccccaataccagctgaacccttgtcttgaagaaatgaaaagcagtcatcttaggctctacacttcttaccactaaaaatccaaagggaatttggaggacgacagggttttataaataatgtcatatttaatataaaaacatgagtatctacatgttataggtgcttgctacaatttgtttccaaatttcgataaacatcatatcctactgaaaaagagaaaaccaaaatttgatctctttgccttttctcattgtttttgtctttacttcgcattatgattctgagaaaagtcaaccaaggtcaaaagtggttcgttgtaatgaccagaattttaaaacgatgtcccattaaaaacttcatggtcagagaagtagaacagtgtacttaaatgcattttcaaggtaaattttatttatgacatacccctgtttaaaaaagaaagtcagaggggctaaagacaatgaaaatattttattcgtgtatccactcattcgttcaacaaacatttattgagcagctcctatatgccagcccatgggctaggcttgtgtgtccaaagaggcataaggttgagcccctacactccaagagtgctcagctattaggaaagacctatgcaaaaaacagtgccatcctttattacatgcagaaaacacagtggaagcactgccaacgggaggagagtatcactaataggtactttaaaaactatgtgttccaggggccccggatgcagagcattccagactaagaggtcaccaaagggaggagaaagagtagggcacttctgggaaataaaaagatgttcaatttgtctgatactgaatttagtcacttgatacctatatttttaacctatatttacaagttaacatataagctggaccctgaaatatctaacgggtgttgtttgactaaaaaattgtcctgtagtgtcactattgtatcataaaccttgccagcagctaatgcctacctcgagtacactatatacgcttctcactgaaaagttgtttatagaaaatatgacagatgttaaaaggcactctatgataactcttaaaaaggttccaactttcactgtggaataatgtagcaagttttaaatacgttcacagagctaaaccaaaaccgaaagttccacatgttaaaagacgctggtgttcaaaatccttcgcaaaacctggggtcttttatgaggctctagccaaagcaagggagcccctgggtggtgctacgcaaatgcatttccaccgaaggtcggagccacgcgtaaggcccggtttacaccatggaatacaaacgaatgtactggagaagcatggtcccaattaaaggttgcttcgtctcatcaccagtccattcagtggctccaaaatgcatgcacattgagagaggcttatcttgctttaattaagataatgaaagcatgttttcctctacaaacagtcattgaattttatgactttgtcagtgatcgaattaaaatatttgttttatagttccctcaatctaacagccaagggataagttatttttttgccagtggggggaaaaccccacccaataataactttgtctacttgagagacttccatgtaaaatttaagttttagtgttgttcactgttgcagattaattgcttgctacctgtgaaggcacttgtgtaagggaaacacctcaggtgcctagaatttgggttttgctcagtggctaccagcctttagcctctgttctaaagtggcccatcacctatttgctgttctcagttgagacataagctccttttgggcatatgtgggttattggctttcctgagcctgaggggtgagctggaaggtctcggtacctgagatttggctcccctggtcatttctaccccgttcctcatcgttcctagggtctcttgagtgggagaggttgcagccggggcagcaactgggtttgaacccagcagacaggccgctcatgcctccgtttgctaaagcagatgtaataaagtccaaacaataggtaaactccagtgatgtccacaagtgtccttggagagcctaatacctgcctgacccggcggtccccttctgcacgcctgaaagcctcgcgtgttaaaggaggaagtggctgcggagaccctcgagtctgcacgggcaagaggcacaaacagctgctacccggccccttcagttccaagctggctctttaggacaggaggagaaaacggacagaccccaaaggggagaaagggaaggcgcatgtgatgctgactaaaatggacaggtgtcaccttcaggtgggcagcgacactcggctgagacttgacccgcggggaggcggtggagcagcagggcagggtgctgttggccttgcctcagtagtggggcaagaacctgtctcctcttccccaaaatgaatccagaggttcggcccattatatccctcccccccgccccccagccctttgagaggcttccaaaggccccaggcatgcattcctaggactagggctaggcgagggttgctgggccacattttccttttggagagctgcgcatctgtgtggcaagaggggcccacgggagggcgatgccgccagctcggtcccattatcccgagcacgaccggctgcgttcacaccgcaaagtcaccagccgcgccgggcagagtttgctgagagcggccagaggcttgcaaaacagacagcgatgtcttgcatttcttctcccgctccagtttttattgctgcggagggcacgacgtgagctgcccgccatccccgccctctcttgacaacagctcagtgaggtaaaaagcatgatggtcacgtagcgagctgcctctctgctttccagggattcatccgaaggaggaagcgtgtggtagtttggcactgcacaacatcagcttttcctaacggcctcaaatgatggaacttctttgtgtgagagacagagagagacccaaatttaacacacgtaagctgcctggattacaggcgcaggcagacgtagaggaggacccctgcgcgctttgtccaccagcgacgcctggcatagagtgcgcagggccgtattaatgagttctagagtatttttttctattttgcaaccatagtgtgaacgttcagcattgcatactgaaaaactttgaatctcatgtaagaaggaactgggctagagacaggagccaagatttattaccatttctaagttttatgagttctattgttttcctacctttattaccagcgttagctgtaatgaggattctagaaaaaagagctggaaaaaagaagcatcccctaactcacacaatgtagcacttcagttctggcctctttaggattggggcagtgtctcatctctttattgtgtattcgtagacagtaagagggagtctcacttactacttggaaaagttttaaagacctaatacttttgtgtgtgtgtgggaactaggccacaaaagtgctttatgaaagagtttccttacgatcatgtccggattcaaatttcaagtagtttgcatgatcttcatgtaatatctgggacacaccttcataattgacaagccttttttttatataataataagaatggctaaatgagtgagggatatcattcatccgcccccatgaccttatctttttcaagtgtgaaattcagtggcagaaggagatggatctatcccagggcgactctagattcttcccgcaaagatatgcgtgctgctttccgtcactagcgccccgagagccgggtcgggttcgcttactaccaagacttctctacttaacgcgctgcgctcgggcacttagcaacttcgggaacacgggctgtgggtctgggcacaccacctcgagtttagggattctcctcacttctagcccaaactttggataaactaacataaaggttcaggctttcctaggaggcgtcgtccttgttctcccagtgctcgatctgtttctggttctgcacggtagttaaaaatgcaagtggatttcctaacggccgagtacaggtacaggtggaggtcggcggaatcctctgctctgaagctgaaagtggagggtggcgcgaggcggctggcgcgacgaggctgagagcgcaccagtctccgccacgcttccaaggacaggttggcgacggccggggcaggcctggtcgcgggctcctagccctccacgggcagactgctggtcccaggagagggcggggagatgctcgggcgcgcaccagggagccgcactcactcggcagccccaagcacgcacgccccacctctgccgccgccccgtcccggacccgaaaggagcctgaaggatcccgccgaccacccagccagagagcggttcggctcaggtcgcccattcggagctacaaaactctggaacctccagcagtttcggaagctccgggggagggctttcctgcagacagggggcgggagctagggagccgggagccagcgctgcggtgggaacttcagtgagtagaaagtggccagtgtcttgggaggagcagcaaactttttttttccctcccacagcaaacaaaatcgaggcagggacagtgtccggccgctaatctgaggggagaatggagaggaaagaagagtagtaaaagtggggagtggagccttcggaggactcccgggtccgcccctggccaggtgatgcggggcggaggcctaggtgcttgaacctggggggcagacaattgttctgctgcagtgcccaccaggggctggtaaggaagtctgagtgtttactgcctcccttccctgtccaaaggtcatttgcgcttttcggtctcggacgaaagaacactgtggaaaggaaggcgcgggtcattttcagaggctctgcaaaggacgggccgcctaccgggggtggaaatccttaattacacccttctgcctcggaatccgtcttcccggcagtgtcttgcactgccacctcctcgggtgactcagctgacctgaaatgcccaccctacggaagatcaagaaaagtagttttctaagaaggttagaggtttgattacacagagaagtgtttccacttaagtccaaagcaattacccgccccctcccccagggccgcctccccgccacccgcagcagaaaaggacagacccccacgcacgtacccccattttgttggtgcgtgtgaatttcaaatggcgcagtaagttcattagtgttttcaatcggcggcgggcagacccctcatcagagccgaaagccggcaagagccattcatcagcgtgaagtgttattcacggatgacccctaaatcacggcgagagtagtaaaggcactgattggtcacagcatgggagcctcggtgctttcccgaacccgacgcggccgggaggagggaaggagggaggggcggcgaacgtggttcagtccggcaaatcccatttgacagaaaaaggcagtaaacggggaatctctttttttgaataaagaagaagaagaaataaagtacctgtcatcttgacaagtggcggagcggaggagtcaaggattataaatgatcacagccaggtccagctcgccccgtgattgggctctcccgcgatctgcaccgggggaagcgcatggtaggctcctctcctctcctcctctccctcgcacactcccgcacacacacacacacacacacacacggacacgtgtacgcgcccgggctcgggcacactcggcccggcgcgtcccccgccgcacaattacggtcctggatgccgctccctggccgggcgtcccgcgggcctcctcacctggcccttctcgccttcctcctccctcgcctccccggtcctcccgctcgcgggctgaaccccgaaaactccggcccggcctggtccgccgccttggaggaggctggaggggccggcgggcggggagagggggagcgcgggggagagaaagaaagtgaactcattggcgcgcgggcgccctcccctcccgcgtccccgggccgcgcggccgggggcgggcagggaaggaagttgtaacactcgcgccccctccccgcccccgccccgccggcgcccgctccccgctccctcggcggggcccccctcccccgcgcccggctcctttgaatttggcccggcgcggtgtgcgcgcggctcgggcggacgcggcggctgctgccggggagcgagccggcggcgcgggcgagccgagcgcggtaagtgcggcgccgccgccggcgcgccctccttcctttatggggtcctagtgccgggccgcggcgccgggagctggcgggcgcgagctgggacggcgcgtggccccgggaggcggcggacgcggggacatcttctcagcgcgcggattctctccacggtccggcctccccgtccccgccccgccctcgcgccagccacctccggccgccggctcaggtgggaacttcgccggcgcctctcgcccggggagccaggcgccgcgcccccgtactggggagccccggggtccctgaggaaggcagtccggaggctgggcgcccagtgggggcggggaggggagcccgccaggtcctcttcggcccccgatgtgtggcgaggccccgcgtcttctgcgggggcgtcttaacaggatcctggggggcttccagcgagcggaaagccccgggatgtcaccgctttccggggcaggcaggggacagaaggcttctgcagcgatcagggagccaagttgaaaaggagtgaaggagggagagtgcggggcgaggggtagcgtggggagtggtggatcacggctgaaacttgatcgggaaactctggatggggttggaaacacacacaaaatatcctgagctgggcgtttcaaaaattacgaatttatgagcctgcaactgagattctaagtccctctcgtgttttacaaccgattacaaagagcttcacgtattttaggttgaggcgggttgtgtctgattgatctttgctgagcatcttactatgcagcttggattccattcttactgcctcacctttaaggtagctggagtggtaacttgttaatttttattgtagagagagggtaacaagtacttgtaccgtgtaatacatcacacacgtgtgtttccccaagtcactgtaatttggaggtagagaaaagtttccaggtacgtgtgaggaggtgcaatggaaatgaaaggctgagagctgtcctagactttttacagggccccagacggctgggatgcccgagaacaggactgtctcttcatcatgctctatttcttatcttctgacaatgtattttgtcaaacattggtagactctggcagaatccactgggtggtcttttcactagaaatagacatatgttgaggcattacctttcccttctcttgtcaaaagaaaaaaggtggatatggcatctctggaaagcttggaagagtatcccaaaagatggtattgtaactgaacagaacttggtga

SEQ ID NO: 611 - DNA, 790367 bp, Homo sapiens
  source 1..790367: mol_type = genomic DNA
gagcgtattgtcattgattgagggtatctgaagtgccaggctcagtggcttattctgtacagtataaaggatagtgtagttggcagcggctctcaagcctgatggggcatcagaatcacctgggaacctgttatcattgcagattataaggctgcacccagacccactgattgagaaattctggtggtggaacctagcaatctgtgttttaataagacttctgggtgatttggatgcagcccaaagttcgagaaccactggtgtagtggaaacagtactagactttggaaggtggggtgggctggtgggggagggaggtgtgacggggacaactcatattgggcactggggaaagtctgctgtgttctgagtcatgggctacattactcgcatgttctttcaagtgctctaagcagtgactgggggtggtggtggggggtctatatcaccataatctcagcatagatggaaaatccaaagcttagaggggttaaatgacttgccaaagatcacacagtactagagctgcattctgcaccaaatttggcttgattcccagagcgagattgtcagtgcctattgggaccactgacccaccaacgtgcaatggtctgggcagcaaggcctggaaaacccacaggggcctgggtggaaggaagagccccaaagcttgcggctccttccctgaggacctggtggtgaccagtcctgaggctgatgggcgagagatgaggacttctattctaattcctgtcctcaaaggacaattatttgaattttcataaggtttgccattcacaccagggagctgggcttagcacgtgtactctttcaagagaccagctgttgtccctgactcctagggctgataggttcaacatgaggttaagtgagaaaagcagggtgaaaaattacccgtatgctgtgatgacaacaccttagataaaaaacaacaacattaagaacacacagaggcggggaaagcccgaaggaattttcttcctttctcatttcccaaggtgtattatgtagttacaattatttgtatgatgaatatacagtcatttatttttaaagtgcaacggctcacatcccttgtggaaggcagtggcatggtggatgactctgtgtgcccagtggtggagcaaggctccctcctctgggagggttgggttcgttggccccttcagcctgtccctgaacgagggcagcagtgggatggggagccacgctgcactagtgatgtcagaggagctgtgatatttattcctgtcatgcaattgcaaagtcaagcttcagggtcttagagaccctctggacatccctcttgacagagctgcagcctggagggatttagagggaccctggggcctaggactgagtcctctcccaggtcatcctgatagcagccagcagggaagtgcaaacccaggatggctcgggggctgggacaggcaagaggaagcctttatctccaagcaaaggccaccagacacctgtaaacacaaaatagtctttatttgtcaacgaaggctacacgggatcacttctggttttgtttttatgcttttttttttctagaaggtatctacatctgcatttatttacagccttgttggtatttacacagtcaagatacagtgttagaaacacaaaagtgttgagaaaaaaacttctcaaaattagttccagacttcaggaaaatgatttccacatggtaaggccagagtctccagtgttggtcatccagaagcagcttggtacagactccttttgccgaagctgcgggttcagaggtgctcagaacaacaggtggatttagaaaagtgggattctggtgttgggtgaatccagggctgctggggcaccgccagacacctgaggctcagctcctgccaggacggccgagcgtgctccagactagtcctcccttggctgttcgccctcagaataaatcacattttcttggggaccaggaggtcacctagtaccttgcctttggcattccagagggggtaagaaacacaacattggccctcgcctgggccttcccacactctgatattccacattcgtaatgaaacctaagagtcaccactgtctagggcagtcaagtacacaaggatggtttttgtgaatgtgaaggttggagaggataaggtttctctctatcacctcagcaatgagtctttaaaatgagtttgctgtttttggaaggttaaatgaaagggccttgaactgcagagttcttttttaattccctttcctccagtaaaatatagacaagtgtataaacctagctgggaatgatgtgccttaaatagagaggttttcattctaacaaggaccccaagggaaaggaaagactgggttctttctgggatccctcaggagatgtgtccccgggccaggtctggctcctgggcttagtggctgccgtgaggactggagaatagcctggactttgagcagtggatgctcaaatccccaagcctgacaccctgctgagagcttgaaagctcattcctcctgggcagaaagctcagcatcaccgccctcaccacatggccaccacaaatacaagactgcaagtggtaaaactgcattctaagatttcacattgaaatcttagattccatttgcataatggaaatccctgccatctataaaggtgatactttaaagttgcagctgcgaagatttgtttttcttcttttttcaaattctgattctttgttctgtgtctacaaaacactgcccagtctgccttgccatcatcttctgtgccccctcctggttatttggacacacacctcctggccattctcaccctcagtcagtttcttagggatcgtttccaatcctctctccctaagtagaaatcaggcactggtgtggtccttgggttaattctcagccaacaattctgagagatgagggtcagaggctgacaaggcagtaatttacctgcatgccttccccttcctccagtctgccctccagcaatgtctgtttggggtgtgggggggtgggataaaaaggaaatctcatcctacaaaaaaacaaagttggggaatcagtaaagtcctatttaaggtggtggcagaggggctgaggatgtaggaccagttggcagctgtgcggggtaggagagaaggcaggaactgtaggatcatacacctgggcaggtgagggaggcctggtcactctatcgaatgaacagatttggttggtgagtgtcaaaagggccggtcctctcaggatgggagtcgatgcttggagcctattacataggcacagggttaggccttcacactcacccttgccatgggtttgtgactgctggtcttagcaggaggacagcttgaggagggagtcactgagtcacctgcagcccaaatggaaaccaactcaaaagggccaaggccagaagcaccaccttcaatacaacagcaccaatgtggcagtgaggcgcataacactgcctgtgccacagctgagatcctttttctaaagcttcgggatccttcaacttctctccccacagaagctgggctgctgtggtggtatgtagcacaggaaaaatataagatcctttaaagaaacaaacactcagtccaggcgcagtggctcacacctgtaaccccagcacttcaggaggccaaggtggatcgcctgaggccaggagtttgagaacagcctgggcaacatagtgagaccccatctctatgaaaaaaaaaagaaagaaagaaaaaaataaatgaaacacccaataattctgtttttgatccctaaaagtccaccctattcctttggggagggggctgtggaggagggacagggcgtgggggaagcgtagggagctggttcctgtggaccgcatgccgttcctgacctctgagcagacatccccagcaggtcttcactgatgtcaggcagccaggatgggactgatcaactgggcaggagcactttgcccaagggcccttggtatgaagagtacattttgagaggcgtaagtcccttctggaggacaaaacttgtgttcttcaggccaaactgttttccatctcatccaagaatgatcctgccagatgggagcccccatctccagctcatgcctcccacagcaggcctgcagagcactgtatctgactcagtagagctctggatccaggggcaatgggcaaccagtggacaagcaggccaaagcgcactgctgcagcagggtggctttttttttggaaacaggaagagcacttagcgaaacacatcctctaatcccagtgggatgacgttaaggcgaaatctcctctccccaagaagttttggttgcctccctctgccaggcagaacccagactacatgctgctccgatcctcatgcagtcagaccttctcagtttcattaacttgtgtaatattctgaagactatgtgagtaaggctatagaggtgccatgagcttatcagtccaacaaggtttccacggggaatagctcagactcagaattcattttccacacttaatgtaaatgtaacccataaaagttccattttctaagaagcccagcttaaaaggaagcatttggcttcccctcccatctcccagagcctcctgtgagtggtaatgacaatggtaattaggcggatgaaccaggaatggaatccttgaacaaggggctcccagctctggctgtgactccccctgccctcactgctcccccagcctgctggctgctgcctcagcttgggcgtgctcttcaggtgtgggctgtccctgcttctgagagggctcaggcctctccctgacgacacaggcacagttcttcacaggaatcatgccagcctggcctcccagatctacgggcacccaccttgggaactgccctgctcctggtggggttgtatgatatgggcaggccacaccacatcagctcttccctcctttcttcctgtcactaaaaaacacattgggtgggcttctctagaggggaagctgtttcagaacttcaggaatttcctggaagcccagcctgccccagtccagctctgcgatcagctggtacatggaggcagatgggactttgggaactggttagaaggatgcttagcttatgccttcctctctttggctggctttttttgttaagcatttttccagaatcaaaggccaccaagcacctccctccacattcctacgtctcagtggtggcggctgagtggtggagggaagatactcaaagtcatagagagagggctttgcctcggaaggcaggctggtgccctcgccaccactgccatgcctttgccatgggtggccttctgttctgtggacatggtgcccacattgaaggcttgctgtgcagtgctcgttctcacatctggctttgggagaaaggaggagatgaacaggaacatcatggaggaccaaccaatcacaggcatcctgggtgctttccctcccgggaggatgggactctgagcccaggatgttatgtcactggtctgggggaaaggacctgggagacactttctctatcccagcatgggggtggcaccgacaactacacaggatttgcaaaagtggtagggggtttcattcagcatcaaaatagaaagcttgaacaggagtttggggcagcttaaaaaaggtgctgaacaacaccatgaaattccctggagcaagatgaagccatctatgatcctctggaggcagagaacaaggtgagaagaaatccaccactcttctgcaggagccctgccaaggagcctcaggtcctacagaccctcctcccaggcccccttggaaggggtgttgtactggcccatcactccctttactcctgcccgaccccagtcgaagaagaaagggttgcacatgagacaagttagcacagacattcatgtcccacatcacactgggtacctagggacagacgaggacacaccccaggagatgcatctcagagaggagatacataccccaaacgacaagggaaaaatcctcaaggaaaaagggaacaaaagacaataaagttttcattgtgatcacactacagaaaaaaataccttctgttctttgcaaaaaatgtgcgaaggccaaatctgtgtttttcttttctaaaaaaaaggatgttgcatgagttacaatgcaaccagtatctttttgtttctgcacttgttaaaaaatcatttttttaaaagtacaacacagtcaggtatgcggccacaaaagagtagctgtctttggcaagaagtccttggtcctctctgtcacctccggcccatctcgctctgtctcatgaagtggatgttgttggcgctgtctgacagttctgggtactgctcgacagagatcacgaaaaagccgtcgtagccttgcacccgccctgtgctcagcacctgctgcttctccccctctgtccaggcccgcaggccttcctccccttcccgcagtctctgctgctcgcgggcccacgcttggcgcacggctctctgccgggccagctccaggacccgtgccttctcctcatccaacgttgtcccgtagcgtgtgttcaagcacagtgccccgtactggagctggatgtctgtgtagcgtctagtcctgccattaagtactgtgttgatctgggacacagtgacgttgaccccattctccagggttcgccgccccccactgaggcccaggatggccaggtcaccttctgaaggtcctggtttcacaaagtaatgggtatccaccccatcaatggtgaagtgcaggttctctaggtagtgggcatggttcaagatggcagcaacccttcgcccatcctcattggccacactgatgatgtctgtggtcactcggccatccttcaaggcaaacttgacccccttgccaaagactgagccgctggatgcaaacttcttggtctttggagcctgctggcagctggtgattgtggagccatagagctggtcaaaccgttctaaggtgacaaaggccttgagctgcttctgtacttcacactgtaccccgaggatagactgatgggggaggagagtgagagagagagtaagacaaaggggaaaaaaccctgagaacctggagaatcagcttaaataatgaagtcaaaaccacacatatttattaacctgcggcatgtagctctaccgctgaccaccagaacatccaggtggtcgccagaaggtcagaacatctgctgaccttcatccatccatccacccacccttccatttagaaactgttcagggggtatctaatctgtgccaggtcgttttgtgagcactggtgacagaaaaatgaatcagacatcatccttgctcttaaagaactcatcatttagttgggaaagacagatatgacaacaataattgcaatcaaatgtgatcactggtggcctaagagaggaactagtaatagccatagctaacatttcttgatgtttcagccaaataattaccactcattatctcagtgatcttcacaatcaccttatacggtaggtgctgtcattattccaatttcatgtctaaggaaaccaaggctcaaagaggttgtcactggctcacagtcatacaactaataacaagtcaacctgcaagcccaggtctgtccaattctagaggttcagtttcaagggctgctggagaaggaaggagcaaacaaagctgagaagaatcttggcttgaaggtggaggaggtggggtttgaggacaggctcaggcttgagttgggacctgaaggatgggtgggggtggtgggatgccgtcagatggaggattggcaagaaatgcattcttggcaggaaggcataacatggtgagaggcagtgactgttattaaccctcccaccctgcttcactgctctccactgcatttacatctgatttctaaggaaggcctctgccccaccgtgcttccttggggctcctggggtgcccctactcttggctgctttaggggacaggtcgggccctgccaacttggcgtatcatctacctgtcccttctgtggctcacagagcttggagaagccacactcaggaaggctccagggccttatcagcaagttagggaaatggctttagcaacaggcctatcggcttctcactgaaattaagtcctctttataattaatagaaccctgtctgtgaacaattatttcctagagtttcacgaaagctggagtgctcaacaacaaagatctccgatgcttgccaagggcagaaatcaataattcattgacaggcgaggttggcagacaggcagtcagagaccggggctctctggagtgcaggagggagcctggtgagggaggaggagctgtgctgcagtgctcagccctgggaagagcaaatgccaggatatctgggcggggcctggaggtggtgggaactggagaggctgggcagcagaaagacgatgggctctggggccaggcagacttgggttctccattgaattctgctgctttcaaaccctggtcccctcacctgtaaaatggggaaatgtctgggctgtttacttctttcagccatttatttatttagcaaaaatgcttcatgcacctactgtgtgctatcctgtatgctgggtactaaatgagacccagtacttaccctcttggggctcataatctagtagcgagacaagaaagaggcattaaagtacagtgtgggaagtgccaccagcgtacaggggtgcagaatcccattctccggggtctggtaggagatagctatgctgaggcctaaaggaatcaatctggagtaagaaatatggatatgaaagtttctgaccaccagcagcaagccatctggcaacctgctttcctccttagtctgtcatcccctgggcaagcatcccttgaaggcttagtctctgcctgattcatccctgcgttcactgggcacagcatggggcttggcacagagttgggttctcatagagaatttatgaatggattggggtagtagggaggggagaagcgagcaaatgaatgcatgaagtgagtgggtgggatgagactgtttttaaagacctttccagctatacaattctgagtctttgaaattgggttataaaagcgagacaagagaaagtgagtctttttgagcacctacagtatgccaggcactgtactcagcaagaggatacagaacaggcacatctgggtttgaatcccagctctaccccttccttgccgtgtggcactgggaaagcctcaggcacgagtctgtaaaatgagaacaatacggctgtgggatctttgtgagttacatagaataactcacataaggccaggtgcattgaagtactcagaaaatgtcacatttttatttagaacccaccttctctccctgtgcttttgttctggatagtgaccaaggcttattatttttgtggaactccaaactcagtgtaacacacaaagctccttactgcagcttgtaagcgtctgtgtgtggtcatggctgcgtccctagcagcttcctagtggtgggttactaagtagttgttgaacaacctctggcaggcactgtggaggcaccacattggtgtctatcactggcccatgcttttctgaaaagctgaagggaccccctccagtaatgtctgagtggcctgaggagtggcagccttgtgcaggaattaccttgctgttgtcccactcctgcgttttcatctgtgtgtggatgagctcgtaggagggttccatggcatccatgtctggtttgggataaccagggatcacgttgtgtagctggaatccaaaggtgagcagccagctgttaacatctggatgggagggaagcagaaacatctccatggagtgagtggacctcatttgcaacccatccccatctcacagcctacagttagctgcagggtgtggtgagggtgtggattgctgctggtgggagagtcaactgctacatacacttttcattctatgaaagccaaatgtactcctgggacccagcaatccccatcccaagtatatacccaagagtgatgacactgaaatagaacccaggtttccggacttccttttctattttcacttcaactcccaggacctctagcttcatacccggggcagctgttgacagatgaagatccctccctttcaccccaacatccataggagatacttacaaaggacagccagacccaccaaaagaaaagattttaatgattgacttgcaaagagacaattcacttaagaaacacactcccctgctctcccaccctcctgtgcagtaattagagcttcagggtcaaagtcccacgggttacagagatggcctaggctgcgatcagagtcttccctctgcttctaccttttatactctgacagcccaaggatgccacaacctccctgtgccttcattttctttctttttttttttttttgagatggagtcttgctctgtcaccgaggctggagtgcagtggcgtgatcttggctcactgcaacctctgtctcctgggttcaagcaattccctgtgtcagcctcccgagtagctgggattataggtgcccgtcaccaggcccagctaatttttgtatttttagtagagacggggttttaccatcttggtcaggctggtcttgaactcctgaccttgtcatccacctgcctcagcccccagagtgctgggattacaggtgtgagccaccgtgcccggccaccttcattttctagtctttacattgggcttggggatcaagtcccataggcatgggaataattgatttgataacattccttggggttactaattataaaatattaggtgtggggatagataggattttgccatgaacatctggcttactggagaatggaatcaggaagccaagacatgaggaaatgaagaggaccagtcacctggcccactattgctgagtatcttctatgtgcccaggactatgccgttgagaccctcatctcacatactcacaactctgaaggagagatgagacatgggcatgaataacattgatacaaggaaaaagattagaggaaggcggaagcctttcatttagacaggctgacaagaccacatgcagaaggtggcatttaagccagttactgaaagctgtgccatttttctcaggcactggtagagatgaagtgggcccttcaggcaaagatgactatactaggcaaggcctagagagggaaggtgtgggtacagggagtgttcaggtaaccagagagcagctcagcaaggttgagaaagagccagaaaggatgactgtggccggagcaagaagagcttcagatggcagggggaggtgaactggggccagagggagacagacagacagacagacagcctgtgtcccagcaggctcagccttcctcaggaaggcatagctgaagatgccaaagcagatgtcaatcagagactaagaatccaaattcttggggaggcaggattttgatttgagccttagagccaaggctgattatggcttctttcaagtggagatagaaccctgatcgcagaggtcctgtttaggttctaggatgatatagtttgaatatttgtcccctccaaatctcatggtgaaatttgatccccactgttggaggtggcctaatggggggagtttgggtcatgatggcagatccttcatgaatggcttggtgacctcccgaggtaatgagtgaattcttgctctattagttcatgcaagagctggctgtttaaaagcgtgtggcacccctcccttctctcttgctacctctcttgccatggccacactggctccccttgccttccgctacgagtaaaagcttcctgacactgagcagatgcggctgccatgcttatagagcctgcagaactgtgagcttagttccttataaattacccatgagcctcttttccttataaattacccatgctcaggtattcctctaaggcagcataaaacagactgagacataggtaggtttaggcaaaattgtcacctgccacccactgagttcatcctactggtgtgagtgactgtgtccctgtcaccactgggttccatgttaccatcccattcaagaacctcgtgtttgcctttgtttttgttttgttttcgggttgtctggggccccctctcccgagtgtgcaacttggtggtgctgaggtggagtggtggtagaaagggaaatttggagcccagttctacttgtttcagccttactaggcaaaatcataggaaagaacatggtagctgaagcaagacaaacccagtgtccaaattctggctccccaacttacaaactgtgtgaactccgacagtttacttaacctctttgagatttagtttccttatctgcatattgacaatggaaatggttttaaccatacttctatggagaagaatacaaagtgttaccatttggtggcagttatcgcgtggcaggagctattctaagcttatatataaattactggatttaatgtattttgatttttttttgagatgggatcttgctctgtcacccaggctggagttgagtggcatgggttcaagagattctcccacctcagcctccggagtagccaggaccacaggcgtgccatcatccctagctaattttttgtagagatggggtctcattgtgttgcccaggctggtttggaacccccaggctaagcaatctgcctgtcttggccttccaaagtactgggattacagatgtgagccactgcacctggcagatttaatgtgttttgaagaatgcagctcagtacccactcacagaagattttctctattttccaccaacccatgcttccacatcccaggacctccattttctcctctctaacagaaggagcttggactaacttttcttcaaagtccctcttctcactgagtttttaagagtctttgattctataaatcatggcagatggttctttgggaaattaaaacaaacagaacaggaggaaaaaatgccctataaagccattttgcctgaggctaagaacttgcatctgaatttgtagttgcaaaggaatgcttctataaggaatactgcaaattctcaggaaactagggggctgagaagagggctgggccttaattacaagtgacggaaggtggaaaactttcctattttgcctttaggaaaaaatgctgaaaatgaatttattcataagtttttcttcagtgctcctctgaagagctgggaattttactcttccttcttaccatatcagaagtagatatttccctcaagttaaaaaattcctcttcactcatccatcccagagtttggtgttgtcacaggggagtgatgaaatgtaggcaacaataatctccttccttccttccttctttcttttcttttctttctttctctttcttttcttttctttttctctctttcttttcctttttattttctttttctttatttcttttctttctctctttcttttctttttctttttttttcctctgtctctttctttcctttttttgacagggtctcactgtcacccaggctggagtgcagtggcatgatcttgactcactgcaacctccgcatcccaggttgaagcaatcctcctgcctcagcctcccaagtagttgggattacaggtgtgcgccaccacgcccagctaagttttgtatttttagcagagacgagatttcgccatgttggccagggtggtcttgaactcctgacctcaagtgacctgcccaccttggcctcccaaagtgttgggattgcaggcatgagccacagcacccagccaataatctctttcatgtgtgtggttttgttctttacaaaatgtatttgaatccaagaatgagggttttggaatcagagcagagttctaatccagccttgccacttcttagtgggccagttactttagctctctgaacctcagaacctcacttttctcctttgtaaatggggtcagtgatcctacctcacaagcatcaagtgaagatagagtgcaatgatgtacatgatatatctgtagcggacattttttggttgccttcccagcagtccattctgccttctctttcctttctggagtattagtgtaattatagggaagttgaatccacctaaggggttggcatgtgacctaggctaagccaatcagtgcattctttccctctagccaccagtaagtgcttcagggattgtccagtgacctaagcctatctcactggaatacatctcaggacccttgaagaaatttttgggaaaaaaagaattttttttttgttgttgttgctggatgggaatgaagatgcatgtagtctacctggatgctaagaggtaaggtttagtgagaagtaacagtatcttggttcttattcgtgattgcacatctttttaaatttgctaaaaactgcttatatgaaatctcttctttgcacaccatgggttttcaaactgtaggatatgacccactatgcaatgaaatcaattttgtgaatcatgaccagcatttttattgaaatggaacagactacattagaaaatgagtgcatcacacttaagtattcttttgcaaaccttttgtcttcgtgttttattgcaatgtaaaatctttttcttatggtgggttcctagtcaaagaaatttgagaaaagctgccttggaccctgtgatctatgaaggtgggtattatacctcactcctctctggatccttaatacaggtttggcaaggagtaagtataaataatatactctttgctggatttaactgactggaatatagaacctaaactgaaaatgttaggtgccccttgatggttggttgctttgttaaaagctggatttggaggccagcatgattgtagtggaaggtgttctagagtcagagagccctggattagagtcctagctctgtggtctacatctgtgtgactctgggcaaacccttcattgcagccttgaatgacatttggagtctcatctgcagaaaggagataatgatggtgatctcacagttgttgcaaagtttaaaggagagcatatctgccaagtgccagatagcatagagagttagtcatgttagtgctattctggaaggagaccatatgtatatggtggtgtacaaaggaaaagggggagggagtaatattttggaaagatgcaatgttttttttgatagaaaagtacatttcctattgcaccatgttttttttcagctacagtaacctgccaagacatctcacaggaaactcattggagagtgaggcagggggtgtgcttaatgcagacagatgtaatggaaatgtcatctcaatctgtcaagtttctctagaactagcagccaagttgagcatggtgaaggctgtgaaacattgttagcatattcatgtttatccataggccccaagtctgttttcatcacacctgtccaccaccttgttctcccttcttccctatgcttgggatgctattctcccctctttcctatgcttgggatgcctgctctcaatgtgtgacaacatggaactcttcttgaaaaaggaattcttctactgctgtcagcagaaacagggtccaggtgggggctaccaagtttgggagctgggaagccacgtctgtaaggggcattcatgtgagctgtcatgttgcccctctacacttctgtattatatgtgctgccttccctctctgcaatgcctttctcccccattacctggtgaacaccagctcaggagctggcctcaaatgtcagctactttgtgaagacttcccagaatgctctgggcagagcaggtggcttttcctctgtgcttcaatgggcatctgtgcaaacctttgtcatggtcctcccctcttgacagcagttgcctgtctctccccttacagtgagaattcctggaatgcagggatcatttttctctcctcaatgcctgaaacagtggctgcacagaagaagcacttgtagaatgaaggaaactgccataaaagagggcaggagaattgaatcgcacgacaaaagaggggagagactactggctttgcaaggtgggatgtgcccaatttttgcctatcacaaactctcttatgtaaaaagtgtgggctttacccaaacccccacccactctctgtggggttgagggcctctgtggctaacctgggactggctgcttgctgggagggctgtggctgctggagacatccctgcctgtgggaccctgggacactttatactcaagttggtttcatggtaatggaaggcagagctcacttttcaagttagggggtaaaggaaagggaaccaacacgagccaggcactgcgctaagtacctcatgaaatgtatttcacttcacccttgcaaccaccctaccaggtaggtgttagtttctattgttgcatgtgttccttattcttttttttccctcttttcctgccctctttggattattttcttgtcttccattttatctccactgttgacttattagctaggactctttttttagtttttatctttttagtggtttctctagggtttataatacacatatttaattataggtagatgttctaacttcaatttacgtatcaggaaactggaattcagggcagttaaataatttttgtaacatgtcatggcttcaaactggtggatccttcactccattcttacattatcccaaattgagaactaatttttttttaaagccataccttaacccaatcaaggactcattagcagtttgatttgtgtgtcagaaactcctaaagtgcaatccatgggatgtatcccatgagatattaggatttcatggtgaaaaaagggcttttacggtcaaataagtttgagaaatagtgggcaaatatattaaatagttcacttttatagcacttcccagagcttatcatacactgaaatgtactatgaaaatgtaataatggtggtgaccctgacaaatttatttgatgctggaaccatttttccagagtattttctgaactagtgtttcttcaaacggactttggaaaatgctgctctaagagaaagtcagtgtttcctgtcaccttatgccagctttctcaaagaagactaagtattgttaggtagtaagagcactttatggggtcctgcccctgagtgagccgtggtccttacctgtcatgaagcacttgatgtcctgggagttgctgatggggttgttgtttttgaacatatagagattaaaaggcatgacgttgctgctactaaggtgcttccacagctcgtggtctgggctagtccagcgtccggccagcacatcataatctcgccggcccatgtggacaagcttggtgagtggatcatagaggccaccatggtagcctatgatgatctgaaagttggggttggtatccatgtagatctccccataggctgtgtacaggatttgcttgatcatcaaacctgttccactaaagacagcaagaggggtcccgatgttgtcacaagctatgtaaaactcatcaccactgctcagctccatggcaaagaggtgtccttgcaagtcgtagtagagggaggtgatctcagagctggagtggttgtacaggtgggtgaccttggtggggttggtcaggtctgcatagaagaactgcaggtggtggctgtggctgctcttgctggacacgcgccgccccaggccatcgtagcggtacctgacactccagctgccagcccggttgtaggccttgatgagcaggccagctgagttgtactcaaagatatcaccgccccgctgcctcaggaagccatcctcatccatcttgtattgcacgtcacccagccgagtgatgcggtcgcggatgtcataccgtagtggtgtgagccgtgcactgttcccagggctcagtaagtgcaggttcccattgaggtcgtagctgtagcgccagagtggcttgtcattgatggagactgtctgcagctggccgtcagcatcatactcataggagtagcgagtggtattggcgtagggtcctaccttcagctccttcttcactactcgccccatgttatcatactggacggtcatccagtacatgagcgagcggaagatctcatactgcacttccttcatcctgccatatgcatcaaaatgcttggtgtgggtcatgacagctgtggtgatgatctggttaatgtcatagtaaatgacaccaaacttcccaaactgctctgtcttgcctgacacatcatcatagcgatagagatcaatgggcagtggggtctcgttgatcacagcctgcatgctggtcacccggaagctgttgtcatagttgtagtcaaaacgggcgttgaccatgccttcctcagtgaagcggaagatctgtcggtcaatcaggggcccaatctgacggtagcggatggtgcaggtgaagccctcattctgtaggttgatggtcttcagcatgcctgccgtctcgtcataggtgaaactgaccttggtggtgtcatagagcgtctctgccagctttgacagtttgccatacttgtatatcaccctgcggccagtgcccaggtagaaggtgtgaaggaggtgcccatcctcagtgaagtcctgtatgactgaggcattgccctcagggggctgatagatgtttctgtagtagcccactgagcggatggtctctagtgtctgccgcgccacgttgggcatcgtcacagaagagaggcggtcattcttgtcgaactcaaagatatactgcctctggctgtgtagtagcagcaccatggactggagggagaggaaaaccaagagatgagaggagggtggtgaggagaaagggtaggtctacatacccgagacttaaagggacggaatgaatgtccaaggagaatcctgagtttccatggttctcttgagttatgctccaaccagagctctccaacaggagtgtcacgggatactgcaaataggttacagatgtgccaagatgaggctttctctcagcctcatcttagcacagctttaaccttagcacacctgtaacctacctggggcctaggcctccaggtactcaggccatttgctgtcctatggtgagcagcctcgtgggtttgcccctttgtgcaggacagacctggttacttttgtgcgtggtggggtgtgagaacggccaagaagctttggcctgaagtatgtacagcagtctggcttccttgccccagacttctcaaaccaatcttcctattcaggcaagagtgagctcctccaaacacagtctcacaatttcttttacctgctaaacagtttccgctgactccctgtggcttacagcacgaagaccatatttgagaagggcatttaaggctttgcacaatgacaggtcataagcctactctgggatagggcagactgtgatgggaatgggagaacctggtttctaacaatagtctccttgtgtggccctgggaaagttcttcccctctctgggtttgggttttcagtatgttggatgacctccaaggtctctctctctcttagtactagcgcaaaatgtcacttttgggggtactcacccagtgggtagaggagacccacctcagagcaagcacagcctatgccctggacaggtcaccagggtcaggaaacaaagcagggatctggatacttgaaatggggcatgcagtgcacttgttctcaggaaaagatcagcagataaaaggcctagaggctttatgctgcaaagctaccattttttcctatttgagaccaacttttgattttaggtcatttctgattcttacccctgggatgacatgagttctgatgctagagcagaatagatttactaaggccatgcccagcacttgaagctcaggagtaagtgcctcctgcctatgtactgatgcctaggcttctgcctggttctccacaactggattgtaccacatgccctagacctgggagcagacccttggcctgggtctgaaccccgagtcctgctctgcaaatccagtgagtatttgggcctctactctatcaggcaggtctttcatgttctcctgccctaggaccaccacctgccatgctatctccctgatccatcctgatgcctcttgggaccccatgccctctgtggcagactttcctgaacatttccttttggtgacatgggtcagatacagcccactgaggccaccaggctgggcttggccgtgaatgattggccttctgtatggcaaggccagtgatgcagggagacagacacctgccttctctaagtatgtgtagctccatgtcttcccatcagcgaagatcctggatgtgatgcggcccgcctggtcgtattccattctttcagacatgatgcccctctggatgccagcaatgtaacccccaggggagtatgtcacgttgacaccattcagcctgctgctgggtgaccagaggctgggccgccccgcctggtcgtacagaatccgaagggtgaacttgcggtggtcatcatagatcttctctgtgcgtgttacgcgatcaaagtccagagataggagatttcggttgtgaacctggagaaagggttggaaggaaagagaaaattaatctggaccatgagaactttggtctgatgggccacgttgctctcagctctgctgggaagctcttgagtagaggagggagcacagtcctgcgcagcaacagacatgggtttgaatcctggctctgtcatttgtcagctctgtgaagtttcctcacctgtaaaatggggacaataatgccaattgcacagggttgttgtgaggatgaagatgatccctatgttgagaaatcagtagctgtgaccaaagaggatctgcatgttttctaatgtgattcttctaatgaggacacgttttaaaaggcagatccttcttgactccctgctgaaaggagacccaccaagtgagcccagaaaataaactgacccatctcttccacaccagacactgcggagaccaaagctcagggaggtgaagggatttaccctggatctcgtggctggtgagtgacggagtctggacttgactctcacacatacaacgtgcccccaaacactcagtggccctctgagcaattcgtggccttctgggggctctgaacttcccagcccctgtcgggtgtctcctgcttgccactacaatcagggcttcttgattgccacagtcagtacccaagacatattcttcccagaggtgctgggaggcagtgagtgtttgtcactgggatggcttttctgcctgtgggccgaatggggacacagtcctggctttgaggcactttgctcctgccttcaggatcgggagtgccttgtataaactccacctggactgctaggccagcacacagttcaatttcctttcagagtcagaaagacagggctcctacagacgtagtggtaggttagggtttttatattttaataaagaaatatacttcaggggcctgtttctgtatttggatctgccctgtaggcattggtggcccctgaaatattgccaggtattctggaactaaaatactggtttccgctaattggtgtctggccttatgggacatttgggcacattttctgtctcttccactagtcattgcttaaggttgacaagtaatacagaagacccaagaggaaagcagataattaggtcacgtgatgcaaaatggcatgtgtggaccgaggcaatgaaaggccctctggatccctgtgtggttaaaaaaaaatgggtgcaggtctaggaatgaaggccaggattctagctgcaactttgtgaccaacttttctatcaaccttgggcaagtgccttcccctatccgagtctcagtttcttactctgtataacaagagttgttgtgaaggttgaagaaacttagtaaatcagtggagtgctaggcacatagaaggtactgaatagatggttggaattatttccattaaatgacagcaaacgatcgtggtcatatcccaggaaggagagatgtgtgtgtttcctccttctcccacacaaattctaaggccttgaaaataacgatttataatgacgatgctgactttagctgtgaatgacctggttataataaggttaccttctctggggtaatcaaacacaattgcagatgcaaaaacagtgtggcagatgattcccatgaaaaatcagaggcattggaggctgaagctgtgttatttgcagacagggcacaggaagatacaggggctgtgccaccaacaatgacagaggcctttttaaagtatcttttggaaggtcccgctgtgactcccctcagggtggtgccacccagccagctgtccccctttctccctggaggatctctagtgaaggggagctgtacctttttggcaaaattaataaaattaaacagctcactggggagccgcctaatgcgtcctgtgctcggcagtggcggcaatgagattatttcacctctttattaaaaaagttcccagttgtataaaaaatgaactccattatggggaggcacacccggctaacattctaattccacctgccaccactgtgggtggccatttatttgggaggacatgtagacgtggccacccgtcccaatctcaggttgggagagggaccaattaaagcctgggaaacttttggtccagttcacacagcagagaggaaatcctaatcatgctaatcgctgccatttattgagcacctggagtctacctgtgctgggctaggtgcgttgattgtatcatcttgtttctgcagaggcacctgaggctcagaggagctgctcaaggctccacatggcacaggcaggaatcaaacccaggtcaaacttcccattgaggacactgcctcagaggcgcatgcaggagtctgcgaattcagacgggggagctcagtgaggccacagagaacaaagacagctaggccttcctcggggagctagtgcaaggctgtttcccacagtagatagtcactagagctcttggctgttgagggaacaaacgaagcctggttttctgggttccagttgtgtgatattggataagtcacttactgtttctgtagctgctgtgggcctattttctagttttttttttttgagacagagtcttactctgtcgcccaggctggagtgcagcggcgcgatctcggctcattgcaacctctgcctcccaggttcaagcaattatcctgcctcagcctcctgagtagctaggattactggtgtcccccatcatacccagctaattttttgtatttttagtagagatgaagtttcaccgtgttggccaggctggtctcgaactcctgacctcaagcaatccacctgcctcagcctcccaaagtgctgggattacaggtatgagctgctgtgcctggcctattttctagtctttaccaccacctcgctatgagactctggaaaaatcgtttaccctctctggatctcgattgtctcatgtgtaaaagaggggcttcagtgaactttctttgctgaagggcaggggacttaagagagtctgagctgtgttgctatgaggatgcttctggaatgttaggaacatgtagctcagttctgtagtttgtttcatctcagcaggtatctcctgagcacccatggtgtgcaaggtgctgtgctgaaagccatggctagttcattaactttccctctgttcatcacctgcctttctcaaggtggaggaaaaagaagctgggcactcaggccctggcagaggctgtactctacagaaacacaggatgtgaggcagacaaggagctggctcagggcatccacatattcaaaagcactctgaatgtcagaccatgatgccagccccagcagtgatggctcgggtgaggtcattttggagaatgtagcttaggttctaagtagctgagctgaattttgggacatgctagcaatagtaatagcaataatggtaataaatcataacaataacaataagagtagctattattgaccacttgctatgagccagactctaagatgcttaatatattacttctaatccttgtagcaacttgtaaaattggccttgtccttcccattttatagatgatgaaattgaggctctaagattactgatctgtccaagctcactcagggaataatataagctggaaattcaactcagacctgtctaacaccaaagccagtagtctttccacaagtaaaaactaaaaagacacacaagggtctctgatcacacatggttccctgatttagttctccccttttgcagatgagtgaactgaggtcccagggaatttcaagaacagagccccgttctcccgttccccattctttccccccaggacgcagccacctccagaggcctcgctcacccgcagccggcgcccaaagacagtgacctggccccgagcctgctctttgcgctggcgccactccaccaggttgaggccgttgtcgatgggcagcgtgacattcctcttgcccacggtggggttgacggtgccagccagcaagtggggctcagtctgcagcgccacctccatgccgttggccagcagcagccgcaaggagccatcggccccgatgtagtagctgttccggacttggtctgcaggagaggacaagcacagactgctcagaaggaacgaaggtggagggaggtgtgaggacagcagaggcggtggaggggactttaaaggatgcttttcctaactatgaaagcaatacatcatcactgaagaaagcgaggaaaatacatggagaagaccatccagattctccatatccaaagaaaaccattgtaaatattttgtatgtttgtagattttaggatatttccaaatgcccttacattacagtttaaaataggtaagagttttaaaacagttatacagtttttcactgatcattgtattatatcatgttactgaatatttttcataaacatttttcttaatgaccatacaatattccactgtatgaaaatactttaagttatttaaccaagcctcaaatagatactcagtttgattccagtttttcagaattataagtaccactgtatatatttagtttaaacattattctaagtgaaaaagaagtcacatgtaaaaggctacatattgtctgactccacttatatgaaatgtccagaataggcaagaatctctagagacggtggttgccaaaggctgaggggcaggagggaacgtggagcagctgcgaatgggtatgggatttctctttgcggtgataaacatgttccagaatcggatcatagtgatgattgcacagctttataaatatactaaaagccacacaattgtatgtttttaaagagtaaatcttatgctatgtgaattatacctcaaaaatactttttagataaatcaatatccaatatcttcattttagattttcaaatcaaaatagattcctaaaagtaggattactagagaaaagggttgaactttttttttttttttttggagacagggtcttgttctgttgcccaggctgtagtgcagtagtacaatgtgatcatagctcactgtaacctcatactcctcggcccaagcaatcctccaacctcagcctcccaagtagctaggactataggcatgcatcaccacacccggctaatttttgaaatattttgtagagaccaggtttcaatatttgaccaggcaggtcttgaactcctgggctcaagcaatccttccaccttagcctccaaaagcaatgggattacaagtgtgagccaccatacctggcaggttgaacatttttaaggctcttgatacactctaaggtaacaatgttttttataacaaggtgaaaaataactttgacacttaaaccactgacagaatgacaaaaaaaaatacataaatataaacatattttaaatcattgtcacaggcatatgacaatgatttaaatatacatatgatttgaaattttaaatttgatttaaaacattctaacttagattctttttttttttattatactctaagttttagggtacatgtgcacattgtgcaggttagttacatatgtatacatgtgccatgctggtgcgctgcacccactaatgtgtcatctagcattaggtatatctcccaatgctatccctcccccctcccccgaccccaccacagtccccagagtgtgatattccccttcctgtgtccatgtgatctcattgttcaattcccacctatgagtgagaatatgcggtgtttggttttttgttcttgcgatagtttactgagaatgatggtttccaatttcatccatgtccctacaaaggatatgaactcatcattttttatggctgcatagtattccatggtgtatatgtgccacattttcttaatccagtctatcattgttggacatttgggttggttccaagtctttgctattgtgaatagtgctgcaataaacatacgtgtgcatgtgtctttatagcagcatgatttatactcatttgggtatatacccagtaatgggatggctgggtcaaatggtatttctagttctagatccctgaggaatcgccacactgacttccacaatggttgaactagtttacagtcccaccaacagtgtaaaagtgttcctatttctccgcatcctctccagcacctgctgtttcctgactttttaatgattgccattctaactggtgtgagatgatatctcatagtggttttgatttgcatttctctgatggccagtgatgatgagcatttcttcatgtgttttttggctgcataaatgtcttcttttgagaagtgtctgttcatgtccttcgcccactttttgatggggttgtttgtttttttcttgtaaatttgtttgagttcattgtagattctggatattagccctttgtcagatgagtaggttgcgaaaattttctcccatgttgtaggttgcctgttcactctgatggtagtttcttttgctgtgcagaagctctttagtttaattagatcccatttgtcaattttgtcttttgttgccattgcttttggtgttttggacatgaagtccttgcccacgcctatgtcctgaatggtaatgcctaggttttcttctagggtttttatggttttaggtttaacgtttaaatctttaatccatcttgaattgatttttgtataaggtgtaaggaagggatccagtttcagctttctacatatggctagccagttttcccagcaccatttattaaatagggaatcctttccccattgcttgtttttctcaggtttgtcaaagatcagatagttgtagatatgcggcattatttctgagggctctgttctgttccattgatctatatctctgttttggtaccagtaccatgctgttttggttactgtagccttgtagtatagtttgaagtcaggtagtgtgatgcctccagctttgttcttttggcttaggattgacttggcgatgcgggctcttttttggttccatatgaactttaaagtagttttttccaattctgtgaagaaagtcattggtagcttgatggggatggcattgaatctgtaaattaccttgggcagtatggccattttcacgatattgattcttcctacccatgagcatggaatgttcttccatttgtttgtgtcctcttttatttccttgagcagtggtttgtagttctccttgaagaggtccttcacatcccttgtaagttggattcctaggtattttattctctttgaagcaattgtgaatgggagttcacccatgatttggctctctgtttgtctgttgttggtgtataagaatgcttgtgatttttgtacattgattttgtatcctgagactttgctgaagttgcttatcagcttaaggagattttgggctgagacgatggggttttctagataaacaatcatgtcgtctgcaaacagggacaatttgacttcctcttttcctaattgaataccctttatttccttctcctgcctgattgccctggccagaacttccaacactatgttgaataggagcggtgagagagggcatccctgtcttgtgccagttttcaaagggaatgcttccagtttttgcccattcagtatgatattggctgtgggtttgtcatagatagctcttattattttgaaatacgtcccatcaatacctaatttattgagagtttttagcatgaagggttgttgaattttgtcaaaggccttttctacatctattgagataatcatgtggtttttgtctttggctctgtttatatgctggattacatttattgatttgcgtatattgaaccagccttgcatcccagggatgaagcccacttgatcatggtggataagctttttgatgtgctgctggattcggtttgccagtattttattgaggatttttgcatcaatgttcatcaaggatattggtctaaaattctcttttttggttgtgtctctgcccggctttggtatcagaatgatgctggcctcataaaatgagttagggaggattccctctttttctattgattggaatagtttcagaaggaatggtaccagttcctccttgtacctctggtagaattcggctgtgaatccatctggtcctggactctttttggttggtaaactattgattattgccacaatttcagagcctgttattggtctattcagagattcaacttcttcctggtttagtcttgggagagtgtatgtgtcgaggaatgtatccatttcttctagattttctagtttatttgcgtagaggtgtttgtagtattctctgatggtagtttgtatttctgtgggatcggtggtgatatcccctttatcattttttattgtgtctatttgattcttctctctttttttctttattagtcttgctagcggtctatcaattttgttgatcctttcgaaaaaccagctcctggattcattgattttttgaagggttttttgtgtctctatttccttcagttctgctctgattttagttatttcttgccttctgctagcttttgaatgtgtttgctcttgcttttctagttcttttaattgtgatgttagggtgtcaattttggatctttcctgctttctcttgtaggcatttagtgctataaatttccctctacacactgctttgaatgcgtcccagagattctggtatgtggtgtctttgttctcgttggtttcaaagaacatctttatttctgccttcatttcgttatgtacccagtagtcattcaggagcaggttgttcagtttccatgtagttgagcggctttgagtgagattcttaatcctgagttctagtttgattgcactgtggtctgagagatagtttgttataatttctgttcttttacatttgctgaggagagctttacttccaactatgtggtcaattttggaataggtgtggtgtggtgctgaaaaaaatgtatattctgttgatttggggtggagagttctgtagatgtctattaggtctgcttggtgcagagctgagttcaattcctgggtatccttgttgactttctgtctcgttgatctgtctaatgttgacagtggggtgttaaagtctcccattattaatgtgtgggagtctaagtctctttgtaggtcactgaggacttgctttatgaatctgggtgctcctgtattgggtgcataaatatttaggatagttagctcctcttgttgaattgatccctttaccattatgtaatggccttctttgtctcttttgatctttgttggtttaaagtctgttttatcagagactaggattgcaacccctgcctttttttgttttccattggcttggtagatcttcctccatccttttattttgagcctatgtgtgtctctgcacgtgagatggatttcctgaatacagcacactgatgggtcttgactctttatccaacttgccagtctgtgtcttttaattgcagaatttagtccatttatatttaaagttaatattgttatgtgtgaatttgatcctgtcattatgatgttagctggcgattttgctcgttagttgatgcagtttcttcctagtctcgatggtctttacattttggcatgattttgcagcggctggtaccggttgttcctttccatgtttaccgcttccttcaggagctcttttagggcaggcctggtggtgacaaaatctctcagcatttgcttgtctataaagtattttatttctccttcacttatgaagcttagtttggctggatatgaaattctgggttgaaaattcttttctttaagaatgttgaatattggcccccactctcttctggcttgtagggtttctgccgagagatccgctgttagtctgatgggctttcctttgagggtaacccgacctttctctctggctgcccttaacattttttccttcatttcaactttggtgaatctgacaattatgtgtcttggagttgctcttctcgaggagtatctttgtggcgttctctgtatttcctgaatctgaacgttggcctgccttgctagattggggaagttctcctggataatatcctgcagagtgttttccaacttggttccattctccacatcactttcaggtacaccaatcagacgtagatttggtcttttcacatagtcccatatttcttggaggctttgctcatttctttttattcttttttctctaaacttcccttctcgcttcatttcattcatttcatcttccattgctgataccctttcttccagttgatcgcatcggctcctgaggcttctgcattcttcacgtagttctcgagccttggttttcagctccatcagctcctttaagcacttctctgtattggttattctagttatacattcttctaaatttttttcaaagttttcaacttctttgcctttggtttgaatgtcctcccgtagctcagagtaatttgatcgtctgaagccttcttctctcagctcgtcaaaatcattctccatccagctttgttctgttgctggtgaggaactgcgttcctttggaggaggagaggcgctctgcgttttagagtttccagtttttctgttctgttttttccccatctttgtggttttatctacttttggtctttgatgatggtgatgtacagatgggttttcggtgtagacgtcctttctggttgttagttttccttctaacagacaggaccctcagctgcaggtctgttggaataccctgccgtgtgaggtgtcagtgtgcccctgctggggggtgcctcccagttaggctgctcgggggtcaggggtcagggacccacttgaggaggcagtctgcccgttctcagatctccagctgcgtgctgggagaaccactgctctcttcaaagctgtcagacagggacacttaagtctgcagaggttactgctgtctttttgtttgtctgtgccctgcccccagaggtggagcctacagaggcaggcaggcctccttgagctgtggtgggctccacccagttcgagcttcgcggctgctttgtttacctaagcgagcctgggctatggcgggcgcccctcccccagcctcgttgccgccttgcagtttgatctcagactgctgtgctagcaatcagcgagattccgtgggcgtaggaccctctgagccaggtgtgggatatagtctcgtggtgcgccgtttcttaagccggtctgaaaagcgcaatattcgggtgggagtgacccgattttccaggtgcgtccgtcacccctttctttgactcggaaagggaactccctgaccccttgcgcttcccaggtgaggcaatgcctcgccctgcttcggctcgcgcacggtgcgcgcacacactggcctgcgcccactgtctggcactccctagtgagatgaacccggtacctcagatggaaatgcagaaatcacccatcttctgcgtcgctcacgctgggagctgtagaccggagctgttcctattcggccatcttggctcctccctagattcttaactaaatgaaacttacggtgaaaaaagcaaatttcagctgtaaaatacacatagagtttctttctatagatgaaaatactatctctggatttgtgctgcactctcctgtctctggcccttccttggctgtttcctctgcactgcccccgtcttcagtaagtgctggcttaagactccctccaggctctgctaaaatgtcatctctttccagaagcttcccctgttccactggccagaatgtatgactccctgtcctgtacacccctcagcctttctatgggcctcctcagtggtcttgcagctgaggggtgtgggagtcactgctccgttaatgaacaaattctccaatatttgagtgcgtgctgtgagaggcactatggcacagagattaggagcttggctttgcagccaggctacttcagctcaggttccagctctgtggctgccttgctgtaagaccttggccaaattcttaaccttccatgcctctggtacttcatcagtacactaggacaataattgtaccctgctttgcaggatgctctgaggattgagtgagatcatgaatatgaagagctgagaactgtacttggcatatagtgttatgtaaatgttagctgtcactggttttatgtgcctggcactgtgctagtcactgtcatgtgtgtctcttgtctctcctctatctccaccatcccatttctctctctctcacaaacacacatacacacagacacacacacacacatcatggtgaacttctctagtgctgaccatggtcctggaatagggccccttgtctttagattggcagttaagagaataggttctatagagcctgtttgcctgggtccaaacacccaattaggtgtgtgactggggcaagctacctaacctccgagtgcttctcactgccttcatgcagaaaacagagacaataatacttacctcctaggcatatgcggtactatatgaggtaccttatgaggtactgcttaatgtaaaatgctgaaaatatgctttgcagttaataagtgctccaaaaatgttagctatcatcatcgttaggattatatgtgctcagtaaatttttgctggatgaaactagttatgttccaggctatgtcaagaactaaagatagttattaagcaatagttttcatgggaaaccctcactgaatattttctgctagaatggcttcaaacaggccccccccactccctcctctctccatctttctctctcacacatgcaaaaattctaaaatctgcctcaaacttgctatgcattattcactgacaatctatatttttctgcctttgaacagtgaaaaagcctgtgtcaatttatcctttaaagctgctccttgctgaatccacatatgtccattaatggtgacttggagggaacagcatctgtagaggcccatctcagatgatcccatttaatgtgggctgtgacttcccaaggccgctgctcattagcagctacttcttattactttccacagtttaaacagaagatgaaaccgaaagagcttttcacagagactctagtgaggcagctgcaaaactgagcatctgagcctggtactcaagaaggaaagagcttggcagagctaccaaagaggaaaaacaggtaccatgtttcctggattccaagaagtgatttttcttttcatattttaatgtttttttgaaattggaatgtgtccacgtatgccttttgagcagtatgacttttttccctctgcctaaaaagttattaaattgatgaatacatttaaaaactgaggaatgtggcactttcaaattttaaaaagttgcccaaatataagaaagcccacatgaacctttgagaaaaatactcacagccagtttagcagtatggaatggatggataattcttaatcacagggaacaagacaggcctgaaggacaagatgtctgagtaattggtggtcctgcagtccttggtcaggcaagatcttggctgcctcagaaattgtaccttctcttggcaataatccagtcagagcataaatccctggggtctgtcccaacccacttgtgatattatgattatatatccacagttcccagctcataactcctataccccttctcatagtctttggttctaatgttgaggcacttcaggactcagaagcaggccttaggaaacaatctctctgcctctctctctgaccttctcctgccctcctctccaaggcaggactctaatctgactgtgggtcataagacgtactttcagaggggatcctgctccataccctggaggaaggaatgagtgctgcacagagaggccaagaagaatctgaagagacaggccttgctgggtccgatcacatttctacatggttgtcaatcatgcctatccaatgaaggcttcctaaaaggcccaagaagacagagtttggggagctgaacatacggaggtccatggaggggtgaaggtgatgtgcctggggagggtgtgaaagccccacgccccttaccctatatcttgtcatatacatctcttcgtctatacccttggtaatgtcctttatgatcaactggtaaatgtaagtatttctctagtcctgtgagctgttccagtaaattaactgaacccaaagaagcagtcatgaaaatctcaactagaagccagtcagatagaagttccagaggcccagacttgtgactggtgtctgaagtatgatagatggggtggggttgggggggcagttttggggactgagccctcaaccggtgggatttgaggccatctccaggtagatagtgttggaattgagttgaaggacacccagctggtgtccactgcagagttgattgcttgcttcatggtggggagaaccccacctctgcctatatttggtcacagaagtcttctgttgatgactattgtgtgagaacagacgaaacactgagttttcctcaaaaaccacggttaaaggtgcttggtgaagaaggaattccagcgtgtggtttctctttctttgagaacctttattgttcttggagctctttgaaaggcaaaggactaaatttgggagtaaaagtggttgtaagaatatacagacatttattttctcatggtaagttaaactgcttgctaattaattaattacttaaggaatccaatagtattgcttattgagcaatagtatgtgcttggctcatgctagtcactacactgtctaaagagatcgactgagcagccctgtggggcaggtgttaaaattcagccccctttcccagacccagagaccaaggctcagagaagaagagtgaccccagccagttcacacaggtgggaactggcatgatgggcacagggccccaaatcgcccacccagaacccctgctcttctcactgctccaccccattccacacagcttcagcttgctttcttttcctggagaagaaaccaagggtcacggtgggtgatgtggtggcagagtcagaactagaacttgggcttctgactcttaccctgaggctcctttcactgcttcgtgtgaaagcctttggaggtacaaagagccatccagcgggcaggaaagaatcaggcagagctttccctggtgatggcttctttcttttcaagtttactaaatcccacaaagctgcaagcccacctgggtcaccacatcccatgagaacaattgaggcagataattaacagcaagatttcatcattgtgaaatctttttacttgaagctaaaagaccaacccgtaacaggatgatttgacaaatgcaaagaagggtctcttttctatgaaatcctagaagaggcacaaaccttctcacctgggcttcaggaaggacttctccataatcaaatccctttcataattatgcgtaattatttttgtcctttgtcctcacctacaccagtgtgagtgtgtctgttaatctgggagtcattaggatggcagaatagcgaggtcacctggattagcagctaatgaattccctaccctttgttctgataacaggataggacaataaaatattattcttaagcttctgagagggaatttacttgactcaggctggtatattttgcaaattaggtgataatacagagagttgcaatgctttcctgttcttgggcagctccagcagcagcctatttcttgtgccatcctcctccaaaggggtcttcccacccctctgcctcaaagtcccctggcccccacctgacttaccttgcagcagtgtgtagaaggcgcctgaggcagacaggttggtggttatggtgacatcatccttgctggaggtctctacctggacatgcactgaactgtctgtatcacttcggaaactgctcacctggccagtagggaaggtcacatttgtcaggcggccaaagctgtcgtacctggaaaccaaggggtggcactgagtagtagaaatataatggtgctctagctggaacttggtgcattctacctcatgccatggttttgctgtgctctgcttttctttctggctggatacattcccatgtctcccacatatcttgcacaggacctggtacatagatttcaggatgtgactccacctgctgatatccagctgcaggaaaataactgacctctctgagtctcccttccctaacccagtggggatgataacactgacctgcctactgcccaggagtacagctataaactagaattcaattgtgagggggagagatgatggtggccataatgagacagctgacccagaatcttagaactgggagactccccagaaatgatgtagtcaagcttgatgcctgaataccctctgcaaaacccgcaagaactggttatacaggtttttcctgaaaaacactagaaatgggagctattacccaggggtttcctaggtttctacacatcctgggaaaaggggattctgaattcaaaccaggacttagctagataaatggtgtcttgcctcttgcaaccccttccatctagattttacatctggcactaagcatttttgtaactgcaactcttagaacccccacagctttgctcaggtatggtctttctaaagcatcataattgaatcttaattctctttactattctcctgataataataaaagaaatacctaccatcattgaacacctccaatatacgaggcatggtgctagttgcttttcatgcattttcatgtaatcctcatttaatacatttttcatgtaatcctcatttaatccttgtctaaaaggtatgtattatctcttttttggagaatcagaaattgaggcttggaagagtgaagtcacctgctcaaggtcacacagctaattaagtgtgggtagaatcaaaattcaaactcagatctatttgcttccaaactgccacctgcctctctgtcttcaatgaacatttctgtaccgtccatttgcaagtattcaacacatgcgctcctccctggcaggagtgggctattaacattttaattattgtttttaattaggggaggatgaagtgtaaaaaggcaggcttaaatagcctttttgcacttgtgtgtgaatggggacacagttcttcctctacatggcaatattcctgactgacttgctggacacggttgcccctgtgtacttcaggtctccctactggctttttttttttaaactgttttgtttttacctctggggtaaagctggcccctgggttcctgtgagggttttcacaatggggcaatgaaaggtcagagagttcagctctgtccaggctcttccttcagctgggcctggcttcttgctgggattcctgggtctgcagctcctatggtatcaggggagacttggtgggtgagattaggcaggtctttgctcaggaattctctgcccaaggtcagacttgggtgctgcactacagactctgccatttgccaactgtttccgtgcctgagcctggcacagatcacagcactctacactgaatctaacagtccctggcacactctgccacagaggaggcattggtagaggtcttctgaatatatcacccctgtttttgtcctaagatcaattctgggggaggggccggtggcctttggggaagttggatgcctctgcggctggggccttttcaggatggcaggcagtgctgtggcctcgaatacactccctgggcagggctgcaggcaaggctgtggctctatcagaggctctcctgtgggtggttgggggcttcaaaaacccatgtcctgccatgatttctcctttctctttcttagtacggagtcaggttctgccaggaaaaggtcagtctggcctaggggaggctgaaacctggaatgggtggtcaaaggggtggactgcctcgcagagctaagtgagcagtagttctgagagacggcggctaggaaggagggtgtcttggagtaaagatctgagatgcatgtccagagacttctctcacatggagaccctctcagagctctgctcccttcaactctgagagaggctgggattctttttaaccatttgtggccactggaaatttgaataggaaggaaacatacaaaaatattgacagtggttatctctgggaggtagaattacaggtgatttgaattgcttatttatgtatatttccatgctttaaaaataataaacatggattattttcataatcagaaaagtgttgtgacaagcaaggtaaaaccacacgtgagagctcatgagcatggccatctggggaggcagatgccttaaattccaggctgtgcataggagtctcacttatagggcaagttgaagataacaatttccaggcattttcagcaaaatattactagggtactccaagtttttgagctaaaaatcaagacccccaaaactggttttgccctggtcatcttaactgtatctgtgattcatgattaagctgggtccggtcagatcctgagtcatcttttaaatcaacaggaagatccatttcagtccagcagtttaatgggatggggatgctgttctaggctgactctttgaacacctgtaatccctgtacatactctttattaaaataagactattcacttggactgtctattttcctgacctaaccacatgaaaaagattttattataccatgcaagacactgcaaagccatttgtggagttttacagataagaattgatagattgttaattaggagtcagatgtcactttgacaccactcctaccatggccttgctcaaatgccacctcctaaagccctccctggtttttcctgtcccttctcccagtgatatcctgtgcacagctctgtcctagaatgcctcccctgcactgcagtgttgatgtacaagtcgtccccctctttggactgtgagtgcttgaggtcagaacaggtctgtggagtctgtggattgacaccacctgggttctgccacctgccagcagcgtgaccctggaggactggctctcagttcatctctgcttcaccagcattggaactggcatagagaggaccggcagggaatgttggctgaacaaataaatgaatgcaggattggatgtgcaagtcctctttcctgctttgtgggagaggagacaccatgattcattcacacattccctcctacaggacttggcacaagctggacacacagtaggtacatgataaacacttgctgaatgccaaaatatggaaaaaacaactcttactaaataacactttggcaatctccctaggtatctcactagagttttagtcttgaagacagaaagaggctttgtataaaggcagacaattgcaattattattgaaggtagcttgtaaggcataattacattgatcctaaagaagatacaatgaaaaggccccataccttcaagatctggttttcattttatatgagagggtcaaaaaaacagtaatttccactcttcacattttccattagaaggactgaatgtcttaatgaaatgaacatcatatagagcaaccaatttataaaattttcttgtctcctattcattcattgtagtaccttccagagcttgggaaatgacctggatctctttgctgcttgattgatacctgtaattatcccaccagaactgctccttctgactgtggatgggaagaagtagggttgccagtcctctgggccccgcacacctttgccctgtgagccacctctacagaaccctttcttctccaccacagagctgccacaacaaagagcagggacctggaaggggcagttctctgaactccctgggctccaagtggctgcctcaagtcccggccccatgattaggtggcatctggacaatggcttagttacatttgtgacagttttcattatgggaacccacaaagtactggcaaattttctttctttctaaccaagaggaatgaaatgaatagttttttaaaaaggtctctggagccagatagtctaggctttgcatcctggctctacacttgccagtaatgtgatctagaggacgggcacttggctctgtgttcctcctaactatcaagtctccaccacaaatgatacaatttcaggcaggctatatcatataacctcggtgagcctctgttttctcttctataaatggggataataatcctgtttcatagagacacatgaagaccaaaagaggtaacctacttaaaatgaaagggaaacttcttcccagggcccccaggaccccaggagattgccctcagtggaatgtcaactccctgagggcagggacttcatttggaccctgctgtatccctgtagcttagagtgtgtggcatatagcatgtgcttcctcgtgtcaatgaatgttggctgaatgttggctccttcctgcctttctttctgacttcacctggaacgtcactctcagcacgtccttcttctccctgtatctgcttctggtccccaaacatgccaaagtcagtgcatgctggggtgctcatgcttcccgttccctctgcgggaatgctcttccctccagtgttggcatggcttgttcctgtcatcaatcatgtttcagatcaaatgttatcacttcagtgaggtcttccctgaccaccgcttctaagacagataagtccccccaacctttgtatcatattttcttattgacctcactatacttattatttatttgttctttgttttctgtctcctcctaatataagctccatgaggacagagaccttgtctgtattcttagtgcccagaggagtacccagcaggtagacagtactcagtacatgtttacttaatgaataaatatataagtaaataatagatattattgttgattcaagacatgggctgagagcaacgaagaaattcatttgttttgcctttccttgtccaaatgaggtggagaaaggtcactaatattcatgtggtaccttttaggtaccaagcatcatgctcatcatcatcttctgatgtaggcattattattatcatcatttcacaaatggtgaagaggaggctcagagaggataagcaacttgcctaagatcacacagctcgtagaggaatataaattcaaagtcaggtctgtctaatcttaaataatgtgttttattcatcaagcttcccataaaaatgatgctgtttcaaataaaaatctttgggttcatcactgcagtatatagaaaacactgttttcccaagtctcaggtgggtcaagaagactggcagttgttttattttcaggacgctttgcttgctaccactgcaattgactttgcagcgatgccaagcccccagttgggggtatgatagggatgaccagatgactggcttttcattatttcctcccactgatttttcttcattccatttatccaaagcatctttggagcacagtgaaagaaaacacataaaacattcatataggccaggcgcagtgactcacgcctgtaatcccagcactttgggaggccaaggggggtggatcacttgaggtcaggagttcgagaccagcctggccaacatggtgaaactgtgtctctactagaaatataaaaattagctacgcacggtggctgggtgcctgtaatcccagctactcgggaggctgaggcaggagatttgattgaacccgggagacagaggttgccgtgagccgagatcgcaccatcgcactccagcctgggcgacagagtgagactccatctcaaaaaaaatgattcatatagttgctgtgaacttggctctcagaagaggattgtcaaaggacatcttcacacacactgcaaggctttctttttcacactcaatacttcatctcgagccacttactatgcatggctggcaaggaaaacgccgaattgccctctgatactaaacttttgctgatcttaacttttcggttaaaaaataagatttgatttgtatgactttcatttctgattgtttcaaacaacaccatcaccatgtcagggaactgggcactgtattgtctgtggataattatggttcctggcccaggcacaccaatagttcccctggcccatgtcactgtaatagatgtcatcacgacatcattagctactccaaaactggatcagagccagagcactttgtggcttctgcattaaaaccttgtacttgctgtccatttcctacaaaattaagtacccaaaatgaattctagccctcaggattcccaagatctggcccactctgccatactgtatttgaggtggtgcctctggtgggaactgcttagggttcaggcagatctggggctgaaccctggcttggcgactcatggctaacatgtcacacagccagtcagtctctgtgctggttattctctgttccccctacctcccagatccattctctgtcctctctctgcccagagcagctgacccctgcagactgtgtcactggggcactctggctggctcacttctggttaagctaagtccgtggtaggcacgggcaagagactggaattcagaaggttttcctcactcctcactccttctttcctccagtgccgaatctctaacagtggctgcgtggatccatgatttcagcttcaactagggggcttctccttcatcattacagctcccactggacttcagtcatgatatccttcaactttcccaccttgctctgcagcctgggggttggtaatggctattcactgtttttagtgcctgggtgcctcagcgtcctttatttttatttttaattaattaattaatttgcttagggacaggatctcactctgttgcccaggctggagtgcagtggtgtgattatcgatcactgcacccttgaactcctgggctgaaaagtgctcttcctgcctcaacctcctgagtagctaggactgcaggtgtgtgccactacatccagctaattaaatttttttttggtagagatgggtatttctatgttgcccaggctattagcatcctttctaggttcccttacccctccctatacctctataacatgtcttcatttgaaagatatttttattgagtataatatctgagtggacaattttttttgtttgtttttgtgagacagagtttcactcttgctgcccaggctggagtgcaatggcacatctcagctcattgcaacctccgcctcctggatttaagtgattctcctgcctcagcctcccgagtagctgggactacaggtgcgcaccaccatgcccagctaattttgtatttttagtagaggtggggtttcaccatgttggccaggctggtctcgaactcctgacctcaggtgatccacctgcctcggcctcccaaagtgctgggattacaggtgtgagccactgcacctggctgtggacagtttttctttttttttttctttcagcacttctgtcttctggcttgcacagtttctgatgagaagtctgctgtaattcttacctttgttcctcttataaaatgctttttttttttttcctggctgcttttaaggttttctgtctctcctttttaattcagccatttgaatatatggctagaaatgtgtgtgtgtgtgtgtgtatgtacttattctgcttggtgttttctgagctttttggatctgtggtttggtgtccattattaattatgggtaattctctgccattatttcctcaaatatttcttctgccctattttttccctcttctcctggaattccaattacatgtatatcagactattggatgttgtcccacagatcttgaatgccatgttctgcattttccactcttttttttcctctctgtattttagtttgggtaatttctattaaccatcttctttcctcagctgtgtcatgctgtgtcctccagagagagcagcccatcaaaggcatttctcatccttataaccgtggttttcatttctaacaattccatttgattctttcttatcgtttctgtctctctgctaaaattatccatctgatcttgcacattgttcgccttttccattagagcctttaaaataattatagttattttaaattctctgacagatagtttcaacacctgtgtcatacctgaacgtgattctgatgatttctttgcctctcgggaatgtgttgccttttcttgcccttttgtacgttcagttgaaagcgtgacatcttgtgtagcatggtagagcctgagtgagtgataggtttatgcctggaaatgggtgtgagtttccttgtgctaggacttttgtgagggggtttgggttaacctaggatttgaagtctgtttatggttagcctctaggtatcataggttttaaattcccttagcaattccctgtgtttaggatgtgaaactggtttgccagagggtttttttccctcaaggtccacagttcagcccttgggtcctccctttgtgctgactcagagagggtctctttccatgttcctgccgttctctaactccctcccagcagtcttctgcccttcactgatgcttttagccttccagctaactatggtggtggcaaagcctttgctagggttctgactctcaggtatgtgggatttttttttttccatttcttttcttccctcattcagctgaaaggattttccccagtgcctaggcaggacagtgttcgctgcccttctcttcacagatgaagggtgttgttcctgatggaagatgaggtgagcagggtctgggtagagtggtcaggggtgtatgctcctccctcagcagctgctgtgaccttcccccaggtcgaccacaaaggacactttcttcttaaatctttcctcactcttttctgtgggaaaactcctggtgggatttgtagagaaaaaagtccctaagaagacatggacctgcccaattgctacagcctccaagggcttcagactctcttgccagtacacacttagcctttgtaaattcaccagccatcccagctgaactctttctccccggagctggtgcatctgcccacaagcagcaagatgtggtgcagggcccacatcttgtctctttctgcaagactctgtctctccttggatttgacctcagagaaggagttcaaggaaacgcacgaatttaccttttgtctggcttattttcatgataaggttgggcatgatgcactttccagctttcctatccccaagtaaaaaccagaggccaaatctcttcatttgacccatttcagttgagttctatgtcccgttgggagcactggcagtgctggtgctcagacgtgaatctagcattcttctcactacagcatatcttttcttcctgtctctatttcccttccattctgaatttacgtgtcattataaaatattgactatctgtcagccgactagttggcaaaccctaagcttgacgcaaagacaaatttgtaagggtctcacagtagttaaggtgagcataattataataggagttgtcacagggcactgtgggaggccagagccccttcccctatgaaattcagggaagggggttgctcatatccatccagcaagtcaattctggaacctgcctcatacttatgaggccattttctcagccaccaaatgccatctgaccaggagctaagtctgagagtaacgatgccacacatgggaggtggggactgcatttcagactcctttgagcttcctaccagcagacctgtgggctgaggggaggaaagtaaccttgattctccaaaactgtgaactctgtaaatcaaggtgctctgaagtgtgtgatgtttatgttaggtgtactatttaatcttttaagagaattggcaaagctgacttaaaacttgtttcaggccgggtgcggtggctcatgcctgtaatcccagcactttgggaggcctaggtgggcggatcacttgaggtcaggagtttgagaccagcctggccaatatagtgaaaccccatctttactaaaaatacaaaaattagccgggcgtcgtggcagatgcctgtaatcccagctattcaggaggctgaggcaggagaactgtggaggttgcagtgagccgagatcgcaccattgcactccagcctgggcaacagagcgagactccatttcaaaaaccaaaccgaaccaaaccaaccaaccaaccaaccaaacaaacaaacaaataaacaaacagcttgtttcaataatagcctatgtcacaggcaagcctgggcaatttttttttttagaaaaatagaacatttcggttataatctactaaactgcctcatgaagctaaaggtagaaaattcactagattaatggttcattggcaaaatctgtccaaatccttgttaagaaacaccataatgaaatatctgtacacctctaattctagacagcctcatagtttgcaaagtttttttactttcagtatttatttagttttttagtcctcataatagcccagaaatggggtagggcaggggattatttctgtctggttgagacttgggtctggaggccagctagcctgtccctgagtcacatggctcgcagccagtgaaaataggtgtctggcacccttgcttcattctcagcctgagctggaccattttgccttgggtggctctgcgtgttattttccagccgactttggatattctcagggatctgacttctttcttagttcatttcttgatctctcatatttgattctgctcttctcacctgacctctgattcctacctacctcaattaaaacttttgtctactcttttgattagtttacttgcagttgctcctgggaaatacctttcacacccaaacaacacttctgcaattactggtactgccactaatattgcttgcattaacaacaacaacaacaacaacaacaactgcagcagctatcatttgagtacttataatcaatcagacactgagctttccatattttatctcactgaaattttgaacctcatactattcctatgaaatacataactattgtcatccctatcgtacagataagtcacaaagaatgtaggtgaccctagccagtgcagttgaaagaacagggacttgtgttctggttctgctacatactcactgtgtggtttcaggcttgttatctaatctctctgtacttcatatgtaaaaaatgtggatgataattcctgccatctgaggttgctgtgaagattaaatgggaaagagcctggcacatagtaggatctcagaaaacaaaaacaaaaacaaaaacaaactagtttccctttctattttaggacttttatctaccacttctggtttgtgttaacaaggataaccactcttgggtaccgctatgaagtgcagtctttggaattccagacgccattttataaaaaagcaattgtaaaaacttttccttcttcactaaacatcaactatagctgtatatttcatcaaggaaagaaagggagggatctttcctggtagaagtgtaggaaaccgttttagatttcaggggtggtggagcgtaatggatgcagtgatgtgtgagcattcggtttgggatctgagggagtgactttgggaactaattgagtgcacagacttgctctgacaaagaaacccctgtattggctaaataatgtataagagatttccatcgggcaatgggcaaaatggaattatttagcgtatttccattccaatgagttaatcaagataattgctgttttcctggatctttgtcttttctttgtaattaacaaggtccttgtttggagaaaggaatttagccagtgaactttgtacaaatcgctgtgacatgtctgttcaaattatatttaaaaatcaactacagatccttttcctttggattctcctaggactgttagaaactgatgcttgatcaagcttgagaaaaactttaaagagtcaggttcatttggaattaacaaactcagtgtggcactggtgcgggggtaggatgcagggagggcagcagggcagcactgagaaagcccaagctctggcatcagacttggactgcgatccctgttctgccatgtctcactatcaaacagtgggcaaaggagccttcagagcctcagtttctatgtctgtaaaatggataatatcacccatcctcagagctgttgtgcagattaaatgcagtggtgtagctcctagcccacagctaatactcaacaaggctagttccttccccacctctcacatgcttatctaatggtgacatattcagcaatctcagtcgtgtgaaccatggctaagacctcaaaaagcagcttaaaaaaatctaagtagaaagagcgatgttagtccattcattaaatatctcttagaggaacaccccagatatatatatttaattgttgctaggattataataagctgaacttctggttctctgatcacacctcttaagaagtcctccactggatgaagaataaagaaatgagctacttgaggtgggcactaggactgaaataaatagtgacaccacagcacaaccctgagggaggaggcagagaaacctaccctttagatacagggcctaataaagtaatggtttaaaatcacttcaggcaggggcaaagggctctatatcctcatttccctacttcctgaaagctctcttcatattacagcgtaatatgcaattgttgttccttattaatgaccctgaatcagaaaaagaaaggtttcattatgtctgtgtagtgtgtttgagaagggaggtatgcaatacacttcataagaaaagtcccatgcaaaatggttaaaatgaaaagggtttttttttggaatttgaagacaagagcttcaattatgtggaaaattcatccacatgtgcctgttccttctccccttgccacatttgtggacagtggtcatatgaagatgctagcacttcatcaggtaagtacttttcatctacaccatctccctgtggtatgctgggcaggtatccactgtatccattctacagatgtggaaactgaggccaatagggattaagtccatggtagagtgggaactgatgcccagctcctctgactccaaagcttatgccttctccactagaccatttccttcctaggagaaatcatgtggaatatgaacatgtagaatgtattataagtaatagtttttatcccaaatcctgaattaaaataaaatactcgatcaatttacctccaatcctacaatgaattaatgaaacaaaatcatcaaatggccttgttttagtacttactcataaaatgttgtccatccgttttcattgcttttggttgccagaaggccggaattgccatggtatgtcatcatggccaactcgtgtccttgtgtggtcacactcttgagtgcactgttggtgcccatggtcacccagtacacctggccatctgggaccaccagccagaggggcatcccagtagagtctcggcggacatttaccatgttgccattgttgtctgtgatgagtgtgatgtcgccgtccccagtgtaggtgaagttgtacaggtagtctcctgtgggcaggctttgggtgtacaggtgcttgccggtggtatcaaacagatagagctcctggtcaattggtgaagacagctcatacatgttctgggtgttgaggaaaggcttgttcttccggataaaccgaattcggatgttcccaaggtcggccacgtagagctccccatcagcacacacagccaaggaagatggggtatttaactttgcatccttggcataaccatcgtctccagaaaaacaatcacagttggcatcatttttacagtcacagccactgggggccccagcaacgagtgagatctctccactagtggtgacctgcctgatgcggttgatctttttctcatcagtctcagcaatatacaggaccccattgtgtgaaacagccaaagcggtggctgactccagggttgcgtggatggccaccttgcttagcaggaagtggtcaatgccagggacctggcagtgcatgggcctcccggcgacaatgcgcacctggtggttttcagagatttgcaggaccacattgttgtcgaggacataaagtgagttgtccattgggttgatggctaagtctgtgggccactccaggtgaacctgacaatgaagacaccgatactcaaatgactggcaagatgcccaccactaatccatcccatagcccatgtagcccataacagtgtccaaagtggcttcatatacagtcttgcttgatcctcatgcagcctatcatcaacaatgaagcgtcagccccctgatcaccgggaaaccatgaaagagctgccactgagacatgtgatggtctcattagactgacaaaacatgaagaaggagttaacaacaacaaaatagtaggcaaaagggtagactttggagtcaaataggcctgagttcagagcatagtccactacttatgactgtgggcaagttactttgcctctctgagcttcaatagtcacatatgggaaatgggaatgacaagagcacagagtccctgacccaccataacccaccaaataatggcagctgatgttctaagatgggagggaaaggcagatggagtctggaggctgaagtaggagttgttcagaggcttaagaaagattcttcatacatggttgatatgatacatgtatgatttctcaattctttgagttcatggattaacagctggctagctgctagagacataaagacaagctaaccatggcctctgtctgtcatagttctagaccagtgattctcaaatctggcctcacattcaaattatctgtggcgattttagaaaataatggtgggaaaaccccacccttggtgggtgaaatcagatccctgggcttggagcttgggcatcggcattattttgaaaagcttcctgagtgatcctgatgtgggcttgagaatcatgactggatccttgctccttatgtgtggtcatcagcatcagctcacctaggagctgagcataaacgcagaatgacaggcctcctccaaacctactgaatcagtatctgcacttaagcaaaatccccaggcgatttctgtgcacactaaggtttatgaagccctgctccagacagtggttctagtacctcagagaacaggtccacctggaaaggattactgaagctggttgtaggaactaggagttcagaagtgctgggccccatgtggaacctcctctgagccaggctgggaaactggcataggtcatggtgagtcttcaagtgggcacccaggggattgtagctggcatggtctgaggggaggagtgttttcttcagtggacttgaaggctggattgttggatctatcacactaggaggtattggcactaaggggaaccctttgccacctgtgtctctaggaggtccagccatgttttgtgtgggctggaagtgccgacaggtgcaccctactgctgatttttccaccccacctaaaaattcactgccttagacttcctgagccccctacaaacccttgatatttggtccaatctggggtgcgcttaagcaagtgtatacctttattttaatttacttatgtatgtatgtatgtgtatgactgggtctcactctgtcacccgggctggagtgaagtggtacaatcttgactcactgcagcctccaccttccaggctaaagcgatcctcccacctcagcctcctgagtagctggtactacaggcatgtgccaccacacacacacacacacacatatatatatacacacacacacacacacacacacacacacatatatatataaatatatacatacatatacatatgtatgtgtgtgtgtctatatatatatatacacgtgtatgtctatgtgtatgtatgtgtgtctatatatatatatatatatatatatatatatatatttgtagagacagggctttgctatattacccaggctggtatcaaactcctgggctcaagcaatttgcctaccgtggccttccgaagtacagggattacaggtgtaagccactgtgtttggcctaagtgtatgcttttagataagaagtttttcttccaggaatttacttttgtataccatcgtctataagagtgtttttaataatgatgaagccatttttaataatgacaaagaccgagaaccaactcaaatgcccaacaactgagaactggctaaataatagtacatttagtttgctcataaattggaatactgtgtgtagttgttaaaagtgatgttatagatggatatttaatgacatggagaaatgtttgctatgtattaagtagaaagaacaggttacagaactgtaagcacagtgggataccaattggggaaaaatataagaagtttagctagattatagataaagaggagattaagtgcttgagggatggcatatatatcaaaatgttaaccatagtaagattaaaggtgattttaatttccttctttgtgatttctaacttcttatattttctacaatgtacatgtggtagtttaccaatgtaaaaagaaaccccaatacattatatacacacgagtgaggccacctccatctgtccctgcagctcagggacattctcaggagggggcaggccctttctcagttctttagagcatgatcttccggtcctgctttctaaagtcttcttgtccccttactcccagctccctctgtccctgcagagccagggagcctgcaaactcgccagggccgctgccggccagtgctgctgcttcacactcccctcgctctctgggcagtgtcgtggcagcttttggctgcatcaggaacacagtttgctctaaagtgacaggggaattttcaatttcttaaaacccacttcttgtcaactctggccgctaaatattttatgccttctggtcctgtggcaccttggggacctgcttgtggagacctttctgcctgtcgttatgatgaaaagatcgttccttgatgggaagactagggggagacagagtcagtggagggagagaggagaggaaagagaggaaggaatgtagagcaagtgctttcctacactttccccttatgccatgtgcacagaggtgcctgggaaaggagaaggggcattgctcttggagtcagtcctcactctgtcacactgcccgtgtgatgatcctgcaccagaccaactacctcagcctctctggtttcaccaccctattagcgatgatcgtgctgagacttgatttcccatccccaaaatgaatggactagacttgataatttcagaggtcttgcagctcccacgttctatggttccagtgtggaatgggaccctcttccctgtccaccggaacattctgtgcctttattaaagcacttggagctggctgccttgttgcagagtgattttcttgcaaaaatggattgtcaaatgaatgaacgaaggaaggaaggaccagcaaatggcatagagggagtgagagattggggtcaggacacctcacttcctattccagttccacaattgctacatgtgtcacctacctcaagtttcttaaacactgaacatctttctctatatctaaaaggggataacacatattacatagggtagttgtaaagcttaaatgagacaatgtacaaggaagttttttgtggattttaaagggaactagtattcacatcctattactagctgctgggcactgtactagacaatttgtgtacataatttcattaaaaaattcatttccatatctctgatggaacctggtacagggctctacatttataaatgcatttgcattcatcacacctcagtattcttatctataaaatgggggtagatcagctctaccctatgagactattgtgatagctaagtaagaaaagagaagttgtacttattctgtacccccatttctaacagagcgcctggcccatactaagttcttattttggatcctaagcatagagttattctctgtcggtggtggccatctccacttcttaacaggttgcaacaacttccttctgttccttctctgctctgtgcctctctctttagtttctttttgggcctgggtttgtctcctcccaaaggagctggtccaagttccttggctctcgccttctcactcatgcctctgagctgtgtgctctcccttgcttacctccctgctccccatggggcagcggagtagagaggaagctctgagaatgaaagccagtgacacctgcgcaaatgtgtctgtaaaatagatgccagtattggagagtttggttaaagaaaatcccatgctgacattcagacaaaggtagtgagggcctttagagatttcagtccaggatttctgaatctaagtgtgggttttagcatttttttccccctccgccatatgccagttgtcttccaagcctttgatccggctgcttggcagtacctctatctaaagttaaacaattttccgatgtgtggactgaaaattttcggcaccctgtgctggctggttgagggcccattttgagaattgaaaatacttgtatgcacatccttaggccatggcttcctgacgggtaattcaagcttgctcacagactggagagggaaactcactagccagcaagggtaagcctgccaaaactgcaaagacgagtggcagagaacagcatccactctggagtgtaataatcacattagctggtgcagagggaaaccatcccagcatgcgatggggaggtgacatgagtgctgggacctccagcagcatccacaaggctctgtggaaggacttagcgatacatgtcagtaacagaggtaggcatgaccagaaaggctggaagcaggtgacacagtcagtggaaaagggcctgtgtgtgcaggctcccctaaaaatgaaggggtttaaaaagctaaatgttgctggagctgaaatcaatttgcaatttgatgtaactcaatgctcctgatttcccaggttttggtaatgttggcaagattcagcacaggccactgattcagcatgggcctggcccagccaaaggatccagcaacaaaggacatacccttgccaagtcatcacaggatgtactaaggacatgctggatagccagtcacttgtgtctctttttgacctataatgggttcctggtatccacctgcaaatgtgcaaactctttggcatggtacaacagggtccgtcccttcctggacccaaaccatgcttcttgttttaactgcggccacctgcttccaagcaccctatgctatggttttcaattttccactattctttgagtgtaccagcctcattaacatctttgtgcctttgcacatgctgtttcctttgtgtgaaatgtctccttttctttcttgccactcagcaaacccctattctattcaacctgtaaaacttgcataaatgtcacctcttgtgtgaaagcaggcactctaacttttgttcattcatcacctctgaagggccaagcaatgctaggagtcgtggatgcattgtttcatgtatcttcagggtaatcctactgggccgatgtgaattatttccatttcacagatataaaaagtgaggctcaaaagaaagttactgagtgagtgagtggcaaaagctaggattcaatcaatcgattaatcaatcagcaagtatagactgtgcccaaatttgggtagccaggcaccctggttactgacagcatttctgtcctcacatagcttagaaagagaacaggcaatgtacaaatacccatcagtgttaccaaagaggaagttcaggtggcaatggatttaatgtcacgtggtgtaaagctctgtctatcctactctgctgctgctgaggtttccttagggagatttcttcactgtcccctgggcttccacttgttactcctgatggtgaactcccaggacatggctgtatcttacttgtctttgtgtccttggtgctcatcacagcctggcaccaagtaggtgctctttaaaggcttatcagtgcaaagatgaatggccagcaggctggctgggtggcagatgagaggatgagtgggcagtcccagggctttggtagatgaagccatcttacctgggaaatatccatgacagaatcacagctgagtggccgggctgatgtgagatcattagagccgagcagggtggagatgatcccattctgatcgatgcgtctgatcatggtgccatccacgaagtagatcagcccaaacttgtccactgtaatgcctgggggcagagaagccaaaacaggaactcagcatcagagatgacaatgacccgcacattcctggagccttgctaactgacagagcacctcctctacatgattgggtttgagcctcccacaaccttcattcctctctcaaagaggaggagtctcaggctcagaggccttgagtgacttgttcaaagcagggattagaactttttcagatcttccagggctctggtcctcccaccttgctgcctcctgagattttaatctatccccttagccatccactaaacctggattcataacttctgggggtttttaagcactagagatacagtggtaaggaggatctttttcaatattaacactgtgaattatttaaattcacctatttctgaagctctgtaattataataattagttcccctttttggtaaccatttttcttttctttctttttctttctttttttttttttttaaaaaaagagtctcgttctgtcacccaggctgtagtgcagtggcgcgatctcggctcactgcaacctctgcctcccaggttcaagcaattcttctgccttagcctcccagttagctgggaccacaggcatgcgccaccatgcctggctaatttttttttttttttttttagtagagatgagatttcaccatgttggtcttgaactactgacctcaggtgatccacccgccttggcctcccaaagtgctaggattacaggcgtgagccaccatgcccggcccgtccttcatgcttttctattcttattattttagtctcactgatcattacaaaactacggaatctgaatagaatcctatggatttgtgtagagaatattgttgaattgaatttctaaaggcagcacactgaggagaggagtcagaatcattactcaacatcacctgctccattcactagactgtctcaccctgttaactttctccctgacccaacttgtgtgacctcgggcaagtcactgagcatctctgtgtttgtcttcccagctgtcaaacaatgagattgctccaaatctgtatttctcactcttggatgtgtatgggaatcccctggggagtttgctaaactgcaccccccaggtagctgcttcaaaatatctcaagtggagtctgagctactatctgcatttttgacaagcaccttgggtgataatgacacaaaccagagtctgagaaccactccactgtatcagtacctctcagcctgtgatgtgcatcacaggcacctgaagaggtttttcaatatacacctgctggcctaactcctggaaatacgaattcagcgggtggctaggaccaggaacagggtgctttaatagtgtacatgggtgatagtaatttccatcccaggttcagaatcgcaagaatcagacataaccatgaactgtcgtgggatacagatgagacatggccctgggcagcacccagtttagatggaaaggcacaggaatgaatcagtaccatgtgagcagcacaagaaaggacagactcaagagggtcatggtaaaatacaggagattctggtcacttttgtttcactatgttttctctggggaaggcagtggaagaagggtcaggaagccttcaccaaggtggagagacttgaattataaaattttctggtcgtattaacttgggcatattacttcactttgaagtcttcatttcctcattgataaaacagggattctaacatctgacttgtagtaactagccctcaataattattaatgaccattgtaaaaatgagaaagtggctggcactttgtgagtttcaaggcctttgctccggggacccacgtgtctctcactggccagcagggtgctttaagatgcccaggggcctctgagtgctgagaacctgctggagcaccaactgttccttcttaggctggtcaggctggagagtgatttcacacagaggaccaggcagcctcaaggctgggaagcctttctcatggtcctgtcgtgaatgtacattaatttcattctgtaagtgccaagacaggcgttttcttgtctgcctagctatgccccatctttctcttccatctgtttggactgatgagtgctccatgaatagttgggtttcttgtttacagagttggctgcacaggctaatagaagtgatctgtcccctgattaattacctaatttttctccttttgttgtgttaaatagacggacatcttttctcctccctgctgcaaagtgcctgcatatcgtggcacccttgtcatttctatgtgggttaatcataggcttttgggtaaatgcactgccgcttcatctgtgtgagggtggggggccacgagggcggggaagagaacacacatgtgtggagaacaactgaaaagccctggagggaataaaaattcttagaaaaaactgttttaaacctaagagagtagaatgttgtggctgcaaagggtcttggggattatttagcccaacctgttcattaattgaccaatggggaaactgaggcccagaggaggaggtcccagggccagccagtagcagaggaaaaccatataggacttctaagtgcaagcctagtgttctttccactcctggctactctctcagtatttgaaaatcataattaggcgggattagcctttgttgatacaatatttaccccacacaactaccacctgacactccaggtatgtggtagagacaatgtgacttgatatgatgtgatgtgatataatagaacaacaataataggaatcatcgtttatgggatgtttaccatgtgcggggtactactgcgctaagcatttacattcctaatattcaatctgtaccacaactgtgcagcatatccctattacacagataaggaaaatgaggctcagagaacttcaatgatttgcccaaagtcactcagctgtagatgacaaagtctgaatttgaatgcctgatttcactagaatctcctgctttgatttgaaactaggccctgaaatctgggattatttaataatacaatcacttagaatgtttctacaggttattattaaacatattaattttgaccatcagaataaacctaggaggtagacacggatggcattattacccccattctatcagtgaggatcctggggctgagacactgtaaatcactggctatagggttgcaacacagtgaacactccactgagtgtggataatgatggcttctccaaaaagctttcccagtctccaaggcacaggggtctctcttggctctaaacccccatgaacagctctttcttcttgcctctcagagagcacctcttcctctcacccatgtcacagtgattcacactcaagtcttatttattctgctgcaacaaacttatctatgcaaccactctatgtacttgaatatttgctgaataagcgaataacaaattgtgattgtgggcatttagaggttcaactttttgagggactcagaattgagacctacagttaacccacccgatagcatatgaacatatgaaaacacgatacactaaaatgtttttgtgtaacaataacatgagagacagcatatatgtccaatagtagaggactgggacatccatttgctggaaaactatatagtcattaaaaatgagtacacagaaacaatttaatgacatggagaaatgttaatgatctagcatttagggaaaaaaagcagtttgcttaatgtgatctcattttgtttgtttttagtaaacactacatacacacaaacactttgaaaaaagactaggagagaagacaggaaatgttaactgggagtatttctggcaggtggaattatcacagtttttaccatcctccatatatttcttggtattttccaaaaatttttgcaatattaatcatgcatgtttttctgaaaaggaaaataccccaataaatgttattgacaatgtctctaaggcaaggccttacccctgggattggtgagtgtggcttctgtggccttcccaccatccccgcagcgagtgtcatcaaaggggaggcactggtcacctgtccccgcaaccacctcagagttcttgacaaggtccttcaccaccacagtggacttgattttaaagacccgccggctgttgctgtcagaaaggaagacggccccactcatggggtctgtggccaggtagtatttgtgtgctggactgtgactagaaaacaaagacatggccaactggtgagcattttcttcttcctatgagtagctggagatgtacagatgaacccctggccctttagaatccaagcaaaaatatcttatggggatgatgcccctattttgggtgatggttccccaatttttctgacctcagtcattggcttaactatccttcccacccactattcttgcaaaaaccccttgcaattcttgcaagaaccccttgcactattcttgcaaaaaccccttcaagatgaaatgattaagatgaccagctcagtgccatgtttgtatcaggtgctaaatacacgttttcttaagaagatgatcactgaggcctaccactggtgtcccgttcattcaagctagaaggatggatgctcttgactttaaaaaaacacttcaagagttcaaaaacacaagcccttttccacaggatctttacagcagtccctcatctccatcttgggactgatggatgaaaccctggctggctctgactcccggtcagcagcatcaacaccgtcttcagtggatactcatgttacacttatcaggagcccaggagtctccctctggcagtcagatataagtgaactgcaggattagtttgtaatttgcagtgaaacccaaggaaaaaaaataagcaacacagaagagcagtgctaatgatggttctgtttctggaaaacagttataaagatcaggctgtgccaacagagagagaagcttgactgcagagatgccttggggagacaaagcactgcctctagccacagggtgaggaaacggcacaggatttgcaatcagaacagtctgggttccaagtctagctccgtaatttcctggttctgaaacttgggcaagttacccgacctcctgagcctcgaatagtccttatgtgcaaaataggggtgttaacagctaccttgctagtatattggggaaaccagagataaaataaaaaatgcaaagtagcatagtgtagtagatgctcaataataattattattttaattaccaatgattgtgtctcttcttgcacttggagatgactacgtagtagatatctcttattaagactgaatttttttaccccctggtactgacatacaatttctttcaagtctagggcacatcggagttgaacttggtgcttctgagaagctaattttaagttcctgtgcatggtctgaacatttgccgggccctaaaactgcatctcaatattggcagccccttccaagtctccggaaggtattttgattcaaaggaagctctgtttggaccggatggtctggtgctggccattttcattgcacagtgaggcataaactgtgctaagagactcgggacagactgagcagtgatgagagcaccagcagggccagagcactgcagacccccttcaagatgaaagcaagagaatttgaaaagtctagaaagaagctattttgcatttatcaggtatgtaagtttggggtccttttgaaaagcaaaattttattttacagatttgtgttttttgaattccctatgaaggctggggcaccataatcttttcagtatgtaagtcactgaaggtcttaatctggccctggcaggtttgtcattataaatgtctcttgccttggacagtgtccttggggactggctacctcgaaaggggccaggcatccagatccaatgctttccttctttggttttctctccctgaattcaactaacctgatatgattttctccaactgtccttcctctttaatccttctcgaaccaaggggaggtctctccgcctgtagcctgggtcctcttcaagccattcttgatctaacccaaataccaacctgccatttcaatgctttcccttcaaggattccttaattcttacagagaaggtatgagctccctgcccctgcacaaatcccagctttctgctgtgctgctccaccctcccatcctccctcccctcccatcctccctacacctggccacagacctgtccctgcagcatgcctcaagtctgcctgcacctgctgctcctgctctgcagtgtgccccgcccctccctttcctactcacccttcacctgtcagttcaaatgctccctcctctgcaaaccttccccagccttctccccgtgcatggagatttgcatccattcattgctggacgataggacataatgctgtgactgttcatttatgtgtgtgcctccaaaacccaatcgtcaatacttgaagggaagagactggattttgttcgtttttgtttttccaatgttctgcttcgtgccttctagcccatggcagccacttgttttaagtagatggcatgtctatttttagattacttaggtagtgtttgcattcgcattatttagctcttcttttacttctcttctggggttagcagtaaacaggacaggtatcctgtctattttgaaatgtcccctgagacttaccctataatgtagcacagatttaagcttcccagatgacatcaattctggctacataaaaggcggtgaccttagatcctactgtgtaatcctggggcagccttgatctttctgcttttctgatgacagctctgaggcggggtgatttttttcatttctttgcacatcactcatgataaactggtgctatttacctcggcagaaaagggtccctgagggggtatggtgagggggccctgtccacttagattagccccctgagtttccagctcctgtctccctgcactgctccagagaagtgtcactcatgtggagtttctcagatcagtcaattccaggacagggtggcattggcaggattatcccagagtccgtaagagctgtggctgcatctttcagcccaaggacaaatctgaggtctgctggtaagttaagcatagggaaaacaacaactagctttgagcttagaaggtgtaggctctcatttaggtgagtcacctaaatagttcaaatcgtaggtcccttagctgtcgaatgactaagtccctgctcggctaggctcacaggcttgtcgttgggatcaaatgaaattatacatctcaacagccctttctagtttgcagagctctctgaacattcagctcatttcgtcctcctgccacctggccctgggagctgcagctgcatctatgatgcccatctagactccaccaggctgcagcgccacctgtctgcagaacagagctgcagagatgactaccactgataagaatgcatctgtgaccacctagggatgcccattctgtcccagacactgcgctagcacttgatgcacacatgacctcattttcttcacaactaccatataaggtaggtactttcctcccttatatttcagaaaactgagactggaagaggtgaagtgacttgactgggaccacagattcctaagtggcaggatgaaattccaaccgagttctgcttgactccaaagtctgtgttctttctacttccccaccctgctgcccaggatctaaaaggttcctctgcccatattcacctgggagtacctgctcatcttctgaggttcagcttatctgtaatcccattcctgaaccccctcttcttccccactggtagaactggcctcttccttcattgtgtctccactagagcttacaaagtttatacttttagtatctgtagcaccaattaaacttttctgtttaattgtctgtcttttggatgaaaccttgaactcctcaagaggagggactgattaccagtctctgcggctttgaactgggctgatgcagaataagtactccagaaagttctgctgaatcagcctccctggctggagtatacataggaaacgctcactgctaacaatcttagagtgatggttctcaaacatggctacacatcagaatggcctggagagatttaaaaatagccctacccataatgattgaagggtgtgggcatctatacctttgagatctctccaagtgacttggaggcacagccagatttgggaaccatggccttcgagcagttctttttcaactttaatgtgccacctggagcccttgctaaaatgcacatttcaattctgtagctctggggcggggaacttgagagtccacatttctaacaatccccagagcaggccagtgttgcttgtctgtattttgagcagcaaggccttagaatactctacaaatcataaatgtctcagagcatgagacggaagacggccttcagtggaggcctcaggcctggctgtgtggacagggagcatttcctggaaacggaccatgtctgattctgattcaattctgatgcccagtatcctgagcagggctggacacagagtaagatcacagcttcattttcagtttgctgtagaagtctctaaggacccacattctcttccagttcctcaaacataaccttagtttctctggaagtgatgtaaaatcaagaggccttcagggtaccattcctgaagttaatgagctgaagccaagcttcactctgccctcattctggatggtgtttggaatttcccagtaggagctgggaacctaggagtctgtagggacatacaggctcacttccttgtgagtgagaattctctttgtctctaagtaaggtctgcctcatgcaaaggagtgtccttcaatgacagcagttggcagccctggcagaatttgattccctggttctcagaaccagtgggaagaggttgagtgttggagccacacagtcaagggttcaaataccagttctaccatccacttggctaagtgaccctggtcacatcacttctatagcctcagttttctgaagctgagaaatggggatagtcacacctatttcaaaggattattttgaggacaaaattgcatgaagaatataaacctctgagcatagtgcctgttccactaaaaaataaaatacccaataaatggcagcttttaagcaaagctggttcctttagaaactactagaagatttggtgcacagtggaaacactaagtatgtcagactttattttgtcctgctcaacctatttcccgggacaattaagggctctgagttaatataatatgtgtatctgggtttgatggacactggagttcaaatgtacttctgaagaaaaggcttcaaacatcttccatgaccctggggaagagctctgggacgaggcaaagatgcttatttcctgaaggagtctgtagaggaagatgccccatggattatgggtttctgtactgagcatgcccgacacagcaggctggcactgaggctggaaaagcaaaaggcagacatgagtctgctccggggaagcacacacacagcctacagttgccagtcatggggccagacatattactgggagtggctgggacagttaatggaggaagagatacaactctataatttttaaaatccatctccaacatttactgatggggacactgaagcccagagagaggaagagatttgccaatatccaggtggcagttaatatcagagctgaacccaggctctctgtcttctggttgtctttagaaaactgcaaggcagaaagtgattcattttttcctttctactttggttcatcttagaaagtttttagtaccgaagaaaacaattaattgacgaagggtttaaagtcataccatgaatatataaaaagatcactgaacatcagaaacaaaatgttcccaaaccacaaactctttcagtttatacatgagactggaaaccagaaacgccaggtaaccagcccaaggccatatggtgaatgtgcagcagggctggacagcacctggccttctgactcttcccagctatgtccccctgggtcatggctgtgtcctttgcagccgccaccactaactgaatgtttcaacattaaatgctaggctttaatccaagacctgcatgtgaaatgtacttctgtgttttctgtacaactgaagttgaaggcatgggtcattacatagttcagtatcatccatacaaatctcattgaaaatctcagatttcagtgtcaggaaaaaaatgttctcttctgagaaatgggcatgttttcaatttctgatgccataaagtatgaaaataattatgttttcttatttacactggctgccaggaagctcagagcttaatcaataaataatcacatatatgtttcctccttttttgttaccaatttctctttgatttactttaatacatgtgcctttgggtgtaagaggatttaattcctttttggggaagatggagacatcataattatcatataataataattgttatgataataaattataatactgttaactctataggatgttatcattattattactactactactatttctggagctcctccctgtgcctaaaagtactgaatagtttacaaatatcttctgtgatcattacaacaagactccaagggagattttattaaccttatgttagaaactaaagcttagagagatgaaggaattttttcaaggccacataattggggagcttcagttttctcatctgtctactgatgtaatcatggatatctgcttcacagagtggtttggcgatagaacgctatagtccatgtaaaggacataaccctctatctgctacatagtaaatgttctatacatgtgaattattaaataattatatttactacttataaatatattatcttaaaataacacatacaattattacatgaataatgaagctacttcaattgaaagagatagaatcattactggattctgggtctgtctgactctttccaccacccctaagactttctttcatcccaacttagcaccaccctcatgccactttgatctgagctgcaggtggataactgagagccacttctgtggccatgcaagctgcagctctatctgcccatggttactttccaagtcaccacaatgtgtgtgaggtcaggggactctgaggtgactgctatccaggagtcaggtgaatgccatagtgacaggtgatgctgacaggcagacacttctcttggtgtgcctgactagacccatttctgtttactgcatgtcgctgtgagtctacatgacaaacctactctgggacaaagttcctatttggggattgatctctgcagttggttcctggagcctgctttctcactgatggcaagccttttgggtggggttgcctggcatccccaagctgaggcaccttgaatgcccacagaagtgtaaatgtgaaatctgtcttcttccagattgttcacctgatcaagatgttctcaggacttcctatcatgactatcaaagtcgttcaatgcagttaggatgacatcctcatttattctaaggataagcaggctgtagcattcaaattactattccaaggttcaaattctttcccatattactttcagactatcaaagtaactgcctcactttgcaacagatccaaggagttcaggctcctgccacccattcttgccattattaatgacttcctcccattgcaactgattaccccaatcagttccaatcacacaggattcttttgccatacagccatttgaaattgacatgtgcagcttaccatacagcatgcaacaaggcaggggtgaggcaggaaattctccactggttggcttacctatgtctgaaatctttatttctgacagaagacaggagagcagggaatagaagaaagaatgaggtgttagcagcagggttagaagcattattagcagcctgaaaacttgacagcaatggtactatacaatactgtaataaataaagacttagcagctgtgacactgatgtattttatattggatattacttgtcagtaagttcacttacaagcagctacatatcacagaagaggcatggtttcacctgcaccactactgctgactttgggggaagaggactaggttgacacattctgctgctttaacaagggctaagacagagattggaatagtggattctctcctctgtacagacacatacccagagatacacatgcttactgccctgtgtctccacatgcacacttccctacaaagagttacccaaatttgggtcacttcccaggagcctcctcacaatagaatacagaattggagatagactataattagaagggagggtatgacacagaaacaggcctaggaaaaaaagactggaagaaaaaatatatcaaaatgataatatacttctaaatttatttttttcaaatttcacttatatctcccttcttcacccactgtcatgatctccccaacaactgtgggagggaggcagggaaaatggggtctcttattggaaagaggtgaaaacggaggtccagggaggttcagtgattagtccaaagttgcacagcttctctgccgaggcgagctgatttcctcgtccatggtgctttctgttgtggtccatatatgcagttgactgacacaaatacgctcaaagaatccttcttccttgacagatgtctgtgccagtcagactcataatagacagcagaagggcagagaatattcccctggtggtcctcttctcattcagccgatatctgatttcctatgaacctaccgcgtgtgtgcttgtctggccctgtgtgtggggccaatactaactcttctctttagggcttatggctgttggccctgccttcctttcacgcgtgcgccttagagtgagattcttgcagtaggatcttacctccagggaggaacttaacaaggcattaagtcgaagtggctctcattgggccaggtgacaaggctttggcgaggcagaggtgtgtaatgatctctggattcgggtccaccattctagaagctggacctcaggcaggttctttaaattccctaagcctccatcttttcatttaccaaaggggaataataataaacaccttacggaattgttatgcttggcaaatagtaggaacccagcaaaagtgagttttcttttcccctgcccactgtggaggaaggctttccagctctagggcctgtcctgctcacatgcaccctggcccagaagacaggcagattccattccctaaaggagttgggagggagcttggcgcaattcctcttgaaagggagtgtgaggctcccttatctctaaagcacagctcttccatgacccctaagcccaccctatgacagtgccctggttctaaaatgatctaggttagggaggcatagagaaaaatccaacatatcaggtccttcccggagctctaagcgtggctgtgctccatcactcagggtcaggatggggaaagaggctgactcagctgcttctgcagcacctgaggagcagagaggtcagttttctcgatattggtcagttgaagggaactgcccttgggctcaagggatcctcctgcctgaacctcctgagtagctaggactacaggcaggtgccaccacacccagctaattttttaaattatttttttgcagatgggggtctcatcaggttgcacaagctgatctcaaacgcctggcctcaagtgatccttctgctttggtcttccaaggtgctaggattacaggtatgagcaatggcacccagccccttgtttttataaaaaaggttcatgtgactcattctaatcagtttacttccaggaaacagaaagaagattcagtggcttccaaggagtctaatttttggctgctagcagccttctatgtcacagatgtactctggatgccagggacatctccctgtcctgggtagcttgtcttcactgtagtgcactggggaagcagcacctgcttgagctgggaggtgaaaagtctcagagcctgacgggcaaggctctgtcctatcccacttccctgggctcagcaggtaatgtggcggggcccaaaggatggcaaaggcatattattaggaactatgaagaaagcatcaccttacatacctcagctctaggatgttggtgacatttccagaggggaagatccttctaatgtagttgaaatcacccacatagaggctcccgtcagagccacaggtgagggccactggggccaggagcttgttgccgtcagcaaggccgttgcagctggggcaggagatgcttctccggcgcccattgcccatgatgctcccaatgacaggaggctgctgagacacaaactggttctccccattccctttgtgcaggatgcctgggacaaggaaagaacagaattgcctgtggagcaggaaatgggtatcttttcctgtggttgaccacagagtcacctgattttgcaaggcatgcaagatctccatcaaccatttccaggatcatagcccaaggctttgcctcacccccccaatggaacccagattgtcctaaacaagtcatacagatttaattcactccatagctctgtaagatagacactattattatccctactgtaacaggggactgtccaggtaacttaaccgaccttacccaaagtcacacagaagataagtggaagagctccagagtctgggcgcttagccattcacctacactgcctctcaggtaggttgtccatatctcatgtacccagtccatagctctatgacagcatgaattatttatcatacttacttgtttttctctttcaattgataccatttcaagtgtggagactatgtctttttcctttctgtatccccagtgcttagcgcagagcttgacacagagtagataccagtgaatgtttatagaaatgaatgagtgaaactcacagtctcttctcatcaaaggagagtcaagaagcgacaggcttttacctggctttgttattaatgggctgatcccagctcctgtatagatctctttactgctttaactgcccttgggcctgtttccccaccaacaaaatgaggggattgacctcaatgacgcaaaagcttcttcccatatccatcctgtttctttttagtctggatcttcctttttcctcatgcacacttcacagcctccaaactggatcctctgcccgctgcctcacctcttccatactgaagcccaagtgagctgtgctcttacagatcatcaggatcttctcccaaactgttacctgttagctttgtcaaagctgtcctttgttcaatggatagctttaatttttacgtactctaatcaatcatttttctaccttaaagtttgtactttgttaggttttaggaaatcctttcctgagatttttacaagtactccactaattaattaattaactactttctttcttttctttttctttctttctttctttcttgcctaccctccctccttccctcccttcctttctcctctcctctcctttcctctctctccttttcttttttcttttctttcttctttttaattgagacagggtctcactctgttgcccaggctagagtatagtggcatgttcttgacttaactgtagccttgaactcctgagctcaagtgatcctcccacctcagcctcctgagtagctgggaccacaagcatgtgcaaccacacccagctaattttttaaaaacaattattttagtagagatggggtctcactatgttgccaggctagtctcaaactcctggcctcaagcgatcctctcgccttagcttcccaaagtgctgggattataggcatgagccacggtgcctggccttttaaatattttcttccatcaattttaaagtgttatctttctcatttagatgtttaagaaaacatctgaatttactttatatatagtgtgaagtgaggacttaatttatctctatatattgagccaattttcccaatactaagttctaaaacacccatccattctccactgatatatgatgctatctctgtcatgttccaagttcttatatacacatggtatgtggcagaaacttctccttcctatccaccctttccttcttttgcagttacagaatccctgctatttagctgggcacgtgactgcctggaacagaccacgatccctggctccaaggcagctacatccacgactaagttcttgcaatggcatgtaagtaaaagtgatatgggcagcttctgggaggtgtccttacaatgcaagggacttgctcttcatccttgacctccttcctgatggctggaaagtggatgtgaaggctggacctgaagtggtccccttggatcatgactttggagatgaaagcctgagtggagcacagagagagaggagcctgggtctcagaccctgcagccctggattatctacctccagacttgcagagtgagaagtgaggtgagtgagaagcaaactttatttccaattcagttattttggcttttctgaaacttggggccaaagcttagtttaattactcttcccaggtcagtttctgaatgcgttctattccacggaatcaatttatctgttcctgtgccagcaccacacagttttagataatatggtttttctaggatagcttaatatctggtgagtccctcttctttgttcttaaaggctgcgttagctatttacaagtctgtattctatcgtaaattttagaattagtttgtcaattccccctgaaaacatgctgtggttttgatgggcactcactgcctttttagatcaggcaggtgatatctgacatcattaccatatttagctgtcccatcccggctcatggtcagagtgagttatctataatacagatctgatggtgccactcgcatgcgttagtccctgcagaggcttgacatttgccttggatgaagttgaaagtcctaatcttcttaccctgggttccagctgctcacacccaagttttgtcttttgctgttcccttcatgtcatcctctgcttaaatcacaatgaaccttctctccagtaactttcttttaggcttcagcactttggcacatactgtaccttctgcctaaaatgttctccctacttgatacacagggctaatcctatagaccctctgagactcatttcaggagttcttgccaaagagacacattgatgaaccaagacgctgggtgaggtgctcttcttctagccttcatagtgccctgtgcctccctctgtgatgtcagggtgcatatggcacaacattgaaactgcctggtgagtatttgtgtctcacaggcataaagccttgaggccattcatttctacatccccagtgcctagcacagtgacaggctcagaggaggtcttcaagcaatatctgttgactgagctctctgaccacataggagcctatgggattcaaaatgtgaattttttgtttggcagggcacaagggatatgagacaaggttccaccccagcctggttcaagtaattctattaatccacttaccactttgaatgttgagggcatgatgtttgtctaggctccatcctccaagcttggacgcgtcaatttcatagccctgcagcactgttgttcttttttcccacaggattagatctgggcaggattcatattcataacccacggaaactgtaggtgacagaatgaggcaaaatgcataagtgagcaaagcccactctttggcctttagacctgtaggcaaggcccctggcttatcttttgtagaagaggaaaaaagggtcatatttctaagtggcaaccagaacgatgtgaaacactaacacaaggttgctgagccttaatcattttttcttttttttggaagatcaattttacatttggggaaaagttaaaataaatgtaccaattactttaaaaggatctaagtgaatcccttccaaggaaataatctttagtatgtgatggggtttgtttctgtgttcccaacccaaatctcacgtttaattgtaatccccagtgttggaggtggggcctggtgggaggtgattggatcatggggtggattctcatgaacggcttggcaccatcctcttggtgctgttctcatcatggtgagcgagttctcctgagatccagatgtttaaaagtgtgtagcacctcctcccaccaccccaggtcctgctcctgccatgtaagatggctgctcccgctttgcctctgtcatgagtcaaagctccctgaggcttccccagaagcagatgctgccaggcttcctgtacagcctgcagaatcatgagccaattaaacctcttttcttataaattgcccagtctcaggtatttataacaacacgagaacggactaatatagtatggaaaatattttgtgcacaagtcttcaccacattatttaatattggaaacttagatgtaatctaaaggttcaagaggggtgagagggtgagcaaacccaagtgcatccactgtaggaatactatgacgccactggaaatcacagtgaagaagaatgtggtgacctgggaaatgcttatggagcaatgctcagttgaaaagactggttatatatggtaatttgcattaaaagaaattacgggttgggcgcggtggctcacgcctgtaatcccagcactttgggaggccgaggcgggcggatcacgaggtcaggagatggagaccatcctggctaacatggtgaaacctcgtctctactaaaaatacaaaaattagccgggtgtggtggtgggcgcctgtagtcccagctactcgggaggctgaggcaggagaatagcttgaacccaggaggcagaggttgcagtgagccactgcattccatcctgacgacagagcgagactccgcctcaaaaaaaaaaaaaagaaattatgtatgaaaaaagaaaactagttgtatttgtttacagaatcacatatgacttttttctatttttgtccatttttcaaatttttattaacgactatggtgttttttaaattaggaaaaatgtttaaagtcatttacagtgaatatatagaaaaggaacttagttggattacttttaaaaagctggaagttactttgaggtttcaaagcttttgtttcataaatccaggaccccttagaaggtcactgggatgaaggctaaacatgacagcctccctgcccctgggtgtgtaaaaagtcctgtaactggactatggaaaggaaccagcagagacaggaatgctatttcttccaagcgtctttctgggcagccactattttccagtggacaatattctactacatgttcaagacaggaattaacaactgagcagctccttaaagtttcttgtagatgccataaaagactgccgaccatttatggcaacgggggaatgggctggaagacgtccctgtgaccccttcccccatggccttgagttccttaagcagccactgtggtcacttgtgatcttaggaaagtgactgcagcccagtcacttccctttttaactgactggcgggcactagaagtgctcattttttctcaagaggttataaggcctcattttaaaaaagacgacagaagtggcttgatctacagaagggatcatgaacagtgagagatggcacctttgctcccactgtgcccttctttggtaggattgtatgcgaacccataggaaagatctggaataaatccagctctgttcctttctagctgtgcatctcactgggaagtcatctcaattctctgggcctcagcttcttaatgcagaatttgggggtgacaatttttgactcacagagtataaggattaatggagtgactaatgtacaggggcacacattgcccacagtaggtgctcaagcaacattcttttatttccttcccacctctctcctcctcttcttcccccctcttcctccctcccttccttgcttctgctccctccctcccttccctcttcccgcctccttccctccctctcttcctcttcctccttccctcccttccttccccacttccttcctttctaaaaacattacttctctgcttcctcattctgcctttgctgaatctctacctttgctgaacctaagggaatgaaattggagtggggttcaagacgagaagggatttgctggatggttactcttaagtgcttggtggatcaactccgcagggttaggcctgctgagagtctagctctgagcccttcctaggacctcctctaatctggaagcagaaatgcatacagccagcccctggaagcccaagggccaagagaggctaggactccaggtgaggctacagccaacttctgtttcatcttacaaagagacagcaataacaaaaacaaagagatgacctctctgactgggtaaagaggccaaaaagcatttttgatggaggaagaatcttagttactgcacctcaaaaaaaaaaatgaaagaaaccattttttagctctcctattttaatgggtaagttcccacaggatggctgtggggtggccaggcaatgtccacctggccctgcctttgtggcacatgacctcttttagcccctcacaagccagcacagcacttttcagggccctttggttctgtagcctcattgtaatggtcgggttttctacattcaggtctttcagttcacattcttttaggtcctggccagtcacggacaggtcttaaaggtcaattaagccttaggtatttttgatctgagaagaggaaggaaggaagaaggaactagggaggtagaaagagtcctccctgcaagagctattctctgagtcctgcagccgggaggcttaccaaaggcttctgaaagcccaaacaccttctggttgtagacgtctgtcttgtcccaaatgaaataataggacaggtctggggctgcagcgaaccacttcctgaagaggcggccctccaccgctaccatgaggtgcaccttcatgaggttgaaggggatggtcgggtgggtgaggctgatcctcaggacagatttgtagccaggggtccggctgctcaggtagctcagcctcatcttgcagccagagatagagatttcctcctgcaaagcctagaaagcagaggcagatcacagcaagggacggtcgtcgactcaccgagtggagggaagatggcgtggccccatggactctgggtgttcaggaggtagagggaaaggcagaaggagagaggaggggaaaaaaagaggagacagtggaaagaagaggggaagcagagggtgaagagaagcaggaggaggaggaggaagggaaaagcataaatgagatgggagaaagattggggaggagtaaaacatgtcagaggacctggtatctggggccagttttcatgtggtgaccctgcaggagtcacctcacctcgccaagcctcagcctcctgctctgtacaacagggatgacagcactcatttcactgcagttttgagaggaatacataggatatgcatataaaatacttagatcacattgccactggttctcaagctgtgttatcctagaaagctcacggaacctctgaatctcagtctcctcactggctttgtgtgaggactgagaaaggtcacataggtaaagtgcctagcacagaaacgctgtcaggtggcatgcagtgctgctgctgctggtggtggtgctggcaggagggatgccatgaagagagactactgcggccagctgcctaagcaggaaggatggtttctctctcaaaactttcctcaaatgagatctgttccaaatgactttccttttcgggaaattaaacagacactacgagatgttgaccaaacaaataattatgcagagttcagaccacagcctggcaggacctgtggttcacagccccagctcatccacagagagaggttggactggctgcacggagcttctggccactctgggccccagctccagtgccagatggacagagtggggaaggctatgacccggggaacgctcaggtcacttagctactgggtgcaatgagcctagttctaagttggaaagtttaaatgaatgccagcatgcccaagcagacagcaaaagcagataactttatcagcttgatgcgctgggctctgtttcaagaaaggaacattaaatcaattgaggctattgtatctattcaagggacaatggctattctaccctacgtttacagtggatctgggcctttttcatcctgtccatttcatagacaagtgtgaacgtttaccctcaccccattctcctgaacacaggaaattttagggattgggcttaaactaaggcaatcttcctaaactacagcttataagtttgaggcaaagcaggacttataccctggtgagcccctggcatgactgaagtgccatcctgatgctctcaaaaatatttaccttctttaacataccctttaaaattcatatctcccagcacttgcaaaggttaacctgtgagaggactgggaaaatccaagagtttgtttatgtgtatttcatgaatctgataataagcaagatttttgccctaactgaacgtgcaggcacccagctcagggagcactgtaaagagggtgtgacctttaaccccttttgttccagagtccctgctcctgggaaaaatgtctagctggagctgagccagggttgagtaacaaattacttctctccagcaagctctgtctccactgacaaccatttcataagaaaggtcagcctggtagttgagacaggagacaggcgctgaatctctgaaaaggaggtttcaacctgtgagtgcaatgagaatttcaaaatgattgtatgtccttcttgttggctggcatcggaagccactcaacagggtacgcacggaaaggtgtttgctcagccaggcatgaaatatacacaaaaaaatatataaaatccctgctccaccagcgcccgcaatccattaataggcacattgcctgagttctcattaggcaggtgagacaaccgggacttctcctgggcttctacactgacatctctccacttcctcaggccttcactgctgccattagaaactgggctggggacagcgaaggaaattcaactggcagagctttgttaggtgaaaatatctatcttgatttccatcagattaaaatgcatctttcccaattactttcttttaatgatagttaagtaaagcagttgtatgtacagatttgagccaaggcaatccttaattggcatgaaggcagcgtgtgttaaataatcttaataataatagctaaaatttattgagtacttattaggtgacagacattgtgctaagcatctcatatacatttttctcatttaatctttattataatgctcactcttcgggatcctttggcacattcctcttggtagaaccatttattttaagtagttttaacagaaataatgacagagggacacaggaggctggggaaaaggaaagtaggcagaagtgaactaaccaggagagtggaaagacagagagaatttagtataaaccagagtgtgccaggcagttccaggcactcatgtgttttccatgtgtaagaggggtgcccctcatgcccttacaccatgcctgctgtggggtttggtggctggattttgcataacaggctgatgggacctgacccaagccctacagaggtgttttttctctttccactgtctctgagatcctcctccacccccaaaatgaaataaaagcatggtggaatgcaattaggaaagctgggtacctgaatttccggcacaatggggcctttctctgcacaggagctggcgaaggacgtcagtggggatggagagacgactgggttggggcgggcaaaattgctcaggtcacagctgggaatctcattctcctcatgtctcatgatgatggtttccatgacaaagaagcgatcccatggcagccacagggtgtgctcctgtgtgatgaaaggtgcccgctcgaaccgcaggatgatggagatgccgccatttgtcaccaagtcaaagctgtttgggaggggaaggttgagaaggggcggggagcaggaagagcaggaaccaggatgagaaagagagagacaaagaaaggggagaaaattacaccaaagggtctcagcatttcttgagggaggctctaatgcctaaatatttgactgcagctccaaacaatggcagtgattttagaaagcagtttttttttaccccataaaatgattcacatagagaatttgctgaaatgaaccactgctgtggagagccatttttcaggatacacaagagctgacagtggtgctgctggtacttagggcctttcaaccatgtcagagctgaaagcccagtgaaaagtcagtgaataaagtagggcaagccttgatctgggtgttagaaccccaagcctggtcctggctctgtcttcaactattatgtgatcttgggtaagtcacttagcctctttgatcctcatttttttcatctgtaaaatgcaaaggctcaaatggattattcttaagtctctaagattctatgactccacagcaatcttagctctaattgtgatagattactcaacaaaggcctttgcaattacaaaatagctaagcagtttaaagatggctcaattagaaacacagtatcttacaagtgaaaggagaaccagaagactgagtgccagcctcctagttgagatgagatcactgtgacagcatctggagagctggcagcccagcctctgttcatcagcctctgaggatgctggggaggtctgaggagaaacctgccctcctagtcctagttctgtcttcaatgtgacaccaaatgggtttgctctatgatggtctccaggccttccctgatcctagatgaccccctgctaagtccctcttgtttcaggcttgtggggattgtacaggcagagtcttccttgcctcaccccagaatatcttgtgcccaaacaggacccagccagaaacatactggcagctctgtttggtgctggcatcttaactccaatcacctgcagacaaacctagcaaggcacgttcccatccaagccttggcatgcacttttactttttgaacattgaagaaaactgagttcctccctatttgtacacccaatgtttctgacactgcccagccccacatggaacctgatttgagggttctgcagccacatgtttagaagccagatggactcagattatagataatgggaaaagagggccacatgtgaaccaaggtacatcactaatccggcaggctgggtctgctgaattaagaagagggcatagcatggctgctacttaaagccctatcatgcaataagacataagactaggccaggcatggtggctcacatctgtaatcccagcactttgggaggccgaggagggcggatcacctgagatcaggagttcgagaccagcctggtcaacatgctaaaaccccgtttctactaaaaatacaaaagtgatgtgaactaagtgatggtgggtgcctgtcatcccagctacttgggaggctgaggcaggagaatggcttgaacctgggaggcagaggttgcagtgagttgagattgcaccactgcactccagcttgggtgacagagtgaaacctgtctcaaaaaaataaaaaataaaaaataaaaaataaaaagatgtaagactagaattttgtgtcctttctcttcttaaaacagaaagttgaaatcaagtaataggtgaaccactggagaggaacttaatggtcatctgacctagcccccctcccatctgatgcatcagttccttctatagaaccaccatcaagggctcattcagttcctacttatgcaattccagagatgaggagattgctatatccacaggaggactgttctgttttaggttagttctgactgttagaactttttttttttttttttaaattgagtgtgggtccctctctttccagcttcttattcactgggcctgatgtctgtctcctgggtgacttcaaactagtccattccttctgtcacaccctggctgtagtaggcattttcaaagcctgtcttaattggctttgttggatggagaactcctaactatcaaactgtatagctcaaacttcacctcccccacacagccttacccagtcagaattccagcttcctccctgggttccactgccccacacgcatggcattgcactgtcattgcttgttgagctctctggcccagggacattgagtcctctgtcttttcagaaactagcccagtgcttgatgcttaaaagttgatggaataaatgcatgagtgacagcatcagctgctcctgaactgacatctactaaacaccctacgtcccttcttactttggctgttactgcagttaaatctaaggttcatctgggcagttggtgtgagagacctcaatgcaggatctgatcttgactctgataaatccaccatgtgggaatgggcccattgctgcagcttgctcttctctcctccagagactgaaaggattccgcatggaaccatcctttcctagtgtcaagttctgctcttggtagatggcatccccagatttggggctccaagctccaaagcctgactcttccaccctttgcaggagctatcacccgtttgcctgttcctcattcacttagatgaagttgagtaccaccatcattcaatgacagagaaacacctgaggtggggtttattttgaatcaataattcaggttttggctctccaggagaatacccatggttttggggaaatactcaaagaacaatttttctgtcacagaactgaatagcatctgtgccttgatagaacatttttaactgtcaaacagaattttagccagacttataagctcccttcatgagaggctgtatgtgaggagggaggaaagacaaacatgaaaagacatattcccaaggcagtgagcaagcagggggcagctggccttgccaagagcaagtaatgagctggggctaggcccgctcctctggaggggaaaccctgctttggacatgaatgtgaatgtgaccccaaagggaaggcctggttatcatatgaagcccaaacagcgcagggccattctgaacactactacttgctccatgggtgaattatatcacctttccaagcctcagttttctcatttgtaaaatgaagctgatgatcataatcatttggcagggttattgattatacagatgggataatagatgggaaaagcacagggcctcacacattcccttgtcttggctcccacccctcccctcccctcctctcctctcctttcttttcttcctttccccctttctccctttcctttccccttttctccctttctctcttttctctttctttctttctctctctcttttttcttttgagacagggtttcactctgtcacccaggctggagtgcaggagtacagtggggcaatcatggctcactgaagccttgacctccctgggctcaagcaatcctcccacctctgcctcctgggttgctgggactacaggtgcatgccaccacacccagctaatttttgtatgtttttttgatagagacatggttttgccatgctgcctaggctggtcttgaacgcccaggctggtcttgaactcctgtgctcaagtgatccttacgccgtggcctcccaaagtgctgggattacagatgtgagccactgcatctggcccccaatttttaattcaatgagcctaatctacatctcttgcctgctgttcttttagtttttcttcatggcctctattttccattttttaaatgatctctttggctaacttctctgctactgttttctgtttgtaagctcctgttaaggtgtgaagtctgggatttcagcaagtgtgtgtgtgtgtgtgtgtgtgtgtgtgtgtgtgcgcgcgcgtgcatgtgagtaggggtgggggagctggatgagggcaagtatcatggtgccttcctggaaagcgaagaatacatgtccctggactttcagtccacttgtgcacactgttatttccagactatatctcttagtcttatggtttttcgtaaggtacgggaggtaagaaagaaggtgagttaaggaagggtgggagggcagtgatacctgttcacatgtaacaaacagagatttttggatactaagagaacaattgataactttcccatacattatgcagtggctgagttgggaagaaaatttgagccccaaaatgcattggtaagaattgatctgaaattcaagctctgttgcagcaattctggctacgtgatgtaatttaggaggatgatgcaggaaacagggctgatatttagctccatgctctcagtgggcagtagaaattgtagaggaagcacaaacaggaggaatcaggaagtgtcagagactgagctttccccaaaggccactgaacttatgccagactcggtgtgttttatgaatctactctaaccaaccacaacagggcataaggactgacgatttgccatctcacaggagtgactggcaagtttcatggcaaaagtcagtcctgaaagactccttttggatgaatgtttcacagcaggtaataatgtggtcagaatacctgttgcctaggaggctcacatctgccactttcatacagcaggcagcatccttcatgctgtagtgggagtcttcatgagggccttcctgggtgggaaggtgtatagggtagggaacagtggcctggcctggccagtttatccctgaagactggccactaatgtcttccagctgggcctcttcctattcacatggagtgagaggtggggagggggcaccccatgccaagcttgccaaccccatctaagaggcacacatgtctacaaacagatgagcctctacttcattatcacctcggccgggacatgttcacatctgatattggattaaagaggtgctaaaatcaatcaagctggagcataatttccaacacagagtgaaaatcaaccttatgggcccacgcttagccagatggactgccaccacctggttttattaaaaatagaggacttgtcaccactgacagcctaaatattccactttcctccttttttccttttctccaaaatattctcattgcctgtcctgtcaccatcacttactcattcaataatctgtaattttaacaaatagctaatatttattgtatacttactatgtgccagacactggaaatacagcaatgaatcaaagtggggtggggaactaagatttgttaaccacgtactatgcgccaggtgcttccccattcaccatatcttctaaccctcaaaaccaatctgtgagataaacagcattaggaccatttaacagatgaagccaagacacagagaggtaaggagaattatcctaggacacacagcaggtgggagagctagggccattaaggaagttttatttcattctgctgatggttcttggaggaattcaaaggtcagaattctgtcatcacccaaatggcttacatagatctaagcagctgcaggatggaaaccacataacaggaatggctgagatttctcaagctgtctgttctgcagaaagtggttcgcatgactgttttatatcataagtcatggagcaggatatgtataaggtaccctctccttactctgagaaccaaatgagaagaaactgctaaatctagagtcaaagggacataggccagagttaggtacaaggtcatacaattagtaagttgcagagctgggcatttgaattcaggccctctgaatccaagacccatcctctttccacattatcagtccagcagcagctatatggcaagaccacaagagcgggaccttcactgtttctggctcatagaaggtctcctacctgccatcttgcctgctgattgtatatccaaagagagggttattgacaaaactgatgttcacaccaaccaggggggttccatctgatgtcatcacttggccacgaataacacaagcatgcctgtgggaagagaagagagaataaacatgatacacctttcatggtcagagccctggctggcagggaaccccgagaggccagaagccagaaaatcagtcactcagacacatcttgtacccaggggttcatggtgttcactcaagatgcataataatctttaaaaaatatcacctcagtttagggcatcaaagtgtccttgagagaattactattggcaggtgattcaatgatctcactcggaggttattttctaaggatactgtattatgctgtaaggagataaagctgatcacagagggcaatatcgcctagttctgtgtgtggatgtgtagttcaatgatctggggtctaatcttggctctgccacttcctagctctctgaacttcagtaggcatgtgccagttctttgaggcttttttttttcatcctggtatagggtaagctccacaaatgacaatggctattactgttattaacagtctcattggaagtgaacatacaaaaaagtgagcaggagagaaggtacttcctttcatctgacattcgagacaggagaaggacagatgctagcatgctctcagagtgagttttggaacctgacacctctcccaatatccctcctcccactcttactctatattttggacaagaaattacctgcttttcccaaacttgccaggcaaatgttgcttagtgcctctgtctgtgcaatgttcttccatctgcctaaaatgtcattcctgcactcctctcccaactatttcacccttgaagagccaactattaatgacacctcttccttgaagcctttcttgatgtccctaatcagaactagttcctctctcccacaaaacctgatgcagacaccttgatactctaccaaaccatacacactcctcccttccactagatcctgagctctttgagggtaggtcaagatttctttctttctcctcacagtgcctgaactatgtctaacaaatgctaggttgccactgaaaacatggtggttgagcaaataaatgggacaactagagatcatctagaatggtggctttttaaacattcagaaacagaaacgttagggtagatgacattttataaggactccaaagtggaaaacgaatgaaaagatctacgctggatgaagtcgggatggaggcctcctctcccttggggtgattttgaaggcaactctgtggagtttccgtgtctgcagaagtcagttggaagatccctaagttagtggaactttctcattgtatggaagaggaaactggtttccagagaggttatattatgtgcccgaagctccatagaaagcaggtgatagaggcaggacttgaacctgggcctcaccactccaggtcccactctaaccagtcacttgccactggccgtgggtggaaatgaaggcactggctggtgcaatgtcctcaaggatccgcacattggggagaaagccctcgctgaaagacagctgagtcaaaaacgcaggtgctgcgcaccacataaccttctctattcacctcaggtgagaaggctttttcttctggcctagggaagagctactgacgaggcccatgggcattcattaaaaaaagatctcaaattcagtaactgccgtatgaagtacccacacctctaccttcctagagtgataaacttttctctgttggacgagaaaagcaattaacaccaggcttgtgaagcagctggtctcactagtgtcagcttgtcctttctgaaggcaagaacaactacccacaatgcaccagactccccaccccaccccaccctcctcacctcactccacacaatctggttaatgctaattcagtcagtggtttccttccgaggcccttggtctaaatgcaattacacggcaaacaagttaagcgggtgaggctcagcaaagactttcaattctgctctgaaggtcttccaatgtatttatgtgaaattatctctccgctaatggggaagatttattccaccgattgtattcagctggtgctgagagatgttttctttaatggaggacaattgaatttcgtattgctggaactctgtccttccagagaattactgacagatctcatctcctgacgctggccaccagccagccttctccagacatatgtgcctctggattctgcctggacagaaaccagtcctggggggatggcttcctttctggggctgtcctggctgctgcccctaatacacatgcaggccagcctcctctgattgatctctctttggggatttcctgataattgggaaacattgaatcggcaccatttggctaccatgtagcctccaacttggcaagccagagcagatgcaagtttagcctgggctcccgtggattgcttttggattctggggaagattaggttgactccctggacgccgataggccatagaggcctcttgccaacacaggcatttggctcaggaattaaatcctggagaaaaacacttccatccctgttctgttttcatgattttcacttgtctggaaagcccagattaacataaagccttccctggaacaaaggagatgggaagtcagcttggtgggggcctctgaattgtgtcttgtgccacatgcatttgtcctgggaggtttgaaaagatgtgagtgctgggcttcccaatgcttgctttctgcatccatttatttaatggatactatcagtggggtgctggcaaatgtttaatgaccgacttttgaaaaaaaaaagaaacaaaaagaaaaccagcttcagttgcagcgtttgctcatttctgtggtgtaaatactctcatcatggctgttttcaagctaccaatgagatgccactgaacacagaggtgggaagagacacacaggaggatgccattatgcggtactgccaccgtggagacgcgatggtcctgagtaacctcaagagcaaacgtaacatcaaacatggcaaaataattagaaagtagtaagttttgagtatttattacctttgtttttaatgtaccttatttaattttatataatttaatttttaataatggctgtgtttaacaaccagcttgcagaatttctgaacatttaataatcagttcttgcgaactggttcaagctggcttctgcatgccactggaacactgaccctacactgagggttgggcactcgctcagggctggagatgtggctaagaaatagttgctgctttgaacgtagaactccgcagtggaagactgccttaactgccttagtgaaaaaccattaacgtgggagcaaatcactgtcaccgacttggcttcccagctagctcatatgatcctctattaccagtcctctatttgacatgatttgcttcctcatggtcactgtcttggtgtaatggagttttggactgttattttctactcgtccttagagtctcatctaagctgtcaccacctcagtaaggttgtcatcaacttttcctgacacaatgaatcaccccctcctttgggcttttatacaccttataagtatctctctagtatttgatggtcgtatgtttatatcatttgcattatatagccatctcacatgtttacgtgtgagccagaggagggctggaccacatctccagagaggataagcacgggatgctgctctcagagtgtttgttaagtgaaaaacaatcaagtaactgaaagagagaaaaagacttgctcgaggtcacccagaaatgaattcacttggctgagctgacactaaagctaggtcttcttacttctgaggccttaatcttactactgtgttatgtacctgcagtcactaaaattcctttaatttcacaaaaaatcaggcgcctactatgagccaggctctgtgttaggtgctgagttccagaaatgtatgaattacgatctccacttacttgctagagctcactaaagccaacgtgaaatgcccccgtgtagttttctctgacaccagtgagtcaacacttgggtttggcatatgtcaggcagctgggatataaaacaagcagttaggctaggtgaactctgccaggagggagcgcttgtgccaagccaagggtggtgtcaaacatactggcatgagtccaaccacacactcagggcctgactgaggtgcccttgccgacgccaacaagggaaaagatctgcctgactgcttcctgaagagagtgacaaggtttgggatcaacagaagaatctgctggagagacaaaaccactccaaaacaaaatcaagcaaataaaaagccaacctcaactgttgctcagggaaaagttgtagggctgtggtggcaagagcactaggctgggagtcatagttcccagttctgactctgggaactaactgtatgattttggagtcatctgacctctctgaacctccattctctcatctgtcaaatgcaggctgaagtttttcccaacctggtataaaatagaattcaacatatgtttaagaatttataactgttttaatctcatactacccaatccagctaaagcagccctactgcacgtggcttcagaatcttaatggagctcatgcaatacttatacttatcactaaattgttccctctatctggaaacttccacctctcctagggcattcaccaagcagtatacaccactcctgctccttctgggctactcctcatgaactctgagtgctgttgctctgccaggacaatcttttccccagcagaacatgagctccatgaagacagggaccaaccacatgtcccttactgctatattcccagcattgatcacggttgatggtcatttctgagtggggaaaagaaaacctcctccaaaacaggtgtttgctctggaattcgaatgcagggcacagagtaagttcttgataaattatttatgcaatgaataaagagcttatgtgcttctgtaacttaaggtgagggcgatgttagagaactttgagctacttgaccttgacagggatatggttagagaacctagggctggaagggttgtgccctttcaagaggccagcccgcactctccctcaaggcttgggtaccttcccctggaagactcacttgcctcagcctagccctgaccctttgattctataccctcctcatctgtaccacctgtgatctgaaaaactttgaaaaagaatgccagaaacaaagttagattgattattcaatgtatattatacaagcagataaaggaaggcaaagggagaaaaactgcagcttttattattttgtgtgtgtgttattttgttattaagtgaaagcagctactttggtattcaggagacgggaatatcatttgggatctaggtggcaaatgataaatctagcctttctctcctttaaagtatttgctagtctatgccattattgattatgtaaatcactcctttgcattgtgtattttaaacaggtttttttgcctgacttgtgtaaatccttaaactgttttctgctaacttctgctgattgaatggggatctttccagcatctactacaatttacctgaagtcttgtaagaacattacctgggcccaaatgagaagcctcacttcagagcctgttaaattactgccactgaaggtgtttccagtcacagcctgacattgtcctctctgcagctcccaagaccatctttcaagcccagccaccaggctgatctgtagctctctcttcctagttttccatctgacgctctacctcagtttcttgaaccagcttttccagcccaacatcttctgcctatatacgtattcttgggaaacccctgattatgaaacattcgagtcagaagaacccttcctgatcacctctttcaaacttcttttggtaaaggtgagaaaataaagttcagacagggaatggacttgcccattcttgcagacttgtggggagccaggactgaatcaaatgcaggattcgccatgagaacttgggagagtcactccacctcttaagatacttgcagtctgaccgacacgtactgaaataattgagaatcccaatttgtcttggcttcacaattcagggttcacataattagagccgggttctggaaccatttttgattgcacgccctttctgtaaacatttttgagcaggctccttcaatgtacttgcattcatttataaatcgcacacatgtgctaccatcgctggttcaccttgggaagggtaacatacatttggtgcaaggtttgatgagtattcatatttcaaatagcctgcttgataattttgactctttaagtgaactctgctaagattgttgatcattttgaatctcttagttaactttttgttcagtcttatgaaaataatcatttctaacctcatagcgaggttgaggaaagtatttaatattaggagtagaagaagtatcagctctgccattttgtttgcttgtactcgcactattagtattatcttccatttgtatttaccttgcaagaaacctttaaagccactttaccattttatgagtaagtttggttaacactagattttatacagatacacagacagacacgcatacaaacaattatgatgtaatatactattacatcataatacacaataatacacaacaaaccagtgtgggtccactgtccctctttcttttttttctttttctttttttttttttttttgagacaaagtctgactctgttgtccaggctggagtacagtggcgtgatctcggctcactggaacctccacctactgggttcaagcgattcttgtgcctcagcctcctgagtagctgggattaaaggtgtgcaccaccatggcccagctaattttttgtatttttagtagagacagggttttgccatgttggccaggctggtcttgaaactcctggcctcaagtgacccacctgccttggcctctcaaagtggtaggattacaggcatgagccactgtgcccgtccactgtccctctttctgtggagtagatcttgatctccctcagaatgcctcatgtgctggtccagacatgtaaccaagtaacacagagaccaaaggaacaaatcggtgagaatccaacattctatagaaataaaccagtcttgctttcttatttcttaagataaaagaaacactgtatagatagagcccctaaaattttcttcctgttctcatggcccaccttcggtatctaccttgggactatgatagtgtgtatgtgacttttttgtatacaaaataaacttgaatatgctatttattattataccccaaagccaacttctcattgtgcttcaatctttataacttatttcaaagctcatcctatatttaccatgtatattttccaatagccttatgcccaaaccagtaaaacttgatctagtccctttttttatttttttgagacagggtcttgctctgtcgccccagctggagtgcagtggcatgatcttggctcactgcaacctctacctccagggttcaagagatttttctgcctcagcctccccagtagctggggttacaggctccatagtctccttcagattgacaggagggaggagtttaccttttaagttacaggggtcttctgagtgactgagtccacgttcctcatgtacaggtgaggtcagtgatatctgaaggtggggcatcccttccatcactccttgaggagggggtaccaccagctccgccatggtgccgtgacaccacctggggccatctaacagcaagatggcccagcacttactagtgtcttcagggacctgaggctgtgcttcccgcagagcccagaaaccactgttctgtggcctcctagctaagcatggctgttgagctccttcagacaccaagggagcgtgagctcccaggctgcagaatcaatctgtcaaggctgtgggcagcctggctgctcaatgctgatgcttcaggctgagtcctctcccataggaatcttctggaatattttctgctggctgataaaagtgtacacaagaccagagcccttgacttgtccaccatactatgcttccagggaactgagcccatcgactatggtgagggagaagcaggactgagacagtctggccagcagggagcaaggcccttgtcccagctaagtgggttggtcatgtctggggacatggctcagaaataccgtcgttgtgcctggggacatgggatatgtggtgcatgttcagataggctgttttctatgctgtgtggccagaagcttgtttcaaagaagacttttcaggtgatggtttgtgctgttagaaaaatacaaggcagctctgctaaaatgtgactctagccacagtctctcagcagacaagttcatttcatgaccatgtgtctcgccttctgtcagggacagggcaggtcctgcttcaccaggaaaggggaaaccagaatgaaccatgatcagacccacttcatggggaaggggctgatgccaggcagaaacgcagctaagggagtctgcacaaagttcagctcaataggctggagctgaggtgcacagcaatacacagctggcctgtaatggaaataataattcaaaggatgagggaggaggggctgacaggaagacagccatggtgaaggggctcccagaggcatctggatgtggacgtcccgtgtgtcactaggttatcatgcccaggtacagcagggatggagctccagacccagatgtggcagggatgggagcctgtcaaaagagggcaaggtttgagtcctttggtgccagggcactaggctgctgaagtcagacacagaaagtggggccaggattcagggacaaggcagaaagccatttggcacagctggcaagtcatgggtcagacagacaacagtaggaaggatgtgaggttgagcagctggggctgctctaagtccttcttctcagattgggattggtcctagaggcctgcagcgttagacccacagggtggactcacatggcccccactgtggtgggaggaggagatccaggcaggggaggcacgaggggctggatctctcccctctagcaaaatgccacacagaggccgcatccctccctgtcaagcccctcactgtgggatttgcttggagcaaactcttaatgcctctgagatctaattggagggccagttagactacatgcagaggtgtctgcaaggcctgatcctatattctctattgagggcaatattagtaatgtgaaacatggctctctaaatattttaacttcttattgcttaaaatttctcagtgttggataaaaatgcagaaagtctttgatttacaaacagcagaattacagtttatagtttgagatatacgaaccttcacttgggactccaggttctctgggactcaggcctggctactaacttgctgagccaggggctctctctggccttggagattcctcttccagcacagagggctgatggtctggaaggtccattcacccctgccatcctaaggtgctaggacatttgccccaattacacaactacaccgatgcttcaggttaagattctcatttttctcccagttctcagtagtgacgctaaaacctgtatgtatactaatgctatagctaatgctaatattaacattactgctatttagtgacagtggccactatcacttaaatgaatgcttactgccctaatacctaagtgttttacatgtgctaacttaatccccacaaaatccccatgagatatggattattattttcatagtgtagaggagggaagtgaggcacagaaagattaagagacttgtctaaggtcacacagctagcaaacagtgaggctgagagtccaacctctgaggtcagtgctcttcagcatgaagccttactgcacatgggttttttatgatgtagtagaatattggagagaaagtcagggccaggtggggtgctagggttgtagtggcaccacactgtatggatttctgaactgaagatgctgagcagggaacataaaggactcagcggagaagaagacaggctcagtacatgggctctagagccaactgggcgtggcttccaatgttggctctgctattacaagccctatgaccatggcccagattacttaaattctcagtagctcagttttcattgcttaaaacaagggtgataaagtccctatatcatagggtctgccagagatttaaaggtgttactacctataaaacattccaaatagaatatccttggtaaatgttaggtgttagtactgaacgcatgctatgagccagacatcgggcttctgggtattttatctcatttaatcttccaaacaacctggcagggtggaattagtgaccccacatcagaggggaggaagttgagtctcaccagcccaaggtcccatgttctcactttcccaaggacttgaatccaggctctctccctctaacccaagctgttcccgctgcaccacagcatcctctgctaatgctttctgtgatggacaactaggaacaagctcaagctacaaagcaaacagagatcgtaattcatttttgaaatcaataaagggatgatcaagtggcagaggaggagttgttagctgctcatcaggatgatgtgagaagtcgttgcctgcatcctgaattgaatcacctagttgctttatcatcataaacattcatttcaacgcggggagggatttttaaaaaaccaacatgaataatatataatggctgacattttggaggaagcaggatctttgccttcttctatcttccatcaggtaatttatcattgtctttctttcctttttttttttttttaaactgatggggtaccctgtcagctcagcttgttctgaaaatgcaggagtataattcaataataaatttgctcagaggccagctgtcaggaagttggtgtttatttgaagtccattagatgatctctgctgctcgccctcttgagggcttcctgaaggctgtctaaagcctgggtggaggtgtggggtggggagcaaatgctcttctgaaactgctatgccactgacgcttgcatatggctttaggttcacagtgggctgataaaaaatcacattgcatacatggtcatttctcttttccatcatttttcactcttgaaaactcttgcttttaaaattcctggaagctttgtgcctttctatagggtgtgaatggaattctaagacttaggtggaatcaaggttatttcactcctgtttagagccagttttaggtcctgattgagatgaaatgctggaacttggttagtgaacgggtgagggtcagatctttctcagttcctgcccctaacccacttttctggcctcatagttccctatgttcctctttctcccacatgccccctttgctcaccatgctcatataccacagatttcctaagcccatcttgatttcaaatgtcagagcacgtcttctgacctttgatgtggaaaataatgtcaccataattatcctccagacacattaaaattttctccattctctgattgtcctggaaagttatgctgttgctcacactggttctgcagtatagaatgctttctacaatcctgttcaactgaaacccacagtaagcaatacagcttatccagtagttcatgcatacacatacacatgtaactgaaataagtttcatgaaatacatattctttttacagtgatgcactgatattttctatttccttctactccattccagttaaatttacttctctttttgaaaagaatagtttcgacctgctgaattgatttcataaggtactaatgggtttgttgtgacctgcaatttgataaatgatgctctaatggccaagtctcccgactgaaatttttgtctcaggctgaaggccatctcctgccagaagtcttcatttgttcatttgttttcaacagcaaacttttaatattgtctactctaagcccgccctgtgttacatgctggagaagcaaagctgtaggagaggcagctctcatggtgtaggctcagggggcagacgtgcagtgagagtgatggtcttgcctttgagctcacagagcacttttgtctctacttctcttcaggcactcagcagggactggctaattcattgatttattctatcattcactgtggttcactctgtgccaattcctttgggttcaatgacaaacaaggcatgggacccacaaagagcccccaaagtaatggggtgagatatcttcttattccacacctagtacagagtaggtgctggtcaatatttaccaaatgaggcttgtgtgtgtgtgtgtgtgtgtgtgtgtgtgtctgtgtgtctgtgttttgagacagggtctggctctgtcacccaggctggagtgcaatggagtgatctctgctctctgcaacctctgcctcctgggttcaagtgattctcccacctcagcttcctgagtagcatggaccacaggcgtgcaccaccacacctggctaattttttgtatttttcatagagacggggttttgccacattgcccaggctggtcttgaacttctgaactcaagcgatccatctgcctcggcctcccaaaatgctgggattacaggcgtgagccagcatgcttgggcagcttgtgtgtttttctctgctctgtccctcgctaagcctgcccagtctctcctcctcataggctctgaccctctgtataggatacgattctctgcctcctttggggtaaattctctggtcacccatccttccttttgctaaagtcccctgacttcttgagccttttctcttggggctcagtgtctcctgtcagctgagtcttgtagctccctgtccacgaccatctattgcctgatggagccaataacctattagaattagaggaacccagcaagatttgccatcacatgatttctcaaattcccttcctcaaataatgattcaacaatctaaacctgcctcctctctgggtggttgtaatactgtgtcctcaaacctattctgaatctatatttgaataacctgggggtggttcgtcagaacctcttcctgtaacttgctaacctgtccagcatcggcaacctgtaactattcactgaggggatatctgacccacatccagccctttcagtcagaggagtcctccccaagagcacagatgcacccaacaacgggaaacagctctggctcgagtgcttgcccaggagatgtctcacgttgccctccctttcccagctctctgatcccaaaccccacagtgtgtgtcctggactctttgtattgacagtgcagttggaggtcctgcagacctcagagctcctcctctcctaagtgtcaatagtggacacccttcactgtattctccccatgactccatgggagggacaagtattccactaggcagatgggacccgggcatccaggccaggagagaatggtggtattcaaaccacttaatctggtgacagtggttcccatgcctactctgtcccctcctactttaggtcatctctgtcactctccatcacagctctgtcactttctgtgggtttgaggacagcagtggcaggatgtcagatagagctactgtattcattaaacctgcattaaacacctgctctggacccagcactgtgcggggccctggggacacagatgaaccagagagggcccctcagggaggccttcatcactccaggagatggggtctggcctctgaggaagtgagtcttggggagagccctgggtgctggggactggcttgcttgctttcacacccaaggtaggccagttggctccaagccctgggcttgaattcccctccctcctctggtcccagcagctgaggtcccagtgtgcctcatacttgaggctccctgaggctgacccagctgggaatctgcagagagaaggagctccactctgaggcctgcctttccttgctggtctcagaaatgctgttgggttctgggtgacaacctgcttcctggaggctgttaaatgaaatctcaaactacaaattgtggcacagcacatggggtgcaggagaatatggggttttgttggttggacacaggcctaattgtcatacacaggcaccaagtcaggtctgcctccccatcagaaattccactctctggagaaacgccactgggctccactctaacaaggatcccaactgacagctggctggcaagaatgcagccttttctcccttcctcaaataatgattcaacagcctaaacctgcctcctctctgggtggtcgctggacctggagggcaggttcctctcaagttttactttccattaaggaagtggatttggaaactctttttaattaacatcatcatcaccgccatgtaattagcaagcaagtttttgtgtggcaggtactaggttgagactttatgtactttttgttcccatttaattctcatagcaatccctagacacatagacgttaacaccctaatcttacagatgagcaagttggagctcatataagtgaacaatttaggaattttcctaaggttacaaaactggaaagtggatgcaacagccttttaatcttggtctgtcagattcccaggcttgtgctattttcactatgatatgcggctgctacaaaagccaccatttactgatcacctaatatgtaccaagccctgggccaggtgctttattttagtttatcctttcaacagctttcatgaaagagtaccattattgccaatttataactagagccacctacacaaaggttaaatcatttccctgaggtcacacacagctagtgggaggtaaagccaggattgtaactctgggcacttgctattataccaaactccctcatatgagaggacagaaagcaactacttaaactgggtagttgatttcactttatcccagctgtgcaaataagcactgtcctactggtccagaccaagatcatcgaataccaagtagttagtctaatgagaaaagcatctgctgcctcatgtttctacatttctagtcacttgggcatattttacacaggaatctgtttgggggtccttcctgatagctgtttcttctgaatctagatcagtgaagagctggtacataatgattctggcaaatgttaggtaaaaggaatttttacagtaactttttttttttttttaaagagacagtaacattttggaagcttccattatctattcatttgtagagcaaatactatatccctggccctggccaaagtattacaggtttggagagatgaatggtctctgttttcaaagtgtatataaccaactgaaggtgacagatatataaacaatgatctgcaaagttgacttcttctgcttctgtgactaatctgcaatgtgatttttagcaggtgatttaacttctctggactctgaatcctcagtataaaattaggtaaaatagataatatgtccatccttcctccctccctcagttcttccatttctttattcttcaaggcaatttatatgtatatgttttcagcaactactaagtgctaaaatgtgtaagatgaagtgtttccctggaggacttggtttacaggggttgacagacatttacaggatgcactctattaagctgcttgtccagagctatgtatctagagcggcagagccaggatctgaagaccaagctggcctctctctgaggcctgtgtcttccctactgctgaggggtccattttccccagcacaggcttctcaaactccatacttggctggctccttgaggccagtcagacttgctggagcaacaataccgagacctgtgtgcaggtcccacagtggctcatggcgcttaagcagcaggctcaggaagtgaccaggaggacatacaggagacgtgtccctgctggcattgatcaggctggcatggcaagggcatccagtaagcagaacagccataggcagccaacaagccatggccctaattggatccaataatgggccccgtaaagaatgactgagcaagtgacaatttccttggtaggaatattagctatatctctagtggattaaaaaaactcacactgtgggaaggcctacaagcatacatacaaaatcacacaactgaagaaaatagcaggaagcttcccacccagagacagaagcagcatttctggccaagataaatgaataggttttctcctcactccggctctgccacttgactagccttgtgaatttgggaaagttacttaacctctcagcttctcagtactccgggggtaagttggagggttcggaccatcaagtagcttcacctctagaaaggtggaggtttgaattctgccacgcacttgctgggcttccttcatctcacctttctcatctcgtcacgactccttgcaaggatgggctagggtggtggaaagtgcaggggctccttcccgagtctgacagacctgcatgtctgcatcccgctccgtcatgttccagcagtgaggacttctctttggcttcccttgtcaccctctggggatgacagcagctgcctcacagggaggctccccatggcttcttcttcagtccctgctcttttctcattacatattccccttgagcaaggtttttttttctccctgagatggggtcttgctctgtcacccaggctggagtgcagtgggacggtcttggctcactgcagcctcaaccttctgggctcaagtgatcctcccacctcagcctcctgagtagctgggagtataggtacctgccaccacacccaactaatttttgttttgtttttttggagagatggggttttgccatgttgaccaggctggtctcgaactcccgggctcaagtgatctgcccgcctgagcctcccagggtgttgggattacaggcatgagccactgcgcccagcctcctcgggcaaccttttgtgtgctcatggtttcaactgcttgttcattgatggctcccaaatcaagaactctaagccctaactctaaatgagctccagaattactaactgcagatagacatttactcgtgggtggcctactgtggtgtgtccctttatcaccttgctcccaccctgctcctgctctctgctcctcagcctggtgaaaataccaccatttacccaggcattcaagcgggagactcctctctgcagcatcccgcagacacaatcagttaccaagtcctgctgatttcccctttaaatagagcttgaaaatgtcccttacccttcctacccccatcactaccccattgttccctcaggacagggaccctctggcacagaaaaatgaacatacgaggtgcacggtgactgctgaattaaccacactgacttttagagaaagttctgcacatatgaggcaccactacgttggaagacattcaaaagaaatgattataaatccctgctcttggatatgctgttcactgccctgatctagggtgcagagattagagagctattttgtgtctctgggtctttgcatgagctcttccttctccctggcacactctctcccttccttgcctagttaaccgtctctcctctttaagacttgattctaaagccctggcctccctcctacccaggagtacatcctctgtgctccacagtaccctggggacaaagttctggcctaatcacactgtaactgtcccttttttgtcttcctagtggactgggagtgaccaacaatcaggaactgtgttctgctcaactctgcaatcccagcaaaggacctgccacagacctccgtataaaattgtccaatggatgacacaactgaaaacagggagattgtatgggtatgtggcctgggatggcagcagatgtacccaccccctgcctagcaaagtcttctggatgtctgctttgagggtgagcagcatcaatgcctttcagttcatctggagaccacaggatcagtaagagctgactgcaaagtgggtattgatccaagattccccttggacctttggtttctcactgtcttcatctgtcacccagtgggagcaacaaaactttgctcataaaaattccaaactccttggagagtagttttataaatgtaggtacctgaggctgcttctctgcctcccccgacattccatcaggaaccatggatgctctcacgttcctggcttcctcccacccccattcatccaaaagaggctctagagtgattcagttctccctcagagagccctggctggagctggggccctcggactcaccctccatcaaaggggttctccccggggattatgtgcgtgctgtccctgcccacgaggaacttgatgcggtcatagaaggagtgtaggttctgctgtgacacagggacctgtgtctcctggatgatgtccagagggttaggggagccaaggcacagcgggttgatatggcacaggggctggaggcagcagtcagggtccatgcagtccaccaggccatctgcaggagtgacagagcatgtggtttatattgctatgttcaatcagccatgtttatccagaatgccttaattcatttcttctctatttttcactcattcaaaaactttattaaatgctgatataagccaaagtctttgctgggcaccaaacagatgcaagtgactcagatgtggtcctagctcactagtctagaaggagagatagacagtaagtgtacagtgtctgtactgtatgtttttccttccatcgagaatagaagagattgtatgtatgaagacccagaagtgagataacacatgaacatttgtgatgctatattcaaatgctgatggccagaaggtgagtggaagagcaccatgtgaggctgctgaggttgacaggggcacaccaggctgggccttgcaggccaagttagggagtttgaatttcaccctcagaacaatgggaatcaccgaaggcttttaagcaggaggtgacttcatctggtgtgcactcctgaaaccaaagggggcctcagtgggagctgggagccagacaggagaagagggcatcgctgaggttgcacaggtgaaaaataaaggttgcttagactgcagtagtaacagtggcaattaagagaagtagatggtattgagagacatttaggaggtaaaactgtaagccctggtgactgcctggctttgggagtgaaggcacagcaattctcagcgtctctcccagcctcagtgtaagcgtgtggcctgcggctgaatcctcggtcctctggaggcctgctctgctttctgtgagaggaggctgcagggatatttgtgctttttgagtttgctggatggtttcagatccctgacagagtttccattagcagggaattctctttaccacatggatgggcttcttcaggactggaacttgtattacagctctactatcttcccaaagtacaaagaaagtccaccagatcacagatttttggcctcattatatcaaagtacttttacaggcacctaatattaatagaccagcttaaaatacataacaaagagataagcaggtagtgtccaaagtggtggacaggaaaagcccaggggtacagtctatgtgctttgtcggcagacaacagtctaacgacatgtattcctgcctgggttcaaattctggctctgctgcgtctcagctgtgtgactttgggaaacttcctcaccaccgtgggagcgcacagatctgttctgtgttccagcacttagtggaagtgcttaaaacataactgctatacaaataaatgaatgggaattgaatgaattaaatagtgaagcaggggttgtgacaaatgccagtccataaaagccagaaaactgtaacttcatcccattgaggtaagcagtgtgctatggtaggaggaccatgatgttcagagactaaagttcaagaccaagtatggcccccaacagtgaccctggacaagttcctgtacttagtctctctgagccacatttcataaataatgtgggagtaacagtgatatacctacttctctagttttctccatggagtttacaatacagaagctgcccaccaaagtactgcaaatgcattggttagacttggtgtccccgatcctccttgctagtggtgtggcctcaggtaagctacttgattgtcctaaaacctagttttttccttaataaattagtaacaaaaagcctttctgtttctctcccatttctgcatggtgcccagaagcttatagtctccttgaaggcagatagtgataaagagtatggattccagagatagactgtctggggtcaaatcctggcactgaaacttactagtgtgtgactttgggcaagttacttaaactctctggcctcagttccccatatctcttaaagggggatcataagagtaagtgtcaaacaagtatttgttatatagataaaaagtgcagcattatgtccccaaatctagcatagtatctgacacatggtatcatagtgcttaattctgggttagtttcccttcctcatcctgaacttagaacatggctcaccaacatgaagagccattcatcctttctctgctcacctgctagattcactctgagatacggaaggaatgcctcccctcaccccagcattgacctgcatcctaacttgtggctcctgtcccagctcccagatacaactgcctagcaaagcacctgtcttctccagcagtcggcagcctccatcacacattctcatgctgcccctgtcagacattgcttaaacacataattacagcccgagctgagggttatttgcattctgctattgatgttagcatgacagattcagctgttgcatccataactctgcagaaatgctccattattcaatcccagtgagcagggacattgaccattaaatcagctagcacaattgaagggccgtgaaaagtcatggctaatttgaaattttattagctctttcctggtcttgtttaccaccaaagcagtccctggaagcctgtgttttacccttttataaacattcagctctgtggcacctggaaagagctgcttcctgtgagaagggatgtctgctctctagtcctgggggaaggttagccaggaatgatagctgttcttattaatatctatattacagtgatggcgatgatgatgatgaattgccacatttattgagtgccaggcattctgctaaatatattacaaggaatgcatcattgaatcctctatgaagtagccactgttgtcactctcattttagagaaaaggaaccagaggctcaaagtggtaaagcaacttggtaaaggtcatgtagtcagtgaagaagctgactcggaatctgaactcagttctttctgaggcatataatgttctttaagctctggagagacttttaggaactatttcttaagcagagaacatgaatttctgaatcttagtgaaacactactcttctgtgcctcttccagcctcttggacaacttccatcacagtacgtctctttccaatattgtaattttgattttctctccgtcccctgacccccatactctgcaacccaaacgatgacctcctagagatcaggggttgtctgattcatttcattatcccagggcccagacctgggcaggaacagtgactgtactccacagaggtttgagggatgaataaatgactgacccaggtcaggcctgtcccactaatccagcatccacgtcacaggacaacagaggtcgacggagccttttattctgtgatcggtggccatatggtgcttaagagagccctctctccaggcaaactacctggatttggaccccagttcccaattctcatgcaaactgtgtgacttggtccaagttgcttaacttctctaaacctcagtttcttcatatgcacaataggggagaaaaagaaggatggttaattccttagactcaccaatctgtctctacagccaagcgtgaagcacaaaacttcccttggatgtcttgtgacaatgagacaaacattttctagagaggaacttttagactgagactctgactgcaagcatgggacccagcatgtatgcctgctccacataggaactgataggccacaccatggccgtttaattagtatttgtgtctctcattagttctgcaaagtttggttttgagctctttgaatatcctcctctccctttctctctagtcttcaggaaattaactactaaatgcttagaggatcttctagctttcatgtcactcaacctcttccttaatttccatctttttatccgcgttctatcctgatttgtttcttcaaatctctattctacttcacttattttcccatcatttgtgtctggtctgctgtttaatttgttcttcgggtcataaattatcttactttaaaatttctgaataggctatttggaatttttcaaaatccacctgtttctttcttgatattgtcttgttctatggtttttatatatcgttttctctctttagtcatttaaaagtgtattcattttatagcctttttcagactgttaagttctcgggagtggtcatccttctgcatgttgtagttgttgattctagctcatggtcaatcatttcctacgtgttctatgattctgttaattctcggaaggcttgccttcctatgggaatcttgtatggttgaactaaccctccagggtggttttcttttttttctttttcttttttttttgagacgttgtctcgctctgttgcccaggctggagtgcagtggcgtgatctcggctcactgcaagctccgcctcccgggttcccaccattctcctgcctcagcctcccgtgtagctgggactacaggcacctgccaccacacccagctaatttattgtatttttagtagagacagggtttcaccgtgttagccaggatggtctcgatctcctgacctcgtgatccacctgcctcggcctcccaaagtgctgggattacaggcgtgagccactgtgcctggcccagggtggttttctgattacgtcagctggccacctcaagggtaccatttgtctgggaccacttttcaggttgatttcttaggttggggttctaggactgctctagtatgtgagtttagatttcaaggtcttttgaggtataggcttggtctcttagcacacccccccagccccgacaagccatggcagagaaatgcctccatgtcatccttctggtctagtaggcactgttttttttagtccttttctcacatgacttgcagcctttgaggatcccagctttatgcagggcctcagttccaacctcccactgtggatgtgccctgtctgctgactctgaaattattctgttctgagtctccctggcgctgatgatcctgcacgtctcccaggcctgctgtagcttgggctcctgtgcccactgctctggcccatcagcttcatcttgtttctagaatccagggctcccttgtctcccttttcttctttgctcaattttatacacgaacagttgtaccctgtcatcagagaatctctgtatgacctagttggccattttgctgaaaataagagttccagcaagagctctgagcctcagttctctgatctgtaaaatgaatcatcaaacttacttcatagagttgctgtgaggatgaggcgagatcatggatgtgaggcacttagcacgataactagcaactaagcaagtacttggcaaatggtagttacttaaattagctcctgcccaggagcctcccttgaaccacattctggtaacaggccctatactggcccctccctacacgcacattacatgacaaccctttctggataatgcagtttggccttagagaactgaagtggataaacatggtcatagcaatgcactgtaaattagggtagtagaggcctctggggatttgcagattggggtcctctgcaatggaaatatcacaaactgtgctcttatgagaggctctggcactgtggaatgtcttactccatgcttcccaggtgggagtgattaatgcctataccttcctgtggtgatgcttcctaatcatttatttaacaaatatttgctgagtagtaactgcggacaaaacttccaccaatggaggcaatcctgtataaatgagacacacaaatgagtagggcttacagcattcttttcaaaggctgcagtttacaagaccagcttctgagtaaaaccctctttttattttcaaatgtagcatatggtggcctgaaacagtgcatatggctgttctacagtgagggggaatggctcccaatttaattttcttaggcatagatgacaaattttagaagattctcattaaaaggaaaaaaaagcgtgctgtagggacagaaatgtaatttttgggatagactagaaacatattaatacacagtttgggggattctctggtttttgggtggcttggaaacatttatagtttccaaatacttcatatctcacttaattatatatcatacgtaagttggttgacttataaattctctgtgttttgtatatttgctatccccattcagagaccctcattatcacagcagaaaaagaaatcaggaaagcagagggtttgcttctatgtccttcaaattttctgtaaaaccctcctaaaccccagcttttgggaaataacttttttcccggaaatttcatttttcctcatagttctaaacacacacccccttttacatggtgacagtgaaaagaggcagaagaaaatgtcaaaaaggccaggcaggccctggacgctagggatgcagccatgctgcactcgagtggcccctgatggggagtggagggcaaagaaaagggggaaaaaaagaaggggggccagcatctgggggcactcaatgaaacaatccaaagtggttcacatattcctgacccttgaacttgaagctctgtggtgctcacatgctgctggtgcatggagggctggcttctgctaacgttttcatctatgtgctctggctggaggatgaaggccctgccatactctcactgagatccctctttgatgcctgccttgcaggtagttgtcaaatgacccggagaacgagggaaaggggtgtgtgggagaaagaaatccaagctagatgcctgaagacctagcctctcccctgtatctgcccctctctggccatgagaccttgggcacacccttcctatgcccgagacgcaatttgctcctgtgaaaccaggatactaggctctgccaacctctcaggattgctgaagggctccagagtctaaaagagtgaacgagtaagtcaacaaaagaaatttgagtgtctttcccatgctggtagctgttctctggagctccctctggagacaggggctgggctcagacataggccaagtgaacaattgcagtcctgactagaagtggcttcctgtttgttgtgtgaccttaatggtggccagtgactggtgggcccttgggcccctcatttccctttcttgtgtctgcgtccttatcagggaggccaagagtacatggggcagtctcaaggctgtgggcctgtctgatggccacctcctggcctttacacaccagagacccattttccctggtggccagcttgctgtgactttcacaggaagtaaaaggtatgcaggagcgtgctattaaagatgggggcaaggccaaccttctcacctttacaaataaggacactggggctcaggttatgtaatttccctgacatcgtaccgctagttaaagagcagaactgggaatttggtccattatctttctgtacatcgagctgttaggcacaattccacagtggacaactctttacagcaatgctctggattttctggcttccaagccctgtcgcctctccacgtggggcagaaattgacttgtttatttctgtatctcaaatgcacagcacagtgctttgcacacagtaagcatcacaatggttgaatgaatgaataaatgcatgcatttttttatgtaagaatctcaaattagacagctccatcagcttgacagggcccatcaagggccatggggtgtggtggaagccattccctacaggaggagctcatccctctccttagaaaagagacacagggaacatgcctgttaacgttcacttagtacccattatgtggctggcaggacctgtgttaggcactggatgctcaggaataaaagagtcacgcctctaaaggatttggtgtagtggggcagacagagacaattgagtgctggagaagaaggaagtagaaggggctgtggaagcccaaaggtgggaccccaactcaggctgggggctggattatttcctggaagacagaatgcttaaactgaatctggaaggatgggcaaggataaaaaggagaatgggggtgtgggcgggggcaaggtggggcaatccgtggcctagtaaactctttgtactgtagttgtttgcatggttccttaacctcacagccccatggacagtgtatagcaagcccatcagtctttttgcaggcttaactcttccttggcttgacgacccattagccaaccatatctcgctcttgtctgcagtctggccacagaactgttttacaatagtatctgaggaggccctgggggtggaaggtggaatgtgtctccccttctgtacacactggggagaagattttgtcatttgctataataaattctgtgccttctttcaaaaggcttgcaaagtctttatcttcccgttagaacacaagatttttaaaggtcaatttctctcttgtctcttatcatgagaaatgtggtttagagatagtttgaagggtgaccaaattctttggctttatgtgaactctcccttccagcaataagagatgaggaggaaaagagaagacagagacctttgttctcagttttcctgaaatttctccttctaggttgcatatatcaattatctattgcaacccatgattgttttttcatgggaacaagagcaccaaaagagattatcataccttgaagctgcttaaagatcctttatcagaagaggactggttgcttaaaatccagtggagtttttatcctggaggctttttaaaaagcataggttccaatctaatcctagctctcccgctgagccactgtgtgactttgggcaaatcatttcagttctctgagccttagtttccctgtatgtaaatgtgtgccttgcaactttgttgtaaaggctggagatgatgtacgcagagcgtctagcacagtgcctggcactcaggaatgtgctcaaaaatggctgctgttttcctttatgtacgtttggattcttttctagcaaagagcgtgtaacagtttggaatacagactttaacacagaaaatgaaaaagatgaaaacatattatatagagaaatataccataatcttaaatgaaaaaatagaatgtaaaattttatagaggacataattccaatttttaaaaatatttacaaatacatattttataataaatatcatgtttctgtgattgcaggtggagagaagcaggagaaacaactgatatctgtagttgataaactaagtcttagagaagttaagtacatcactcaaggtcacacagtgagcaaatcagggagccaggagttgaatccagataatctgggtacagatcttgtacttttaatcattgtgctatgttgcctctcagggcctttcaatatataacctgtgatccttatagcagccctgcaaggtgggcattattatcctcattttacagtgacttagcatctttggggcatggtgtcaccatctttgaaatgggcatgaataaacatccctataagaggataaaatcagaagatgcatgtgtctgtacctaataaggggcttctcaaagcacacagtatgaatggggtacaccttctttgtcaagtggggcacatagagacttcactttgagtaggtgagttagggcccctctgcttgtctaccttctggtccctctcaggagccagtgcccaaggtgagagcatcaggagactggcagtcatcgagtcacgtgagggatcttgtttccatttttaaatctagccaacaaccatacatgaaaataaaaacaaactaataaagctgctccctggctcagtcatactgttcggctcccccaattttttttttttttttgacagagtcctcctctgttgccctggctggagcgcagaggcacaatctcagctcactgaaacctccgcctcccaaattaaagtgattctcgtgcctcagcctcctaggtagctgggattacaggtgcgccccaccaagcccagctaattttttgcatttttagtacagatggggtttcgccatgttggccagactggtctcaaactcctggcctcaagtgatccacccgcctcagcctcccaaagtgtagcttttttctttttgtctcatagtttaaaaacactgctgtagcattctttatgaaacttgaaattcaagtttaatttaaaatatgttgttttaaacccagcaaattgggaaagaagagtaacccggagatcttagataacttgaagggctacagggatctacaatgggccatatgtcagaggtctggacacagtgagaagctctaatgtcgccaagacctcacatactctggcagtttctgcgaccggccagctgtgtgacttctgcgaaataatcgctaagcttccttttccttatcatgagggaatagtaagtggataataaggccacattcctcacagtgttgctggatggatgcacaattgctttgcaaactgtaaagtgacatacaagttattacgctctcgtaagccttgtggtactgctgcagcctatttaaatctgagtaagtactcacactacacttctaggtggaggataaatcactaggagaaggcagaagtgctctaggttcacaaggccatgtggaatggctgaagagtctagtccaggccatgtaatgactttctctgtgattatgatgtgtgtgatgtcacctctcctctctgggctccagttgtcctgtctgtaaacatgcaggagagggagttaaagtcaatgttctctgatgtccctttcaatcctgttactcaacattaaactctgttaatttcttctccaagacttgagtcatatcatctaagaacaaccactagtgagactctaacacaatttccctccagcctgaatgatttatcttggattatgctgtataccctgtcatggctgaaataaaggcacttatttaattctgcttccattagattgagtcatctggatgacaatttcttacaaatgactgtgagcttcttgagggagaaagactgggccatgttcactggtctttatgtctccttggaaaggagcatggtgccttgtagatagcatgagccctacaaaggtgtgcttggctgaactgaaagtagcccaatgcaaatatggtttactcttgtgctcctttcttcctctctccctccactaaaactgcccccgtttggccaaggcacagagtaatagaggccaatgaggataacccttactaccctggcacttggggacagtccactctctatggttgtttcatctatgccatcctgcaaagcaggggtcctcagcaccttccccttggctcccgcagtgggtggacagcccactgaactgagagggccctgaggtgagacgtttcctcatttaatagttgagaacccaaggtcaaggaccctcaacaatttggccttcccagctggttctatttccaaccatgatgacccacgggatgtcttcccggctgttctgaaagtcccatgggacagaaaccacatcacagttcccagtagggcacccaggcatctgatatcagttgaatgagtggatgctcctttatcctggcaattgtcccactgcattgcaattacttgctgtttctctctctctctagattgtgaccttcacaagggtagggactgtgtcttatttatcgctgaagccccagtaccctggacagggcctgataacaatgtagacacttggttaacattggttgagtgagtgaataaactacgtgcaagctcatttcagcccataacatgctccaaaaatgcaagtggcatattctcccacaactggggattttctggttgatcttttccacttcctactggctcatctctcagaacagctgaaggaggctctattcccctggggtctgcatcagccccatttcctatgacaagaacctctctctccccccgagctgtgggctttgggctatggtatgcctatgccccatgttaccactggtgcattctagtgctaggagggctggctctgaagtatggcaaacaaaggatacacttgaattgcatttcatgggagagaatcaatgagccttgttctataacctacgcttgtatgtataccggtagggagagaggtacgccctttccccacatttcctaaagacatgcagtcattttgctgcccagatgttcaacagctgtttaaaggctttggccaagacttttgacttgtgagaagggaatggtggctcttctcttcttttcttctattacatgagtgttattattagtcattggaattgtgcctacacaggcaaactgaaggggaatgctgaggaaatcatgcagataatgtaggctgacatctctttcctacgaagagcaaatataaatacactttgccttgtctgaagacatgggtgcttagtgcccttccctgctttgtcctggcttggcccataatgatgtctctgaatagagagccctttcctttccgggaaaccgctacccatccaagtgtcaccttctgatgaatgctttcctactcccacaacaactaatatataactctacaacagcacttatcacagtttattagcacttaactttgggtctttctccctcatttgaggtcctggcatatagggagaggacttccttatctctatgcctggtatagggcccaactctaaaataagaactctggatatttatggagcacaaaaattaatgaactccacaagttttagatcgattaagggatatttcaatcctccaagacctcaggagaacataggccttctgtttctgcctagctactgtggccagccccataagctccctgttgacaattgctccactgggcccaggcctgggtacatcaggcccaattacctcctggatttaggcagcaggtggaagggctgaaagccggctggctcaaagaacagtgctccgaaacagccctttctaggctgctgaaacccactcaaggcaaataaaccacagaaatcacaacatcacacacttggccttttaattcttatggtgctttggggtttgagaatccctctaaatagaaaattcccaaaggttaggatgctgagtttctgacctattgatttcctaccctgtgcaacatattagaaagtcctttggtataaatattagggagccacatagacttgttgggactaagccaattgttaggccatcactaggaagaaagggttaactgttttgatgttttttcatatctttatctttttattctcctaataaccacctgtgagtgggagaatcaggaaggattgatgtatcttccaagtgggaaagtagaacacattatggttgtatttacccaagtgaatgcaacagaaaaatgaaggctaattctacgactaagataaggactgaaatggtactcatgggccagctgcctcattttataaatagggagagtgaggctcagagccaccaaacagcatgtgtaaggatgcacagggagtcaaagccagaactagaattagaacccaggtcttcactctcagctaatgaatgttctaaaagatgagcacctccttccttgggctttgactgtctagcactttaaaaaaacccaaagcaaaggccatttctattacaaaaggtgtctgctggtgtgcagtgagggtaacctccagaatcagaggagaagagaccttgaccaaaggtaactcaacctccttccctgggagaagcgtccctctgcagcttctgtgataaagaattagatggtctcttcttatccatctccagtgagggggacccataactttgccagacatctcatcctactgttgaattgttagaaacctctttcttccatatgccttctcttctatagtggctgctggatatcaattactttcatttacattagttaatttcaattgattcaaatggaacacctgtgatatgcactcatccctaagccacatgtgcagttttttgcttgccccgcaggtccccctgactggatgactggtgtgttggtggcctgttagctcagtaatatccattctccactctgggcctcccaccctctggagccgcctggagcccatgggtgccagagccctacctccatcattgtctttgctgtcaccgcaggcagtctccatggaagtgtcacagccagctcctctccagcccagctggcagacgcagtgccaaccattcaggtctaaggtacatctgccgttgccattgcacaacccagggcaaccctctgaaagacaaagtacagggttgaggtctgatcacccagagtcaactgccatcacacacactaacacgctacctgccaacttgcaaaatgccttcatatccatcagcacacgaatgcccacagcagcccagggaggtaggtatcattaggaattgccactttacagagaaggcaactgaggctcagagaggtgaaaggacttgccagggtcgcacagtcagaagcggcagggacagggctgaaacccacaccttctgcatctaaaagcccctctttcaaaagtgaccgggattctggagccggagtcagtggatgttggcctatcagaatctaaccaatggagctttttgcctgatccttgcttcttgttcattctcatgtgttcctcttatctctggcggctgtttagcacaaaggaaacatctttctgtttattccttgcttccttcatcacttctgggtatcattctaaagggtgttactttttccaactcttgtagtaggtcaattttattggaccctaggcttttcatttattttgtcttattttctcctaaacaactgtctttgctttgaggaagagggcttggggctttttcttaacatcttgtctacagctacacttagaaaagggccctgcacccagaggagctgtgatcgccattgtgaaacactaactagggctgtctgtgagtgcaacgcaggtacagccaggctgctctgctctcattacgctcatatgcacatctgcctgcctgtctgtcatttattaagcatcttctttgggctagcactggaggtacagaaatgaataagacccgttcttattcatgaggtgcatgaagcctatcaaaggagacaaatttatgtaggcaaaaaatttaactgctaaatgccctaaaggagacgtacaaaatatggtgggaacttaacacaggtgtggccatctgagagggctgtagatgatttgatcaagaagggtcaggcaatatttagatgctgtgttcgttctgcttggaccatattataaagtggggaagtttttaaaaaatactattaaagtagatttgcaggttttttgattgccacatctttaaacctctccgagtttgtggctcagaaatctacgtttgagaatatgttaaattacgtggttcacttcagcttctattgtgccacttggttttcactcaagtccttatattaacaatcctgccaacccccttctccaaggggctatcaaaaaccacctgtcactggcaagagttccatctcctctctgctgctgctcagtcttgggagaggtatggatgtgaaagcactgtgtcagctataaagcttcatttgttttattattatgagcagcaaagtgctctaaatatggccacaaactggatcttctgccatgaattaatgggaaattgactcattattcttaaatgggacaacaaatgtgaaagtggctgtccagtacaagacctgggccaagatagccactcactaaatggctgatcaatcagaatctaaaacttgagtgttcccaggacttttgatagttgactgttattccaaagtaaaagaaaataacatgtttatttccacttgagatgttccacacaacaaccaagcaatttggccactgtgttttccattcaaaggaagaaacatgtaacaattgtgtactccagcctcggagggattcctccagaagttagaagtgtatgtagactatgggtttctgtatagcagaagcctgctgggaaagatgagaggctaccagcatggccaccccaaaaagtgattgagaaagaagttttaaaagcgagccccaggagcagagctgtgacacacaggcggctatccaggcaatctgacttggttgccaacatcagccaccattagtgatctaagcaatcacagctttcttttttcctcaattagtctcatgtcaatttttgtccgtccagccgggacttgttttcaattaagcctggtttgtatttggaattagtcctggaggaagtagggtctgatctttaacaacggtagctgactgctttcttttgctgtaagataaagcctcttgtaagatgcaaacagtatctcttacgtaagagcacaagcttgagaggcatatcaaagtttgcctgtaccactcagtggctgtatgactcaggcatgttattgaatttctttgagcctcagtctttttacttataaaatggggttttgggggcggttaagtaaggtatgcatgatgcacaaagcctggcatacagctcaaagacaatatctgaatcttctactcacctttaccttctctctattttgggcagagggcatataatatcatatgttgtacccacaacctcaggtggggctcacagaaaggcaaaataggaaactgaggcagttatctagatcagagtcagcaaacttgttctgtaaagacccagagaataaatagtttaggcctgtgagccatatggtctcttgcaattactcaactctgccgttatagcttgaaagcagccatacacacttttaaatgaataagcatggctgtgctccaactaacttgatttacaaaaataggtgatgggcccgatttggtctgtgggctgtaatttgccaacctctggtttagatgcttcaggacagtgagacaatgacagctgccacatactgagggtctactaggactggccactgtgctaggcactttatatagatttctaaaataagtaactttttgttaaaaatgttcagatcttgattttctagggcagatccaattttacaccatttaatcctaaatttttagtaaaagccatgtgttgtaatagagcgaggactttggaggtggacaaacctcagttcaaatcctagcaccatcattttacttactacctgtgttacaactggcaaattacttcactctaagcttcagttttctcatctgtaaaatggagataatacctgattcaaagagtatgtgagagtattaaatgagataatatatatcaattatttatcacagtgggtaacatacatagggattcaataaatgagagctgttattattattattggatttacttgttttaagtttgtataacttcactaagaaattcataaacaagaaaataaacctttgccagcccaacttgtgtaacgtttaggtcaaaagctatggtccttataaataaatccttgccaaaaacggtcaagacaaacactgggcttgcctcatggctccgtgaacatgcagtgcagtgggaggcggcatgatgggttcagggctgcgagtcccagtgcaggccaccattcatgctttcctagcatattgtacttctctcaatagcaactgtcccaaggatactgaaatgatcaattctgcaattagtttcattgtcttacttcttccgttagaatgtaccagtgcctgcatgtagcagacactcaatatatatttgttaaaataaatcaatgagagggacaagaggcctgcgttctggcctaatatggggggagttgggaaagttactttctctctttgggcctcagtttccccatttataaaataaggatttggatgagatgatccattaggtccttccagcataactgacccaatagagaaggtcaaaacaacgtcaagttagttgattctgttcttaaattcaataaactttactcagtacctggtggatgctggactttgtgttaattcacagagatgagatatatcatctgccctaaaaaattttacattctctttatttataccatactttgttccaggaagggtttaaaataggtcttataatcacaaaccatacttctgaaagtgaaccttgtgaaatagtagttctatgaggtcctcaagaagaagctcctgcagtcaaataagtttggaaaacgttgcatcctatattcttattgtagaaagtcacactgaatatcaatatattaaaggctccaagaagtcttagaataaagaaagctgcttattcgattactagagcattatccaatttgacctcagaactctttaccccacccagtaacctgtgtaatattccattccatggaaccccctctgggaagccctgctctagtgaactcctgtaggcacatggcatcttgggcacatagtccatgctgctctgaggctgcctgaaaatatcatcaccagacctttagtgggattgggtcaatgaatcattgaggtgccagtttggaagatgtgaagcaggtgttctcagggagggttagctctagatgtggaatcacagagaatcacaaatgtggaaatccacagtcaatttcttcaaatggaccaagtgataccctgaagatctgcagtatcctataagtttcagagggactttgagtacctgtgggtggaacaaggtttgctttcatccagccatttgcttccaggataatcacacccccattagccagcatgaggaaggctcttccaggatgacttgctgactttcttaaagcaatatgcccgtccttacccactgaggctagttccgcaaaccctgaaactcatcaataattcagacagcccacgtgacattaataatcccttcggaaagactcacaccaggcatttgctagagtcaaagtaatgtaattttaaagtttagagaagggctaacaaagcttttcaaaagaaatgatgccctttaaatgacaagggaccactttatcttcaatctcctgcttaggcctatgaagaagtcccccttgcagctagcaccaggtatgattagaagactttcagaatccttgaaggtatttattttttagttaagtggcatggattctatgcaatacacttatcatatatcaaatggcccatttctttatgtttctcttactggtcctcttgtactttttttctctctccatattcacttccctagacaaagccatcatcatctcttacctagatgacagcaatagtctgctaatcggtcttcttgttctcaatggtcccccctcaattctcctttcacaatagggccagactgaacttccaaatcacaaatgtgacctagttatcatcttgcttttaaaaaccttcagacgctttcttataccctcatgttaaattccgcaatctataaggccccaacaatccaagttagtggggtggttacttgctaagtggtagcctctggactcccctgtcataaccctcatcacactttgttggaattattggttttagtgtcttctctgctagactgcaggcaccttgagagcagggaccatatctgttatgtggtattcatatttcctaccacttaggagttcagcatatttgttgagtaaacattgtttctttagtctctaccaaagcaactgggaagcaatgaacaaaatccggcccatctttgaacagtaaagtactctactctgacaagacctgagcttccatgacacagatctctgaattatttttttagaattagtatccattataccaaaatatcagccagatgagggcttgggtcagaccttgattttgccaagaaacatttgccttttaaaacaagttatgattcattgacctaatccaactaaagttctggtgatgatattttctgaactgaagagcagagcaggtgatttgagaaagaatataggccacttcccagtaagggtgccagtttggaagatgtggtgtggaggaaaatatactggaaattatggacattctcggtgacttatggtgacagaagatagaatgctgaaacatggataaagtcaggaaatgcagagtcctggttctgctacttattagaagtgtgagccaggatgacccattcaactccctcaacttcagtttcctttttcaattgaatgggtatcattatatctattccctcaaaaaaaaatcacatgactcacctaagactcatggatgtgaaaaaacttcacatagtaggaaaattttccatcaaatagatggtaacatgataaaatttagcccaccctgaagagtcctctgctaatgataatgtgtgaaatgcctgtttttaaagaggctaggaagtactactctttcttgctggaatgattttattgtcagttgaggaccagcacatgaaatatgaagacccttgctcttcctccatctgttggatcctatgcgacacctttgctgtatttggcaaagctgtcctagctgaaaagcatttagtcagttatgtttccccaaaaccctttccataagttttaaaacagctgttgctatctcttattaaaagccaatttagccttttcctttacagtttcaaaaattaatttagctaatgaagtccttcttcaaattaagggtgagaataagaataagaatatgatgataaagcagtataattcatacttattgagcataattcctgcctatatactaagcactttgtatttgttacttcacttaatcctcatactagccttatgaggtgggtcctgttagcaagagaagagaagttaaatcacttgcccaaggtcacttagttccctgagtgttgaagctgggattcaaacccaagcagtctgactctagaatatgtgtccctatctgcagagcacacattttgtaccaggtgctgtgttagggcctgagaacaaaaagatgaatatgacatggtatttctcctcaaggagcttagagtcttttcagagcacacatatctgattattctgagacttgttcttagagctatgtggcctatttggaaaatcaggtaccacccaactaatgtaaatgtttaaaatggaaggaattactttgcctctagggaacactcttcaaagacaaaacttaccaaagtcaggccttctctgaaaaggaaaacaaacaaataaacaaacagaccatctgctccctgaggtcagggatctgtttgtccccttgtctccagaccctggcgcaggtgcctagtacacagtgggtgctccatagatgctcgttggacgaatgaacacagtagtactagaaagtagtccttaaaatttcttaacttgctcttgggtctcttcctttctcaggccacccaccctggttgccagcatcttaattctggtggaccaggggccataacagatgggcagggtgacatgagatggggtggaaagagtgaaaggtgtatgtatgtggggcggggggagggaaaaacaaaagtacaatggtattgtcacaaacagatctgagcatcttgtggggagaatgacactccaggtatatcaaccaccttgtgaccgaaaacccatcccctttgggcaatggatgctgcgacaaaactggggatgcattagcttccagacatcatgcttatgtggtgtatatacatttttatatacacatttcttcttttatactcatacacaaacacacacacaaagacaacaggaaaatagaggaaggaagaccatacctttaactaccctatccagatagtgagctagggagataaaagacaggacatttaaggtaggatccagtaagtgcaatatcgcctgccacataaccatgccagatgctacacagacaaagggattgtgccccacgtttgggacaggcctatgccatggtggggaaaataaaaccaaagacaggatgacatgagagaggagaagggagagcaagcattctccagggatggccaaaaggaacttcaactcattctgtgatccaggcatttggaaatgtgatcacagaaacaagaagacatatgaataaggaaaacagacaaagaaggatgggaaactgcaaaagtggccacactcctgctctgccagcttcgtctggctttacggaaaactagagcccgtccctttgactactcagagcagcatccaacctccctacaggtgaagcagccataacaagaacaagtggtaccccatctcggcagaggcctttccaagaagttggaatttagaaatacgcaaaatttgaatcatctctgatatgcactagtgaagggggttgagtctttggtcaaatatactgctggattatctgtttgccattcttgaattttccatgtacacatgtgcccacatatgcttgaatgcaaaatgcttagcgttctaagtaagatgcattcctcctttgtgcatcgtacacagactatgaggtgcaggtcaatggatgtcactgtgaaaaacaagacaaagcaaagaaaatctgaccacttctcaatgcttattaaccctaaagaaagatgtgtgctttgttttccaatggaggggttgtatccaagccttgagttatttggccttctaaagttttgcttatttgaggatgagcatcaaaggttgctctgaaataaaccccactgtgtctatatatgggtgtctggctgtgtgtttagagcagggcaggcctcttaattcccagcatgaatcactaataccatttcacctgccctccctaggctgtagttatagctctttgaggagcttctctttctctgtctctccacacctcctactagtgtgttctgcaaaggccgggtagctgggcagtctcctgaaggatctgatgccttcagccaggctgcactccagccccagctgaatttcacacatgaatcaaaagtccatcagacaggaccggactgcaacggtgtggccttatcaggaatccctagggttctttaaatattcttactctcttcataaaaaaccataaattatattttttcaattctctggatagaacagatattgttgttcatcactatatattagcctcaaagactagtggatgagaggctgtgttcttagttcaggtatccgtgtggtctctggttcaagatgaaatatgcttctggagcctgcacagccaagtggaaaattgggaagaggaaattttaactgaggctacatgcttttcttcattcttacagatgtcgtggagtccatgagatgcaggatacaagataggaacatgaaagagagtacttattaagtaggggtgagtaaacaaagctatggaatgccaaacaatgaaaaatggggacagcccacacgaaaaatggcctaggaaatacctctggctaaagggaaatctttcttgattcttggcttatctgtcactttagtcttagtcaagctaatttatctaattttgcaaagtggtctaaaatttcttatatctcatctcccaggatatgctatcaaagggcatgaatacatagaatcacctggctcttgtggttttgttagctttcttatctgcagaattttttggagggtcccaattataagttcttataataactctgaatccagttatagaagaggtgtagtgagcctagatttttttttcccagggatggctaggctggatgagatgccatcactgggatccaagtggtcatagcttccaccgtgagggagttctctgatgaaaaaaactttcctgattgtctccaaacttaatggtagtatagtggttctggtggtgagtgaagcttatatccattctacaggataatctccccagggccaggggctgacttaagagagctctctctcttctaatgccatttcattttcaagaaccacataaccatgaagagcactattaagtgaaaatatgtttttgatacctttaaaaattcttactaatttctccagaccacaggtaggaaagaaaatcagtggaaatgatggaggcaggctcaggttaccatcagcactgtgagttttcaggagacaaaagtagacattcaaaacttcaaatcctgactccacaaatcaaaagggattcctttgctacaaagagcccccgagccacactgtgaatccaaaagctggtaacagccagttaataccaagtccatgagttttccgggaatggaatggagcttccttgtctctggctattgaaaatgggagtgacaaatgggtctttgaactttactgccatttatttataaaaggcatatgcggaagtccatactgtggttgcttttattgtttgaaaaccttggcacatatgctgttgagtacagttgtttaaaaattcatgattttaaagtaccaacttttagaaaagatgatgcaagctttgcattatgaaaggtggattcaggacttcatcaattcctgcatctttctcttcagaacttcaggatgaagatgatggcagtaggcatcttttctcttgggcaacgcttgtttctttggcattgtacaaatgtttctcatactcctactatgttcctatctctgtgtgaaaagccggagataataaaggtactatagctatttatgctacagactgagcttttggcatgaggttggtctgcacggtcttagctctctttggcctttctctgatcaccaacataaaacttctttccttgacttgcctctaccaacagaggtttccaaaagtttctcttgggataatcttaagaatcttcaggggccccctatccaaagttatggagaacatggcaagaggctttccattcttactctccaggagcctcagggcaactcgaacggctgcatcattggtacatgttaggccacaagaaacaaggatcactacagcaggtgatgggttggcggttctagtcatctgaacttctttcggatgggtgacaaaccaccaaagagatgttcttgctaagctcttggatacatcagtgctcttctctctttggataagtggtcagtgacacccacactgagagaaattcaaagccagattcccaccccaccacgtgtgggctgaagtctcccaggatcatcagcaaattaaacttgtgctctgataacttgaggtagatccctgtacattttctctttctccttgtcagcatctgtcttgtcaaaccacaggtcctgttgtgagtgaatgctttcaggagggataaccatagcgttatcacagggtcctatacctcatgagtgatttgtgggctcttggttaaggattttctgattatgaaaaagaaatctgatagctatcattcaaaagcaaacaaagggccaggtgtggtggctcgtgcctgtagtcccagcactttgggaggctgaagccggtggatcacttgaggtcaggagttgttagagaccagcctggtcaacatggtgaaaccccgtcactactaaaaatacaaaaattaggccaggcgtggtggcttatgcctgtaatcccagtactttgggaggccgaggcaggtggatcacctgaggtcaggagtttgagatcagcgtgaccaacatggagaaactctgtctctactaaaactacaaaattagccaggtgtggtggcgggcgtctgtgatcccggctacttgggaggctgaggcaggagaatcacttgaacccgggaggcagaggttgcggtcagccgaggtcgtgccactgcactccaggatgggcaacaagagtgaaactccatctcaaaaaaacaaaaaacaaaaattagctggtgtggtggtgcacacctatagtcccacctactcgggaggctgaggcagaagaattgcttgaacctgggaggcggaagtttcagtgatccgaggtggtgccactgtactccagcatgcgcaacagagtgagactctgtctttttttttaaaaaaaaaaaaactggacaaagcacggaagattttgtggcttttctttataatttctcttcattgggaagtctggttttactcacacaagtaattgcatcttcagggtatcattttgatctttacccccagaggaagcttttgtttaaaaatcaggacttctaggattggacagctctcctgaagtctggtaaataattctgtatatgtggtatcttgaacaatcacagctttagagtcaagctggaattttattaatgtaatcagaagctggcattttctacaggtgttttctttactttagagacaaggggcactgaggtaaatagaaaaaccatgatagaattgatccaaaatgttagtagtgttttcaaagaaataggaaaaaaattaaacgccttgttaaatttaactacgattttcagctttctcaaaggaaatcagaggtcaagcaccagacttcatggatccataaaactccttgaaaagatccaaaaatatgcacttggtgactctctgtcaatcatatacttgagaaacagatccaaatcaatccatcttagcctgacttctggactaggaaaactgggtttcatatatgcaagtgggagtattagtgccatgtaagtaacagtaaaaatgaagaatccctttttcttcatgagatatttttaggagcaggtgactcacttttgggctgatgggtgtgcagttctgtgggcagtggaggagggggatgaacttctgtcacccttggggacctactccagccactccattctgtgattcatggatagagaaactaaagcctcaggcaactgcgtggtctggccctggtgcttttaccaaagacccttcttcaagatgcaaagagacaggtgattcctaacataaggaattaggattgaatgtgaaatatttttgctgtttgacaaaaatactgtcattgaagaggatgccactgtcaaattccctttcattctgaaaaccaacctctcttgagaagaatcatgtagcttccatgaaagataaggtgagccaaaggctccaaaagaagatatttaattcctactataataatctgctctgggaaatgtcactggggtaaaaaggctcttaacgctggggacttggccataaggggcccagatttgtcttgttctttaaattctgtattcctgctgtaaggtcatcaagccattccttcctgtttacgcaggtcggcagtatgtaaataaacaggccctctttttttgcttccactgcctagaggtctcgaaatcagtgtcatggataccagctctttctctggtatgggaaataactattgcagctaggagctagctacacgataatgacctattgtatgataatgaaatctgataacaagagaaaatttaacactttgaatttctaacttttcacatcagcagtttttttcttttcctaaatgactctcacagggagtaaagttctctggaaacaaggaaatgcttcttgttaccatcaaagactaaaaatggatttccccttctcatttctatttcaacaagaaaaggatgggaccattgtttctctactttgcctcccctcccccttcccttatatcctacagggttattgaagtgttccttcagcacgagggtggtgagtttctcatggggacgcagctggccacgggcagagacccacagagagaaggttaccatgcaggaaaattagacaaggacgaagaaaatgctcaccacacaatgagaggtattaatagaattcccagccaaagtcctttcagctgagccactatgactagtctattgcttcttcaatgtcctatgacatttctttggtatttaggaccgtcaaccttattcttatattgtgcacatttactttgatgtatttcttatctggaggggaaaaggtatctgcatccccaaggtggaatctgttctagaagagcgacaacagagcatacaggggaggtagaagtggatggtttgacttcttggcatcaaaataaaagggacattcttaaggccaggctgatgaatatccagaaaacactgcctgtaaaacagcctgcccacaagccccaacatgagtcatgtgtgactagacgaagggagaggttccctaagatgagatgcgtttatcttataacatttttgtccaacatttgcaaacgttttggagtttggtaagatgagctgaggactctgtaagcaagagacagcaaacagaatgggccctctctgggctctggtttttttgtttctgtttttgttttttttttttgtttttgttttttagataggtgtgggctttcttctgggctgggaggttgaaaggttggttcatcctcagtcatgcagaaaagggaaggtgaggggaaagcagagtttaaagaagaggccccctcagatgaccagggccacttctcactaaggggtttccaggacaagtgtaagggaggatgacaccgatataaagaagccatcaaggtgcacacagtaacatgacgcagcacaacctgcagtggctgccattgtgatggagtggctctgttgagggtggaggctgggcagattaggtgagggactctgagtgcagctgccacgacagggcacagtctccaggagggacaggagcagatgcctcagtggaaaaccaggactttatcgtgcaagggctgcagagtaagcagctggtaaggaaaaatcgagtgtcaaattcctgctctacctctttgaagttccgtgaccttaagcctcaggtccttgaaaatgaggaaataatacatactgcttcacagggtgattgtaaggaggataaaataatgcagctaaagttcttagtgcagctctcggcacgttgtgaatacttaaaaatcagaagccattattattattaatattaataaatgtaaggtattccatggccaaaacccagggatgttgcaggggcagggaccaaggatacaaactaatgttaggcttcaaaacaaaaacaatgaagactgaaaaaaccctcaaggggtaagaggtagctctgtttgctcaaaattcctttgtctctccaaagctgtggggcttgtcttccagtttctctaagacccaagaggtcactttctaagccagaaaggtacctggaatcctgccttctaaagccatgtgctcaccatctgatcacagacccttcatttaaaaaaaaaaccaaaaaacaaaaaacaaaaacggaaggggaagaagctaaaacacacatatatacacaaaccggttgattcaataaagagcttttggtgagtgctcattccaggataataaaccaagcaaaacgtctggctgagtttaaaatcaacaaaaccggcaggaaaggcagaaggaagggaacgaagtgatcagcttgttttcagagctgcttcagcaggagctggtgccgaggagaccccaagggaggggaaaggagacaaatgcagacaggatggaagctgaggacgggggaagatcccaggcctaatggactccagatgtggccttagggcctgtggggagctctccccaggattccagacctcttggggaattctgacctaggagcccagtgggcatggagggctcagagctaagccccagccatcccagcaagataatgcattggataataatggctgcatgtactgggcactccactgtatgccagcctttgctaaggtcttcacatgtattattatccccatcttacgagtgaggaaactgaggctcagaaagttgacggggcttgcccatagctgctaagaagtgctcatctgcctcattcctcaacacagagctccctgacacagatccataccgcatgtagccttggaggagctaaagagcaaggtgtgctaaccagctaaccaggacatgggaaatggaaattgggagtaataaggttgaaaataccaaatcgtgagtttaaatccaaccgatggctaggaaatgccagtcataatacctccagatgaaaggactttcttccccatccccacatgcgatgagggcccaggctggccctgaaatgccccaacagacaaagatgtcctgcagaccagagaaggtacccggggacctcggcccgccataccgatggtgcagtgttcgccattccagccagggctgcactcgcacttgccgtcgcggcaggtcccatgctcggcacagcgcgggtggcaggcccgctggtcgcaggctgcccccatccagccatcctcgcagcggcaggtgccccctacgcacacgccatggccaccacagtcggcagcacagatctctgtggggaggagcagaagaagggaggacaccagggccaggatgggaggcagtggccagaggggcaggggagagaggagagagaaaaacaacaagtattgagcaagttattgttggaaaccaaagtcacacttggctacatacctgggcttctgtgacagatcaggattccagaggctcgcgagactaatctccgtggacaatgaccctcagatgagaacaattctctgggcagaagcctgccctgtgcctgtttccccaccaaaagaggaaggattgtagggctctgctcaatttgcttctccttcttgccaacctgtccctgcctttgtgcttgccccttccaaaggggaccggcattctgaacagacatcaggaaaagtcaaatgtaattaaaaaccagttatgtgtgaaaacaaagtaaggatgagtccccttcgcccaatgaagtgcttgtggtctggctgggcacgtgatgagttctggggcctgcatttcatgacggcctggactctgattgaggttggggtgcgggagggaggctgaaccccaaccccatgagtatactctaggttgttgtccaaaacctgcagtttgttctgagcttttgctgggtttattctctttcagcttcctgcttcctcaccccaactccaagaaccatctaaatggggtttcagatccaaagcaaatggtttggaggggggcccttcatagccagagtggagctgcccacccttcacaaaggcacatctgtgagatggtgcaaaacacacagggcccgattcacaagcccctcaggctccaggccagcaacagcttcatgcttactgcagggagcggtggtaaagtcttccaaaatacaactgctctttaggaaacaggttgagcaaccatgtccactgaagctctctgccagggctctgagggagagagactgacttgattctcatgcctcgtggccccacatgcttcaaattcacatgaaaatctcaatccttttcatttctttcaaactaaattagctggcacctctgtcaaggtgcatttgctcatctcccttccaaactgcatgcttagtttagaagctgctaataatcttagctactttgaaaaagaaaagaaaacaaaattaggtctcagaggctcagaccttcctaccaatctacaagacaatgaataaaatgtttgagaatttaacaaatagtacgagtccccatgtatgttgtgttcctgtgccagacatcctgccaagcacattacctcaaaagggaggtacttattacgtgcagtaacacatcagattcttcagctgtaaagtgggaagggacatctctgacctggagccagggacctggatcctatgccaggctcaggagcttctgagctgtgtgacctggggcaggtcccttgacttcactgagctacggttcctgtctggagagttcctggtcctgtcagacagttccttgtctggagagtgtgagctgcatgatgctgccttgcagcagccctttgctgacctaactgggctctggcgagcacccagtgaagtggatgacaaaaaggcatgacaaagatcaagcaactcaagaaaggtttcctgaattgaggtcagcacagtgaacttcagacagggagtctaggaggtttgtgagatctatacctgctcagccactaatctactgtgtggctttggggaggtcacttcctctcttctgggtgtcagtttcctcatctgttgcaggtggaacctaatggtatttaagatcccttcaggctgtaagaatgtgggattctatgacagagcaccctccctgttagacagtgtaatctacccccaagacctggctgaaaagcaccccctcctctgagaaatctcctgtaattcaccctgtgggttattcacttgtttctttccttcccatttttacatggtagagtggttttctgtttctttgtctgtcttatcatcagactaggaacccgaggctggtctaattcctttgatcacctccatcccgggtaccaagcacagatcctggtatagaatagacctcttactaaggtttgttggatgatggatgaattacggtatgcctggggctataggtgcctgagaatggtaaacattcaccacaccccacttagcctggctgaaaagtccaaccaggcccacctgtctgtttctctctagcgacctgcctgtatgagactgtcccacgtgaggacagggctgcggagctatgtcaagcagccccctaggatgttgttcaagctcttttcctttcttgctcacatagacaaacacttgggcttgcctcaagataaagaatgacaatctccaggccccaggatatcctaggtcctgtctctgtaattcccatttcttctgtacaacattgaaagggcaatgacttcctggtgactctggaggctgggcctggggtcagggctggaactttcccttgagggcccttggagagatgaaaaatcagcttagtatttgtttgggtttactcagcacttttgccaggtggtggtttatggtgtgaaagtaaacagcagaaagcatactattcactgaggtgtgagccaggagaggggcgggctgctggggccaaagccatggtgttttcaggcagcagagcacatggagcccatcagggaccaagagaagaggcaggcttttccccacaatgaacttccagacttcaggtcttagctaaaatgtacttcattcctttattaagtcacctggagacagtacggacaaaagacagtaagacttggaatcagatgtgattccagatctcagttttgcctgctctatgacctactcaatagctgtaagcttccttttcttcctctgcaaagtggcaatgatgatgacaaccacttcagaggcttcttcctaccttatatatagtaggtatcaatcaattcatactaattcatgtattcttctaataatatccacacatgcctactatatgccagagactgtacctggtgctagaaatacagaggtcaataagatataatctctgccccccaggagatctcagtccagataaagcacaaactaatattggcattcaaaagattatccaaataatctatagctatgactcatgcctgcacctttttgctatgtacaatgaattaaagaacatggaacttagggtcagacaagtctgatctgcctatggctttaccacttactggctgggtaatctgcaagctgccaattatgcaattcattgagccttgctttccatttctgtaaaatggggttgataattcccacttcaccaatttcacagggttggtgttagatcaaatgaggtaatatgtgggaaagccattttttatttaactaatgctcacatcaagttttacagtttgcaaagcactcttcatggacaatttctcattgaactatcacaacaaggctgtgaaaatgcctggctattatccttcttagtggtgtgggtactgaggcccagatagtatgagaacattctatgaggtcatgtgatcatctagtgtcttttcattgttttgacaatccttggaacagtacttcaaggcagacatttcacagataaggaaacgaagcctcagaacaggcaaggaacactgacctgtcacaggtgggcttccctttgagagaaactctcagcttttccagcagatccccacctcctgccactcctggccctgcttatcctttgttatatccaagtcagaccctgatatatgtgaaatgaaatgaggtcctctacacagagtttcccaggcacttagtctcacccttcccatctggagactactgctctgtccatccaaacactcaacttccttgccagtttacactagacatgctctcctggcatgaagttaaagtggcctggtgactgggcactcctccaccagccctttacaagctgggttgtgagctcttacacattttaatggaagggcccttgatgtttatggggtgctaactgaaggtaatacagcttgggagtgcttggattctctgcagatgggcccatctgactgagtgaagagacccacagactcaagatgagagtagaaacctgtgatgctactttaccatttggcctcaagtcatagtccctattgtttctttttttcttattttcaaataccttgaaacaaaaggaactgttttatttttccttctcagattctgctttgacattaaagcagataaaatttcctgaagtggctagtgaaagctaaacaggactatgctaaagaatgtgctttgacagctcatatgtcttttacataatgtaagtggtcctttgtgaaatgtgggttacagctcctctcctagtcacaagttcccttatgtaaaacagggatgacgtcaactactatactttggaggactgctgtaggaattactttcatttggttgatttcttgggtgctccctgtgtgcaagccccacagtgggcactggagatcccatggtgattatgacaggcatgaatttttccttgacctcaaggagtttacattctagcatggcagacagatataacctaaatcaatttagcatgaacaaaagtatagcttctaacatagtgcctggcacatattcaggatataataaatacacacatttttatgagaaaggagatgtagtggcaagtacactagactaaacttagaagaccagatatgaattctgacgtttgcaacatacccaataacaagggagggtttgataaatgctagttggctttcacatgaccaacatcagagctttctgaattaatggaggagggctggggtctgggaggaatcttttgaagtactaggagtacacaagccatagaggagacttgagttcagattctgactccccagtttcctagctgtgggtacttggggaacttaatctctctgagacataattctttacccctaaaatgaggagagtaataatggtccccctctaggatgagtggtgacaactgaagaaaatagtttatatgaaaagctctgtgtacactatgctgtgtatgactaattgatgaggacctaagatgattccatcagcacagctccaagtaacccagcagaggaatgtgttcctgaagaatgaaatatttgcttttctagtagtggtctcaaactttggggctactactagaaaagcatgctcttcctctggtcacctagcatggcatcatcagccaagagtatcaaaacctaggtagaagccatttgtatttgtagcctggacttcctctcaaaatcagaggaaaatctccaactgtccaaaaattcctattccaagcttacagagttcttgattgaactgtacaggcccttggagatgaacctggcaacacgtgagctcttcccctacagaaagtcaaacccatagcaccaccctttccctaccccacctcttccctgcctcacccgtgcactgtcctctctctagattggaagcccacctgatgggaagatcaatgtggtcccctggcactagcaccaggtgtggcccagcatggctttcaacaaatgtttgttgaaagaatagatgaatgaaaaaagctttaatggaagaggtgtatgtcggttgatgcgactctatctcagtgccacgttgtacacaggttattttgttaaatatattatgtagaggctcagtgtcctttgtgcctaagcttcttagaaactcattttctccaatctctgtgtgtgaactctgtaatttaaaacaatgcctcagtccttacacccacagacacatcttcttcatgctaatgcccaagtcacacttgttctctttctatgatgtggaagggggtgaacacacgaggaagaggcgaaagagcagggaaaagacacaaggtttggctcttggttaattatgtcaaaaaatgtatatgtacaggaaaagctgccccaggctcgtctcattagatgttaatccccgtgcaagcccagatgaagcctgggacctatcgctgctacgttttaatttgtctggacttactttacaatcctgttcattaaaatagctggtaggggaagctgtgcctttctccgaaagggaaagacttatgcacaattttcccacaaaatttcttctacttggaaagatgctcaaaactgatacaagtagggggtagaagggcccccgcccaaagatctgcacgccttcctgctgagcaaggaacaggtgcaaatgaagctgtttctaaaattccagtcatgtggaaacagagtcttgctccccgggacctcctgggaagtcctttcataagtctgcatttagcactagaagaggtaataagtataattgttctattttgctgaggacctgagattccaagagtgaccttaagaaattttaatagagggttaattttaaatgattcctgccacgattttttgttttatcactagctcatctgagttactgcacaagtgggggagtttatcagaaattctggcatacttaaagtccaagccaaaccattaatagtcagcatttgaggcaaaaataagaaaatgaagtaccttcaatgttccagaactgcaactgttgttgttggaacacaaatattaactcattaaattctctcaatagtcctgcaatgatgctttcactcccatatcatagttgaggaaacagcttggagacattaagtgctcaaaggtacttagctagaaatgaaaggtgactgtgattcacatgatttttggcctatgagttgtgggatcaggtttagacaatacctcagatgccatatgagtgtatcccctgattgttaattacatcttagatcatagccccagctagactataagatctctggaatcagtgttttcagtttccttcctcacctcaacccaatgctgactgtgttaagcacttttccttttgtttgtctgtttatccgtctgttcatcctccatccaactgtctgctcatccatcagcccatctatctgtccatccacccaaatgtgtaatcacctaaccagctgtgtgtcaccaggccatctaagtgtcccaactatttcatgtttatgtgctggaaagcatcagggaaaggaggggttgaagatactggagggagcaaggggatgctcagctgaggtgcctttcaacaggtagagaggactgtttccgaagcacaatcagaggaacgggcatagtgggtacttcaccctctgggtagagggatcagacagagtcatgtgggacacagtctgtatgggaagcaggcaggataatggggcagcactaaactattggcctcagcgttctccgtgaggtaggaggcgggaatctccctggagcagggtgctggtgaatagatgtgaacatttgaaacagccccctggcgaatgagagcgagaactcacaaagtacaagaactgcagctgggagggcccaggagaggctaaagatcaggagcatgatgtgatttggcttagtggcattcagaagcacagctttgagatcagaagtggtgaatggttaaaatgatcctgggttttgcaaggtggatgtggaataaaggcacagagaccagggagctgtgagtgatggaccagcggaagagcagaaaatgtagaaggagattgagccaggagagaactggcactgggtaggaagtggcctggttctggccaggacatttcctttaggtggattagtgtcaaggaagaaaaagagcaaaactagaggagcaggctttatggttagaaaagaattctctagatgggaaaactagggcccatctaggaagtaccttatcctatgccacacagtgacatgcatgtcagtacttgagtaggaacttgctggctgccttggcaaacagtcaatgtaagggggcagctggacaagtagctgccagatggtggtcgctgcgctctttgggccttcttctgtgcttctgcctgggccatttccatagtctgggctcctttaccgtgatcttcatgtattcaaatctaaatgtgctttgagttctggctccaatgccacctcctccttgaaaccccctcccggcagctggaaggagtttcaccttctgccttcccaaagcacttttacgtggatctccctttctcagggttattagtctacctgagttgtctagagaaccctgccatcatcaaattaatctctgcattccctagtgagtcttacacaggaaacatgtcttctgactgtatctgtattgccagattccagtggtacaggacagagtgctcacgtaactgttcaagattctgtgatttttcagagaagaggcttggaatcaggtaagagcctgctctgctacttcctagctatgtgaaacaaatactgcacacctttgagccttatttttgtcatttataaaatggtgataatgatatctatctatcagagttttaaaacagatttaaaaatatactgagcatctactatgtgacagataggcctaggggctgaggatacgagattatatgaaattattcgtatccacaagaaactcaagtctgcctatgtgtgtaaatgtgcacaatgccagccaccatgcccagcacacagtaggctaattaaaagttagctttttctcccacagaccagatctccatatattttgtacaaattagcattctgaaagtatggcacccacgctgtctccctgcctccctcactaagttggacagatggctttcagtctcagtgcaggtttcaggaagaagccagaaggggaagaaggtacagcaaaggaacctctgacttccttacagtaattagtctcctttagacattgaggccaaacccaagctactctcctgtgcttttcaacttccctccctatcacccgagagtcagagctgcttcaagccatggctctgttccacggatcgagatggcggaaagttaatgagccttggaaaccacacggcctttcacctcattcaaggagcttggagagctttcaaaccaagcagaaaagtggattccagtatgtgggtgcagagcaggtctccacatctattcccccaggactagattttcaagtctttacaaagcacctaccacaggaagcagtaagccactgctattcctcttaattggagagtatctggcttcctgattagaggagttcaaacccagcttggaggaggcctccaaataggagctgactttgcagaaggataacaagtcaggaaagaactagtgagcaaggaagccaaataacgagactgggatgtgtattttcggccaggactggaacacaacctgacccccactaaaagggcccaactgggtgaaatgaagagacagctgatgttacactctcttcctaatgacctctgaccctaataaccttttgtaaaaggctcatttctccactcagtcataagctcatctatctaactctttcctggacacttccacctggctgtcccccaagaacctccaactgtatgctgacaatagagtaggtttctaaaaccaaacctgaccttgtcacacctccgcctaaaacttctcagtggctcccaaagacagaaaaaacctaaactccttcaagattattcatgctggctttcctcatcttttccccctctcactactgccacaaatatcctaaaagctaagccacttcaagctactcatctttcctagaaaatgccttgatctcccatctttgtatatgttgcaaatctttgacttctacaattggctgttgcaaggtgcttgcctcttccttttatcactacctactcatatccaacctccaccaccaccttgaattccacttcctccaagaagcttccctgaccattggttgagagcaattgttctttttctgaaacccttgtagtaatattagtacaccaaagtcatgatccaatttacatggttcctctggcagtgttactaaatgaagtgctatccaaaacctgatacctgatttactggcagtttcagcacaaaccttggtaatagccaatggcagagttgtgcagaggataaacatgggctctgaagccagagaagcctggaagtgaatcattgttttctcagagtgtctttgagcaagtcacgcaagttctctggaccctggtttcctgggagtaacaccatctgcaatgtcagaggttaatgtatttgctgtttgaataagtcatgaagcacgtacatgaaggagctctgtaaaatataaaatttccattgaaagaacagtttttttttaagattacaagttataataacagcagtttgattcaggaagacaactagagattttgtacaagatatcagcttgggcatccaaatagaaacttcattctgaagcccaatttcagaagggcttatatttgcatactgaagagatccaattctgatagaaaacgttccagggctgtcaggggaaattctactaaattacaaatctgccagctcttggtttatcaacctttaactctggcagtatttagcagcatgcttgtctgggcccaattttccagtctttgattaaatgttaggaactgaccatctcattgtgtctaaaccgccacactacctcccaggcaactgggaggctcttccgtgccgccctctgacacttcccttcctctctatgccactgtcaatctcctggatatttattattctgaactttgatttcaggctatcacttgctgttgggaaggggtacaggaaatgtcaagtctcaatggatattattcctctggagagattctaaccttgagtttcccctcctataacatgcctatacagaaatagcctaacttgattgtttccttttgatgtttaattggatgttggtgctgtgctttctggactgagaagctaatgcttctcagagaaggaacaattctagctacacaaatgagacttgtaacaggggagaatgctcaatgctgaatctaattttctctcccatccatgaacataagacaatttctctggcattaaagcatctcactcagtctttctgtcattaataagaattaaattctgttccctcaaatttaaatgtaattatattttgcctcgtaaataaaattgaatttagctctagtgcaactgctatgtttagagctttaattattttaacccggttgctactttaagcttatttttgttaaagcattgagtttattttgctgtcgattgtgacctaatttgataacagggcttttcagcgccatatccatctagtcgttattgttattatttatgctttgtgattctctttccctttgggtaggggaggagattaatagagaataaactgaaagcttagaggatctgagtgtgaattctggagggttccactgtgttaaggtagaatctaggccagattgagttgagagagccaaagaaagagatctgatgtggagtctgaaagggcaacagtcaatgttcattgacaattattttaagccaagattttcggcacagcattcagcgggctccgaggtttggatcctgcctacctctggccttctttcctgccacccacccctgcagcttctatctccagctggactgagccgcgactgtccagctgatcatgcatgctctctacttgtgcacacgctgttcccttggcctgcactgccctctcctccttggccaccagggggcctcccttcagtcccctttcagggtctggctcacagatctctggctggtgacaaccttctccatttcctctcccatcccattactggccaagttcactgcttctgcttttgtgctcccaaaccctactgtacacacaacaatcagagctctgctcatgctgaataattaggcgtctcatttcctgaccaggctgtggggctgtctgatcctcggtgcctaaaacagtgaatgcccagcacacaggataggccagaaagattcagtgaatgaatgcagtgaatgtgtcagcgtgggagcaggtctggagctactgtggggtgctctctctgaggaggttgtgctcttctctggaatggacctcaggaagcttgtgatgctgagaggaggctgaccctaactcccttgtgctgtgggccactgacctagttgtttggggttaatgtgtcagcttttatctgactcttcatctagacaatgatctagataatgactcttcatctagagtcaatgaccagtgttggggctggggaaaggggatggtagagagattcagaaactgcaaggaaactgcgcctctgagagagcaagtgagttgtttacggttacacagattcaggtccaggccttctggctccaaaccttcactgtataaactgtcctaagaattacacttgttagagtctaaggactgtttggataacttaaatctaatcatgcattctaaaactatataaaactacttcatttattgactgcttactgaatgcagccaccatatacatgtgaaatctgatttggaaaacaaccctgcaaggcaggtgtcattagccatagtctatgcttaagcttagtgttgaaaatctagcctggtcctactccaaatttcatgcaattcttgctgactgcacgtgttacctccaaacctgtgccactgaatctctaaaacatctccacctgttattccacaaaactcaattgcaatcaaatgataagaatcataaacccgcagcatgagcattttacaggcaaaatctctgccatgtattgcttctgtgagccagcaaccctaaggaataaaatatagggagagggccctctcaaataaaagtcatttatgggagacaagactggagagagctcatatagcagtggaaatgaggaataaatttatgaggctgaggagagaggctatgggggtaagggtggggaaggaagacctgagggagaaccaacagggacaaatgatgagtctaagggatggcttttgaaagcgtaccatggaaaatgccacagaggctaaaatctttagaagccattaagctctgaaagaaaggtgagcctttccaattctaaggaccatctcaaagagattaaattctttcccttttctgagacagctctgagccaagagggtgaaaagccaactaaagcacaaggaaggggagatgggaggagttgttctgctcagcagtgctgctgagtgtacccactttatgcaaaagttgatgaggcattcagcccagcaggcctgctccctagggaagatggcttgaaggaggtgaaatgatgccagctcttgtccaggagggcttctggctggctggcactgcgcatgaaactaacatgatctaggtctgggaagtgacagacaaggagcacagagatttggtgttagcccagcacactgtgtggggagtgggagggaaggggtttatgaggaggtggggaggaggtggagtcctgagagaagggattaggttcgctgtcgggtagtgtgctgggatcttcctggacagagctttcggctgcagcccctctcttccctgtgtttccagggggctctttttctttctttgactattcactggttaagtcattcatgcaataatcaccaagaacctaatgtatgtttgtccctatgctagggatacttataggccctgacctcacagagttcacaggggagagagagagagagagagagagagagagattgattagaatacatcagtcaatataacatagtgtttaggagagaccttggagccagatgtggtttgaatctggactccgccacttatgagtcgggtgagggttgggggagaaaagggatgccagtatgtaatttaatctttctgagcttcagtttccttatctggaaatggtaatactagtaatacttccttcccagggttcttatgaaccttagctaagataaggttgtaaaggacttagttcagtgcctggtacatgctaaatactaagaaatggatggctctttgttactctatcctgtggcttgtcagaaagagagataagaatggcaacatgaacacctctttggatagaaagggggcatgaggcaagagctgaggacttgggaacaaagggcctggatttaattcaaactgcctcaggtaagctgagtcacttagggccagtcattccccgcttccaactcttttctatctgtttaacagcaacagcagtagccacctcccccaccatcactaccaccaccatgatcagtatcatcctcacaagtgactcaggaagtgaagtcccactggggcctatgtcctgtgctcttctggggcataagaatctgttgcaacagttatgtcgtgtgatttatcaggaaggaagaccacatgcatgaggctggactgaaagaggaatttctgagacgagactggaagccaagttgccaggaagccagggaactgagtaaacacttgtataaaatctgacttcactgtttccacaaacctaaccaaagtgctgaggaacttgtcagctcacatttcaatacagggctggttgttgagtgcagggcatgttgatttaagctgctttcattaaatcctgttcttggtgccaaacagcaagacactcatctcagggaatagacagtgttccctcctaggaggcagcaggcagcaggggcccatctctaccaacccaagaacccagaaccaatgctgatggtgcaaggatcacttgggatttgtcctttggcctgcagctcctgatgggagggactgggcagtgtctgtgccagctctgccatgccaggcagcaagcagcataagcaagatgacttgagctaccgtttgtctagggtgtgagctgtgccagatactacaagaactactttgcccaaatttcctcacctaatcctcacagtgattccataaagtaattttacctaagggaaaattaagggttagagggttaagccacatgatgaagccattcaacgagtggggagcaactcttcccccaaaaagcccagtgcctgttctgctgccctgtagctaactccctaaacagaaagatagtttcttggctctagtgaatccaggcaacgaggcattccttgcatagcttcactgcaaaaactcaatagctttaaaacagctttcactcaatgaaagtgcccttggaagggaggtggtagaaagacattaagtgcttactgtatgacggacactgttctacgtgcataccaaaacgatgtactttaatgattacataacccgctgaggcaggtactattactatctccatttttcagataaggaaactgaagtcaagaaaagtgagctttcttgccaaggtcgcatggttaacatgtggcagaagcagggtggaacccaggccagcagttcctgcacagcaggggctgaggagagagaacagttgaaatgccctcattctccttcaaaccagcttccagaggtgaagtgacagctgaggaggaacgtggcctgtggagagtgctggaaagcaggctgccccagcgtggggccaagccttgactcccagcttcctccctcaccagcatggctcatgcaagtcacggccactcctctagcctcatcacaggaacaggggcaataccgtacctgtcatcccaacctcacagggctgctgttgcgcagggtgtgtgttgccatgtgaaacatctttgtatgctatgggacactcaacaaacgccaattgttttcactattacaatacttttaaagctgccttttatattcctggccttgtggcaatcatgagacccttctagtcatttataggatagagatttaaaaattagaatctatatttctgaaagggatttcatcttccatcttataatcaaatgtctttgttaatatcaagtgctctaccaatgagtgttttaatcatcatcataacaacagctaacaactattgagctcatataatgggccaaatctttttttcttttctttttttttttttgagatggagtctcactctgttgcccaggctggagtacagtggcacgatctcagctcactgcaacctctgccatccgggttcaagagattctccgcctcagcctcctgagtagctgggattacagatgcttgtcattgcgcccggctaatttttgtagttttagtggagacggggtttcaccatcttggccaggctggtcttgaactccttgacatcatgatctacccacctcggcctcccaaagtgctgggattacaggcgtgagccactgtgcccagcctttcattttcttaaataattctcactataactccagaaggtaggtactatcattatctccattttatagcttcaaagggtaaagtaacttgcccaaaattataattagtaagtagcagggccaagatttgaaacccccaaaaaaagatttgaacccaggtctgtctgactcagggactttcctcatcacatggttctctcttgcctttgcacatgaggacagatacgtgtttgacaccagttacggggagtggtatagccaggactgaggaaagggagatctcataattctattcaaagtcccttctaatagttcggttgtttccgtttactgagctaactaaagaatacttagtaatctcatccaaagttatacgtacctcctcagaggctgtggggtttcatcagggattaacagtgcaagacgcagttatatacctatcataaattagctttgtggccacataatgaacaatgcaagccagcgtagctttaagaggaccatttattatatcgctataaacagagctatataaaaagaattattcctaagaccctgcacatctgtgcttacaatcatgcctttacatgagctttgcaaacaaggataaaagtccaatttagactgtgtattgaacatcaattctctattcaacagggaaaggtaattcaaagtatcccaaaggcatgaatgctacatggatctcatttttgccaaaggtctcagccatctttcttggtcacaaccagaactgttaatacacaacataatgagctaatctgatactcactttgtttaaacagcgtggagtgccgaggaaaatgattttgagtaaaaaagcatagctggagatgctatcactttttagctttttgtccctgggcaggatcacttaaaatttttccaagccttagcttctttatcagttcacttatctccattttgttgttgttgttcccctcccctttcccagaatgcacactctacgaaggcaggggctctttggtctccatcctctctgattagaagagtgcctggtatactgtaggggctcagtaagtatttgctgtttaaagtattatgtaaattggtaaaacatggatagctgacagctttcttgtagggtttttgtgcagattaaatgagagatgagacgtgaccataacccactatatacctatactgtgctaggtgactcacgtatgttcccatttaatcttcactttgaaaggacctgtaaatcatagtgttttcaaacagaagggtgccaacataattatcctttgtaccttatatgtacaaaccctgtgatgaaccaaatgccacaatcaagaacacattcaatcatgtgttcatgcattcatttatcattatttattgagcaggtgctgtgggtcaggccatgctgagtcctggggctgcagaggtgaacaagacatgtttgctaccctcatggagcttagtgactaacagagcatttggctagaagggcaggtgggggccagatcccaaagaaccctaaacactacactgagtttggacttcattctgagaaatgggtgaaactgaagggtttgatggctgggacatttatcctataaggcccacccctacagagcttacctaggtacactttccctatggccttgcctccagggatgatgtcttaacatgagatgagagttcggtgaaacacatctgtaattataagctccattgttaaggggtagttttgaatctcagggccactactatggaaggaatgatgtaaggatgtaatttttgaatcctctctttgtctaagagtagaggtgttgaaggctagagttcagagaaagaggaaaagcactcagaggcacggggaatgcattgctacgtgattgggaacagtcacgtgattggtgaccatgtcacagtggaaatcccctccctctacccatgcttcttctccccctgcatttaccgatagaacagtcgtgtccagtccagcttgggtcacagctgcaaagcccggtgtccgggaggaaggttccgtggcctgaacactggtctaagcatgtggccctgggggtctcgcagttggtgcctccccatcccacagagcagtggcattcgcctctcacgcagacaccccggcctgaacatgtggggtccatgcagtccactgtgagatggaggaaggagaacataggtaagcatctgaccagcaaaggtgaggcttctttaagcaaactacttagctttgtggccaaggggcttcatacattctggcagaaggatgcataggtcacttagtaaggtgagagcagtactgcggcaaatggcagacctggcttcccaactccacccaggtagaaatccctaccacttcgtttgtggggcaaagtaagaaatgtgtctcaagcatcagcatagcacttcatgtctactagattctgtttcattcacttctgaatctccacctcctagaacattgcctagcacacaggaggtgtttaataagtcttcatagaatgaacttttattatcacttcataatgcaggtttatttttgtaggcatgagactaaaatagattccttcatttaaatgataatttatttttaattaaattccattagattttatcatcttccccaaattcttgagattgatatgaactttcaaacttcactttcctggccaggtgtggtgactcacacctgtaatcccagcactttgggaggttggggtgggaggattgcttgaggccaggggtttgagaccagcctgggcaacacagcgagatcctgtctctacaaaaaataaaaaaatgaaaaaaattagctaggcatggtggcacacgcctgtagtcccagcaacttgggagactgaggcaggaagattgcttgagtccaggaggtcaaggctgcaatgagctataattgtgccactgcactccagcctgggcagtgagcaagactctgtctctaaaaaacaaacaaacaaaacaaagacaaaaaaattcactttcctgagggcaaacacttcaatatgtgctgactttgcacagcttctcctcatgtggtaggtgagtcacatagtggtggctcacagccaggcagccctttagtgctcccagggccaagggtcaaagtggtctcaggagaccaatccagaaagagggaagagagagtaacattgtgggttatctgctctgtgcttacatgctaagcactttatatacactatcagattcagttttctcagtaacccagtgagatacagatgaggaaaccgaggctctgagaggtaaataatttatgccagatcacacagctaaactctgccagagaggaattcttttcctgatttctaaaatggtggtaaaatacacatacataaaatttaccaccttagccactgttaagtgtacaagtcagtggtgttaaggacatggatactgttgggcaaccatcaccactgtctccagaactctttttatcttgcaaaactgaaactctgcacccattaaacaatttcctatttcccctttccctcagccctcgacaaccaccattctattttctatctctatgaatttgactactctaggtacttaatgtaagtggaatcatccagtatttatctttttgtgatggcttatttcacttgtcataataccttcaaggttcatccatgttgtggcacggccagaatttccttcctttttaaggctgaataatattccattatatgttcatacctcattttgtttatccattcatacatcaactgaaattcaggttgcttccaacttttggctattgtgaataggttgctatgaacacagatatacaaatatctctttgggactctgctttcaattcatttgagtatatgtccagaaaagaaattgctggatcatatggtaaattctatttttgattttttgaggaaccatcatgctgtcttccatagtagttctaccattttacattcccaccagtagtgcacaagggttccaattactccacatccagaatctgaagacagctctgtctgatcctgaggccaatatttctatcaggggctgactttccctaatcaaagctttagttatggggctacaacaacattaacagagacctctaatcttctgcaaagcactgcatggaaaaggagaagagtactgagaattaactgaagtggctccagttcatatggaaagtgcaacaggtggcagagagaagacaggattggtaaaggaggtcgattcatgttctttctctaccaaaaagttgttaggtctatctttctctttagggaggtagggatgctattcattttataattgttaggggacggtggtatcctggggagaaggggcaacatgtagctgttggagaaagggtgctgatgacactgtgatgagtatggtcaggcccctcctaataggaactcactagggagccctatgctgcagaagaaaaagctctccatttggcctcaagggtcaagggacaaaatgtactggttctaggtccatggtccaattacataactgctctgtgcttcccatctataaagcaggtatggtaaagatactgactactgacttctcaggttgctatgaggagcaaatgacatgatgatttgaaaggaccgtataaactgttgcaaagaggttatcttcctatcctatcaggacattcagtagcatagcttggggtaaactatggtcagagctcattttaattcagacatcctttaaatgtattcattaattatattttgtaacctggtatatttgacttttacataaaagactgggaaacccaggctgggtaggtaagagtcacagacacaaatgggcaaaaactttacaaatggcaatattctgggaacatttattttgagaactagcttattaagaaagttattttgctatttagggtcttaaaggtgttcaacctaataacctaaatgataaataagacgatcggggttcaggagtgatcatttggtaataacacagtaatgatcacaataacaatcaacattaacttattccctcttctctgccatattttgctattaagcatttcatggacattatctcatttaatcctaacaatgtaagtatgaggtagctacttttatcatgttcatttgacagctgaggaaacagaaagcacagagaagttaaataacttgcccaagattacacagtagtatggcaaatggaagaatttaaatttgaatcaccctttcctggttaggcctcttaccatttccccttacaatcttactggttcagaaatacatgcatgcatatatacttacataaacacaaaaaatgtcttaaaaatagaaatcaaaacaagaaaagaaatagagcaatgtggaggattaatgaagtcaaatgaaggcaaagaatctcttctcctgcagtctcctgacaccattcaaaaatggttagagcatgacctgttggaatgcctgataattaaaaataataaatgtaataattgtgataaattctcatgacctgcctcagatcttggaacctcagaaggattattctggcccattaggcttctgtgacaatcccctagacccagagagctttccaatttgacaggaaacaactcagcaattcctatcctgaggccaataaaggtatttccttttctgtaagtgcctgaacctcaactttgggttgaaactgtctctgagaatcccagggcacccttgaggtcgaacctataaatccccatcattagcaagcaggctgggagggtgccaagtgcagcaagaggctctgggtggcacaggcgtgtgcttccttagacgtaatgagtctaaggaaggacttaggaaccagcaaagtgaatcctacactcccagcagatggcccaggcagagaacaaagatcagaaggaactgacgagaggctacctccaggcaattaatctttgcttctgaaggtcaactgggtcaagttattgtggagcaggagggaagttttaaggaagactgcatctcaggagggaaggcagctcccagaaatctaggctgaactggctgaggttcctgctggggctgggcagacactgtccttgtgctctactgatcctatagggccagtatctatgccacaatgatgctctgccaaagaggtggtaggtagactctgcctctgcctttgcatcctggagcctctggggtggtgattaaagttggcttctttccatcacactgggacagcttcaggaacaatggtgatttcccaaggagctgtgtgtaaagtggggagaagcggccagcttggggtggaagggagtggtgatgaaggagtaggagcaatggtcagggaggtgggctggcctttgtctggaagacagcctaacttagtttcctcttagagatgtgtcaaatagttaccttttttccccttgcagagcttgccattcaagccaaatttctggcagaagcatagcccattaacaaaatgatgaggcctgcatgaccaggctgcggacacaggtctttcccccaaaaatgccatgcttcagtgaccacacaagctattagacactctgcaggaccaaaaacacagggtctcacttttcactgtgaaaggtctaggttttttcttttctgctcctcccccaactccttcccagtgtcctactggctgcgttcaagctttaaaaaatatggggcaataaacttcagaagaaggaagggggagaaaaaaaagtgagcttgttagctgatgttttataaacacagtgaaaccagttagcatagagcagagggaggaggggaggagaagtgtggaggacaaaggccccaagaaaaccccattataaacacaaggacaacgcaatgacgcttcaccagagaaacagaaataataatgggaatcagtaccagatggccctcctcagaaaagaaagctggagtaagaacatttcttttcaaatagataacgtaaatcaaagttccagacatttttttctctcttataaataacactgcagctctggggtgctgtgcgatgccagctcatctggggaaggacgactgccttttcctggcccacacaacatgggtgggattggaggcagctcacagtttcaagaggaatctcctctttgtttctctttccttctcagggtcttcacctcaagtgactcgaataaaaagggacagcagatgaaggtcaccattctctggataaaaaggcccagttcctttgttaaaggggttggcgttccttctctctcagacagcccaaagtaatccccatcaaagttaacaggtctgaatcaggacttccagccacgcttggggtttatatacagcttgtctcagagaggcgatgcttttcagacactaatctcttcttgttccccactctttgaaaatgggcctgttaatgttctgttttatttttagagcaaaatgacgcctgggagagggctctctgttaaacagtaaatggtttagaagatcagctctccttggagcctcttccacccactggggaaggtgccagggtgctagatggcagagaatgggaggtaatgacaggcacacagcatcatccgtcagtttcaaacggcaaattccaaccatttaaaaagaccttggatgaagtgagtggggcgaaacaggaaatgtgcttcaattgtccccagaataatactaataacataagagctcacatttatggagcgtttactatgtgtcagacactgagctaagtgctttacatgggtcatttaattcaatcctcacaatggccctcagaggaagccattcccattttatagacaagggaactgaggctagttagtggcagggccaggatgcaaacctatatctgattccagagtgtgcacttttaacagctactttacattgcttgcgaataaggctcttcctctcagctggaaacaccatgcagtcaagaaggaagagtcctggatttgaagtgagacctgggctgaatcccaattctgccattagtcagttctatgactgtgggcaagtcactgcccttccctgggcctcagtttcttaatttgtgagatagaaatattcatttatttcacttggttggatttcctagcaaagaacagatgtcagtgttaaatcaacagttcacttttccagcctcaatctatacagccatatatttattttataaaggagaggcatgctcatgggcactgcagagccatacacatgaacacacacacacacacacacacacacacacacacgagtgtgataaaagagggcagagtttggaggcctataatagaatcacacttcagaaatggagattaaaaatgagcagatgagcctagaggggagtgaaaagaacttgggctatggagccagaacgactgggctcaaactcagctctgctgtctactagccatgtgtccttgggcaagttattcaaccctctgagtctcagattccccaactataaagtagagatgattactcctccctaataaggtttgaattacatgactcgaggcttctagcacagccccgtatatggtaagtgctcaatacatgacatttctccccttcattgaccaggactccgatgtgtttggcctcttcctttggattagttactgttgctggtgggtgggctcctggcttggggaggtggggtcacaaaatggctcaggaggcttcccctgctccctggtcaccctcttggcactatatgccagcctctatctcagaggaaggtgccggagctgccacctgcaactcttaccttcctcacagctctcgcccttgtagccagggttgcagatgcaggtgcccgtgatgcaggtgccatggttgctgcaggccacatcgatacactggttggtgggcacatcgcactcagcgcctttccagccactgtggcacaagcatctgcctttcatgtattggccatttccgctacagagcacggggcaggaggctggggagacagcaccggagtctggcatgaatcaatgtccagcacaccccaactgcctttgtctctttctcctcctggcctgcctggcttcaccagtagcctcaactgctctgccacaaacacccatgtgtgcccatctgtcttcttctcttgctttatttctttccagtttaaacacacctagatttgtaggtgatagtgcacagtgcagggcctggcagggtaggtatccacttaaccccatccccttcatgttgctgatggggtacagtggctgccaggaacctcagacaggaagcttcagtctgttcctccatctcactggaaaagccagtggctgagcctcctgcctgccctgaatccctcctccagcgctctcctctaataacactccactttcacttccccacacctcatctgcagcgccacttactgtcctctttaacccagcaaatctcagcttcccttgcctttcagtcctccactccagccccatattctactgcccccttaagaagagagcagagcccaacttggctctttaaagtattatcttttcattctgcctcttagagtaaaggattttgtgatcttctctatgaaggatactatataaaaataaattatactgcattgtgctgaaagtacttaccagtcttatcaagatccaataaggcttttttacacgtgactcttaagtgcatatgggacgagacggtaattcttgttagaaggaatgactcatctctctctgcaccaccttcccctggtccccacctggcttctttcctttttaaagcactcagcaggtaatcactgtgtttccttggggctgctagctttgctgcctcaaactgagtctgtctcacattaggaagaataaacagactctcatggcatagtacttgcagggtgtagttcacgcagcctggaaaatcatctctgccttctacttatgaacaatttctcaagcctcaggactcgggtgtagtgtcaccctcatttgggaatcctttcctgaaattcatcccttctactctcagactgctcttcccttctactctgatagaagctccctgtatttaactgtgttatagcgtatttcacttactatcgtactgctttgcagttgtctatttacttgtctgtctctgagaccagactcagcgctcccaggattgggtcttgcctagcacaggaccaatccctaaaaaggcatgaagcaaatggctactgaataagggaaaaaggtaaaaaaacaaaacaaaagaaggggccaagttagtttcccaggggagtgccaaattatcaggactgcagatctccttgacactttccttgttaattattccaggacagaaatgatggccaaaagcatgggatagatcgtgggcaggcttttagactatctccacaatgtttatcatgggcactggcagtgtctaaatatcaggcaccattagggtcctctgtggaaaaaagtggcctggcctcctcagtccctccccttggggtcttggctgattctgcctgtgctgttagaaagtagcaacagagcagtcgtcaggctccccatttacaggccagagagacatcacactagcatgaagataaacttcaaagatgcacggccagggacgatcattgctataagaggaaatcaacgttttaaaagaacccccactgccactccacctgccccagcaacagacactgacttcactgtggccaccccacagtgaattcaccctcccttcctgacctccccgatcatccacatgtggataacagcagctgacaaggttatggctctgcctgcacacctccctccaagggcttctggagaatggcccttggaaacccttctcgtgggcatcagaaggtgggctggattctgcacttgctctgagaagtagaagtgagctgcctgaggggtctgggaagcagaaatccagagctccaatgcagagttctcacctctgccacagtcggggcccaggaaacccaggaagcagtggcaggtcccagagatgcagtcaccattgccatagcagttgctggggcagttatccaccgactctggggagagaaaggagaaggagagttgaaaacaaatttccttacccaaacagagagcccaggaatcaagctttaggttagccaagacccacatatttgagctcttgtggccccgtcactgaaaggaatgaatggagttaaaattctatgttatttttactcttatggaagcacagttcaattgacattagcagaagtgttctggaaaatgtctgcctgaaccaaatttttataaatcaaatttgtatctacaaacacattagagattcttcagctaaaaacactgagagagaacagtttaacctgttaacagtggttttctttgggtggtgtgttactgggtgattcttatagtcttctttatactttttgtattttatgcttttctcagaatgggctgatattccatactttgttttgatataaagctactgagcatttacaaatctgtcttttcccacctctggcttttcatatatccatgtaggtccccaccgtctctcactggagccactacaccagcctgaggcaggcctttcagccttccctcttgctcctcaccttgatgtgttcaccacccatcagcctaagttatttctttgaaacaaatctgatcctatcactctccttaaaacccttcaagcgctccccatttgctaagatgaaaaaaatccaagtcctttccagagacaaagacgttctcttttctggctgggcgtggtggctcaggccttaatcccagcactgtgggaggctgaggcaggtggattacttgaggtcagaagtttgagaccagcctggccaacatggtgaatccccatctctactaaaaatacaaaaattagcctggcatggtggtgtacacctgtaatcccagctactcaggaggatgaggtgggagactcactagaacctgggaggcggaaggtgcagtgagccgagattgcactattacactctagactgggcaacagagtgagactgtgtctcaaaaaaaaaaaaagttttctttcctattccttctgcactacttgcatccccagacacgctctctgtcatgccccccttttgcagagatgttcctttctctaactcctcctaatacgtttgttacatgctctgtgtgacaggtcaagaaaatatagaatcaatttcagaaagattttaatcaaaagtcaggcactgttttgtagctcctgttggtaaacctattatccagaatgtgtgtttatttggaacagctcatttctcaataatgctggatgtggaatgaggcacagaagcaactatatgccaatgccttctttgtgccatgtatttccacaaatttatctcatttcacggtcaccaaatctgacaagtacatattgttattcctattttacaacaaaacaaaacaaaacaaaaccaacaggtggctgagagaaatgaagtgacctgtggaaggccacagatactaaatcaaagaggcaagactgcaaggactggaacccgagccttcgggctccacgcctggccttgctgcatgacactatgctatctggatcttgaaggaacttattccacagcagaatctggggaaatgagcaaggcagatctatcggtataggatcccccaacttcccactttttctgtgtcctgattgagaaatacaggccttgaccgctctgtgactgacacagccattagcaactcttctgcaggctggagtccacgctgaagccttgaacattctcaggtactgaaaaaggtgtttaggttgtttccccaaacagtaaagaaactagccctggccttgagccaaactccttaaatctctatataaactccataccctgggcaccttgctatggagatacctaggtagaaaatccctttctcttgctgtctgcacgagaattgctacagcactctgtaagttcccctaataaatgctttggacagatcaacctggcttttagtgcttctttctttgcaatcccaaccagccctatcttgggatagtttggggcaccccctcatgggaacacttccctgcctctatttttgtggcgactctagctatgggttcactggatcaaacagtgggacagagaagcccatcctgaaggcagcaaaggatctatttgtaggatagagaattctataactttcagagcttggagggatcctagagacatccagcccaatgatctcatctgatacagaaggaaactgagacccagaggaagggcagtgacttgcccgaggtctcagagggaaccagtagagtcagatttgaaagtaaaggaaaaggttagttaagcaggcagtctattgtcttagctcacaactataagtcatgaagccaagatctaggcctgtgttaaatgaatgttactacattagatacaagccttgcctataggaaatttgcagcttaactgggagaataaaataataagtcaactgttgcatgaggcatagaaaaagctctgcctggaggtaagaaaacctagttttgggatctactcttagtaccatgatctgtgacctaaagcaacttccttcccctctctgggcctcaccttcctgatatgtgaaatgaaggcaatggtggagatgattccctgcaactgcttcctgttctaaaattctatgagtctataattaattaagagatcaagggtggagaaaaggcatctagacaagggcatcaaaacttaaatgcagcatagcacttaagggtagtactgtggcagctggaatggggcaaaattagcagagggaaggcttctcagaggacgtgggcttgaaaaatggcttggtgatatataggtggaggtggcggcatttatagcagatgcattttcaagaaatgtccttcttcaaggtcttaaagtgtcaacttaagaactatttttaaagtttggaaaaatggtccaaatgtgtggctcctttagtgagtgggcaattccactcactcagtgttgtctctgctaacacaagcagtgctttatattaacacagagttaagaacaagaaggtctaatccaacacgtggcctcgtttcagggcaaaatggtctgggtcccagcagagcaaggcttaggctggggacctgaagatctctattctccattggctttacttggaagaatccatgttcccaagacctttaagtcagtagtggattcctaaacactgttttcagaaagaaccacttaggaagtttcactttgaatattcttttaaaaaattaaaattttgagtaaagtctaaggcaagataatttccactttaagctactgggctaattgtacaattggagagacagtcctgcctgcagggctgaggaaggagtatagaacagaaaggcagacggcctggcttccaggtgttgtcctgctactgagtggttgtgaacccttggccatgtcacatgatctttcggtacctgtcttctcattattgcacttgctcctaccgtacgttcctgcttggcaacttctattccttctttcaaatccagttcaaatgccacctccttggaaaggcctggacatcttacacaggctaagttacttccagaactctttttccctccctcttattaaaataccatataggtttcattgttgactgtgaactccttgaggatagaaattgagtttactcatttatgtatttgccctggtattcaatccagaggagggtctcaataaatatttgtttctactcctgaaagaattccactagatgagctcagaaatccctcccagatctaaatttctatggttcaatccttctcaaacccaatggtataaagtatagctcctaataaaattactataaatacaagttgcatttttaacaggatcaactgcagataagtgttatatactttgttagattctgatttccggagtctgcaagatacaacctgtttatcatctgccgaaaagccttcatagtgagaaagggacgaaagcatattttctgtgactgagtgtagtgttggttgctaaacctgacagcatagaagcctgtttgctacaaaacttgccccaggctactggtgttagagaaggcagaagttttgggagacacgaaataattttaagatagcaacaaggaaatggaaaggagaaatatagagaatattttcttttgataaaatgcttatgtatatatttttcttccacttggagggatttcaacaacttgaggttcagttaggatcccacaaataatgagtctccactgaccaggtatctctgtgctacattctagggcagaaatgatattctttggcttgggaaaagtgtgaactttaatgcgtaagtactgtggatgttcccaattagtgtttggtgaatttcttcccccacagtctctcctgctttgctcatgttcacactgcagctgccttcatttagcagaaggtgtgcctttagatctgcttggatccaaattaaaaattcagcagcctatgaataattggttttcataattgggtatatggcatgttggaaaatggggcctttcccccagcttgtttttctatcacagcagtgggtcctggtaaaaaaaaaaaaaaaatacatgattttcaggaacttgtttttcctttcatctgtattggaatgcagagtttaagtgtttccttagctcattctctggacatgtgttgtgagtgggagtgttctctggatattgaacaaaatgttgcttgaaatacaaaggggcaactgcagaaggaagaaaagacaacagtgcttcttcccagtggagacatgagagtcaggaacccacagaggcctcagggaacccactgcggtgcccgttttgactgttcactactcctgatttgttttcagaaacaaatcattagcgcagctatgtcaaggtgaaagatgatcacagctgataactaagttctcctgagtccagggttgatgttgaggaaagtctgccctcatttgcatccttctggttttcctttctaaaatcctgaagcctcattttgtaggaaacaaggagagaccacagaagaaaatcctattaggaggactacctggacagcccaattgcctccttaactgtctcacaggggcagtaatatcagtaaagggaaggcagcttttctcctctgtcagctcaccatggcatgggcatacctgcctcttgccttgctctgagtgggcaaacctctgtggacgtgcgagcttgatgccggactccagcatcaaagacagaaggaaccagctttgtgaatgaggtcaaggcccactcgacactctcattctctcctttctgctcaccccacactttatccctccctcccagaagctcctgtatgtcttgttcccttgtgatatgtccaggctaatagaagcctgcatttactactaatatctccttctgtttttgttgtctccttaaattataaaagtggttgtcaggaactctttgggaacacctggttgaagtaccaaggtatacccattgccagagatctaccttctgactcctcctggcttccccagaggaggatggatgataatgctacaggcaagaaggagcttgaactccaggatggccacctggatatatcactttgactgcagctggtgacatttatacttcaggttacacctatttcatcccctttgctcctgaaatagaagggctggatttattattagcaaccaaaaagaagaaatggaaactagatagcatagctgggatttaattctacagcaactcaaggttgaaggaagagtccaacagagaccctctcattccctgaaatggaactgcgaaaagcaaatcatatattctaacttaatcttcataagaattatgagacataggtacttatgtcaccattttacagtcttagatagagaatgggagatgaagtcaccttctcaaggtcacacagctgataggggaaaatctggtaggtgaacctgtcctatatgcagccaaagtttgcagcatttggcctggaccagagtatgggctctggaacccttactagctagatgcctttggacaagccatctctatacattactttcctcatttgtgaaatggggtgaacagtaacacacacctcagagagttattttgaagaccaaatagggtgatgctgtgcatgtaaagaggttggcccaggacctggcagagctggtattttggttttaaggaagggtcacacatgtcttccatttatgaattaaaaaacaatctgacttggtcaaatgaatccaaacaaggaaatgtgggtttctggggggtaaacccacagacacataggcacacaagacacatggaaactccccatggtaaaaactggaaaacaaacaagcaatgcttctgaatgtgaagaaggcagggtgtttgagtaaattttctcctgggggaaagcgctgtgaaagcaaattaaacttgtctcccagaagcacaaacacaagcaggctcctgccaacatctgaaagaagttttctcccattgcactctagattggcactgggcaggtgccaggtgctggaaagctgttccatggcctgtgatgtgtcggtccctatggatgtcccagctttctttgcagacgatggaattcaaaggccttcagtctacaacagtctaggtcaatgcaatgacaaaaatttgacaaagcccctgacagactgggcttgaagccagttctgtgccaacatttgaattggaagatctgttttcagtcatatccagaagtccaccaaccactattaagaccagctctaaggaaaggtctaggagaaagattgtttccttattatattcagtcttggctatttgttaattatttctttggggacaaaccaaattttaccaataagactgtgaactccttcaacacagccattatgtctggttctccaaagagtcttgtgattgctaaacacaaaccaagaactcaataatatttattgtattgataaacaaagcaggaatacaaggggaaaatagaggaaagaggtcagagaagtggggatgccacaataatcaggttccagaggcgtttggtggccaagaaacatactgtttcctttgcctctatttttttattacaatgcctagaataaacagtgatacgaagctgaattccacattgtactctcagaccatatttggagttcagcagttcacatctgggagccacgtttaagacactgatgagttaagctagaacgtgttcactgaagaacaaccagaaagattaaagaacttgaaaccacatttcaaataaagaattcttgaaggaattgaaaattcagcttactaagggggttatgacatctgtttaaaaatatctgaaacgtaatcaggtgaaataaggactttgttttgtggccctaataggttgaccagggtccagtgaataaggactatagtccttgggaaacagacttggttcaaaagaagaatcaacttactcactttctaagagtcagagctgaatactacttactacattgggttacgttctgtttacatgtatgtatctgcccaaatattgtaaacttcttgaaggcaggaaatgtgttattcatctctggatctctggcaaataatatctgactcaaagcaggtaatgaatgtttgttagctgaatgactaaaacgaatgacctaggtgatctacaaagtcatatattttcagtcgctggatgtattcaaggagagagcaaattaatgactagtggggatactgcagggggtattaaagatgaagcgtatgacatcttccaagcctgaaatcttatgactctgtgagtcatggtgtaaaggaacttgcttggactgtctcaagaaacttgggttctagtcctactcctgccatccacttgttaagtgacactgatcaaattctttcctcctcagggcctttcttttcatctacaaaatttataaaatttattcagtaaatatttactaagaatccactctagctcaggaagtgttccagtgaagtggatggctttagtgattggtcaggtctaacctcctgtgatctgatgaatcaacctgaattgtcaggacttagaaaatgatacatatagatgaaaaagctgagaaaagaatcgtcatgttccatgagaacacatggatacaggaacgtgaacaacacacactggggcctgttgtggggtgggtagagggagagtatcaggataaatagttaaggcatgtggggcttaatatctagatgacaggttgataggcgcagcaaaccaccatggcacacgtttacctatgtaacaaacctgcacgtcatgcacatgtaccctggaacttaagataaaattttttttttaaaaaaagaaaaacaatagacaagaaataggaactaagggctgatttacattttattacttcaaccaatacaaactgtaagttaaaattaagaagaagtcatcatgttcgtggccgggcagagggcagagggggagacgtttgctcatttcaggagctaccttaactttttaaccctccctgcggttcctgagataacagtatcgcattatcatccatcccttgatgggagcctcaagcggccccgaggttagcctccttcctggctgttggcagcagcgctctcggatgccagtgccacactctgggctcttgttctgctgcgtctcccagcggtgccccgtgagcacgtgccagagagatcactgagacacacaccaagtactggggagacagccaagtgccgcgctcttcaagagcactaggcccttctgaggagaggcgagcgctcccgggaaatgcctcgtcttccctccacccttaacccacagcagctccagtgcaatgccccggcctcagcgcctgcccagcggtggcccaggtgcaagagacaacacctcgccccgttcccactgcccacagctgattggacccggctgagcacctgacccaagccaagctcaggcacaggctgaacggtgctctgtgacacagcccactgggcagaggttccgggccaataagagcccgttctctagtatttgaactaaaatgtacccagggaacttagcattcaggagcaggagccaaggggtgtgataggaagagacgggctggtgaggtccttaaggtcaaggtggaaccaaagtgaagaggaagcagtcctgagtgaggagagaaagctcatgaatggagctgaagcctggaaagaggcgggaacactgcagcaagaccagcagtgaagcccatgaaggaagagaatgaatgaatgaaaggcccctgagctgcccggattcctagaagcttctcggtgcctattttcgtccccagcaataggaatgttttagaaacgacttcattgccacatcagcttttccttgagattgcttgtgttttgccccttgcaacggaaaaaactaatttaccttggcacgtcaccaggatctacttcatagcttggaggctttgataatagctgataagtgcagaactttttgtttttcaagtatttccacatacagttttatttcattcctacaacagttccgtatgtaggaagggaaagtgttctttcccatttcgtagatgagaacatgaaggcacagatacttgcctaagttgatgccgctaataagtgacagggccagtatcaaaatctggatttctactcctacctaacctagggattcttctaccataccacaactgccaatccggttaaaaaaataaaagcatgctgtattagtctgtcctcatgttgctataaagaaatactggagactgggtaatttataagaaaagaggcttaaacggctcatggttctgcaggctgtacaggaagcataacaccggcatctgcttctggggagaccactggaagcttagaggcatggtggaaggtgaagtgggagcctgcatatcacatggagcaagagcacaaaagcgagtgggggtaggtgctacaccctttaaaatgaccagatctcgggagaactcactatcatgaggacagtaccgagggggatagtacacactcccttttcagaaatctcctcccatgatctaatcaccccctacattggggattgcatttctttctttctttttttttttttttggaggtggagtcttgctctgttgcccaggctggagtgcagtggcacgatctcggctcactgcaacctccgcctcccggtttcaagcaattctcctgcctcagcctcccaagtagctgggactacaggcgcacaccaccacgtccgactaattttttgtatttttagtagagatggggtttcaccaatgttgcccaggctagtctcgaactcctgagctcaggcaatccacccaccttggcctcccaaagtgttaggattacaggcgtgggccaccaggggattacatttcaatatgaaatttggatggggacacacatctaaactatatcacatgctgatcccattccttttgcctgtagattagtcaattatagagtcaggactactgcagaggatgctgccagggccagtacattccaactggtatctattttggctttgttaactgaaactctggttttcaaacatgcctaccagtattcaaaaatcaaaatgctgctccagccactcgcaaatgtatcacacttggacaaaaatattgatttgttgatcaagtctctattgactccactgtgttaaagctgtcaggagggaggatccaaagcatagtccttattctcgaggagcactgggaaggctttagcctttagagtcactacaccggtctaggtctgaattccaaccgtgtgacttctgagggtgtgatttggagaagtcactgtatctgagtctcagtttacttattagtgaaatgagaaaactatttgccttacacagttgtgaaaaataaaaccaccatatatatgcacctggtacataaaagatactcaggaaatattagtttactcctgtataagctctgtgattttcaaactttatccttgtcagccatctgaaagcttgttaaaacatggattgctgggccctacccaccagagtttccaatttaataggtctggggtagggtctctggtgatgataatatccttgggctggggctttgagaaccgctcgtctggaagaaagacagactttacacacaagtctgtaaaaaacaagccagagggggcagaaagatctaaactacccaagaatgcaaaagagcttgtggaccagttccaaagaggagggcttggtcctccaggaggtagtatttgaatagctcttaaagaatatacaggcttttgaaatgcaaagcagttctgggcaagatggaggtcaagtaagagtaagagccagatccagaataatcatttttgctgctcccacacagtgaccggctgatcataatgccaacttcatgtcaagtctgtctctgggacaaattacttaagaaatcagtgtaaaacactcaactcagctgctggctagagagttccatctaatgagcatcactttgtgttgaattcttctgtgatgacagacaatgcaggaaaagaaacaggttctgaggaagtggggtgtggggagctgctaattagtctccaatcatttatccaggcttgtcaccaagctctctactacttacaaaccaaatagaaaaccaaatccccctccttttttttttttttttttttttttttttgagacggagttttgctcttgttgcccaggctggagtgcagtgacacaatgttggctcactgcaacctctgcctccagggttcaagagagtctcctgcctcagcctcccaagtagctgggattacaggcatgtgccaccacgcctggctaattttttgtatttaatagagacggtgtttcaccatgttggtcaggctggtcttgaactcctgaccttaggtgatccaccctccttggcctcccaaagtgttgggattacaggtgtgagccaccatgctcggccggtctcctcccttttaagtcagcatagtcagatatgaaaatgcacaaaactatataaagataacctagagacttacaggtaaaaacctctatgttggcttggactgtacctggaaaatggaaatatccaggccatgttactcatggcctggactgctgcatcagcattctaagtggacttctgtctccaggcctgcccctttgtgatgtctactccagatgataaggggcagtagccttccatagggttactgtcccttatcatctggagtagatattacaaacaggagccctatggacacttctgtttatgtagtgttttcaaaaatttgaattagttgccagaactttttaaaaatgaggtcaaagaaaaatcttcatgttggctttcatatatctatttcgatacttagaacttgttaaatacaaaaaaaaagtttttaaattggaagatccaacatgggaataatctcttctcatttagggcaggcccagaccctatgatcagccacaggccatctctgtagcttcctgcactaatgtcacctgcctggtttctaggcatccgagtataccacccaggcctggagcagtgttttctaaaagtcacttatttgggtactgcttttatgctgttgccatattcacataccatctgtcctattactcacttagcatttttcaattcatttattttcttaactttatttaacatagaaattcaatatcactatgaaataatgatttgctatatctaactatatttttccagtttactaaaataaatacataatttttgaaatagagtctgtctatgtataatctaaaataatcttgggaactatactttagaaaacactggagaggagaaagcccaaatttctgaaccaggagtttaaggatccaattgcccttttcaagtaaggtctttctcatgccctctttgtgctgctgccaaattactccccacctgaacccacactcccttttcagcctccctgactgagcccactgctcataactttacctgaaaatcctcttttcccacttatccgcttgtccaagtcctatccatccttcaaagcctatttatttatttatttatttatttatttatttatttgatggagttttgctcttgttggccaggctggaatgcaatcgtgcaatcttggctcactgaaacctccgcctcccgggttcaagcaattctcctgcctcagccttctgagcagctgggaatgcaggcatgcaccaccatgcctggttaattttgtatttttagtagagatggggtttttccatgttggtcaggctggtctcgaactcccaacctcaggtgatctgcctgcctcagcctcccaaagtgctgggattacaggcgtgagccactgcgcccggccaaagcccagtttaaatattacctctttcgtgaaggtccccctggctcttcctagcaagatagagctctcatttgaatcctgatggcagtttacttctgtctttcacttattacctactgctgtctactttgcaatctagttatgtataagtatggctgttttcccctagtagactgcaaattcattgagaggaaggatccatttccaattctccctcttatctgtgctgccacagtgactagcacagtgttctgtctggagtagctgggcagtcaacactttttaaatatcaaatgacaaagtgcaatttctggttggttttatgtcctttggtgtgttcagcctcaaatcttaaggctgggctctctctgtggagaatgcactgcttacttccttgctgatttctgttttttcaaattccctttttataaattgtttccagacctgcagcttcactgtgatctgtcttcctctgggccttttacgtttagctagacatggtactggcctctcttctcccaaaacagcactaaccatgtatttggggggcatgtagtaatatcactttgcaggaccccaattcttttctctagcaagagctgccaagatggcatctgtgaattatgtacttaaattatttctatcaggatataacacagtaagttgaatagcaagatggataaattctcaggctgcggtggatttttcttcacaataattataatgcgtgttggtcagcagcacgatgatttgaacagtatttctttcttatttatctactaggtaacactcaacataataacttgggtctatatctttgagccagaggccaagttggacttcttcttgacaccaaatcctattagagatcatggtaatgtaattatatgttcaagtcaaatattttatagctgctctagccacctaggcagatacttcctcagcctctaggcagaaactgcccagtggcaaaagcggtagctacatatcttgcaagaaattgagaaatagtttctgttgtgaaaactttatagaaccttctggccatttctgactttggcagcagcaggactttaagccaccactggatgaagttataatacaaatgttagctccagcctgggcctggcctaaagggccagttcctccccagttccctgaccaatgtgaccaatgagagggtggcctgtggggccatctgctctccacccagtgggaggtttggaagtggtttggtgctcctacactcagctatctgtatgcctagatgaagacagcctgaggggcccctcaagcactagactgcagcccctctgtctggccagccttcctcctgggtccctggttctttctacttgtccactgggctggtgtgtgagtgtgacccacgtgtggccagcagggccctatctccccatgtgaagtctctgactgcccctcagttcaggggtggatcttgtctctggcatgttttgacttgacaaggctgaactccctggtccatggcagagcatggactatgccatcagacagacgtgggtatgatttccagctctgactctcactagttgtgtaaccttgggcaaaccatttagtgtctctgagctctggtttcctcacttatctgtttcatgttggggttggagggctcaatgagataatgcatgggaggcatttaacggggcctgcagtaaatgtctcattaatagtaggtaaaatgaaacctagtcagaacaaaccaaacaaagcaaaaccattgggacaggccaagtcggaggctgcatggtataatggagaatgcaccagcttgcaggcttcagaatgagactctgggggttctaattctactttgctatctcctttgtgactttgaacaagttacttcatctctctgtgtctcagtttccttgtctggaaaatgggagtgataagaaagcccctgtccacagcagggattatagtattagcaagggaaagactggaaataggggcctgcagacccttctgtgtgggttagtttctagtggctgtcccctagctggccttagctcacttcttctccttcaccaggggctcctagcatactgtgcatgcaggtgcgtgtactttgtgacaacaggataagagggagcctggatcttgtcctggaacaacagcaattaatgctccaacaccatctccacacagtactggcttatatcattcagacacagtgagtccgtgtgagatgatgtttcttccgcctacaccacaacacacagggatgcacccacatggacgtattggggctgctgaatcctctcttccttttggctcatacctccaaggtatggacaaacattttacagacattactccctctttctgtgaaagatgagttttaaagatctagcctattcctagaaccccccggggcatttcccataaattcccatcatactggccaatgtctggcttctttcctccactactgctcaccctggacacctcggtggtgcccatgaccagggaggctgttctgatgactgggcctgatccatcagtacagccaggggctgggcccagcagcccaaggtagagggtgcacaaaggagaggcctctgagacctgctcactgttggctgttaaactgagggagaagtggggctgaggctagacttgctggtctcaaggcttcaaaggaatgtaacggaaagcaggaagaacagatcagcaccctcccagggagcagactcccccctgctgagccctccatgcctggcagtgcaccagtgtttagcaggacgcaggtgcacatcccctccagagcagttggcctgaggtggccgctgctcgggtcatctgatggctttccaggctacgactctccgaaggcttggggagagcagctttaattaacgatggctgagtgtaacctcgctttcctctcagaccctggggaaatcccaaccttcacactcagccgccaggacagtaaattaagagagagactccgggcaggaatactttcaaaaacatccactgaaagtcaaagaagtactagaatatttgacctctcattcatcccatctaaacttctctgatttttagtgcagatccaagtttttaataataaagtgatgaatttagacatgaaataaggtaacaatagtagccatcaccaccacctgttattgagtcctatgtgctaggcactgtgataaacccattaaactcatacattatttcataactcttaccccagcattaaaagttaggtatggttatccctacttttcagatgagaaaatggaggcctagagaagtgaaatgacttgcagatcccaaaactgtcaggcttcccaaacaactagtcaccgaaaccctactatgtgccatgtgcaggcaattaagggattaattgctttcttctctggttcacccacaacactgcccaagtttcatggcagctcaggaaaactgcactggcattagtcatctgcatgtctgcctgctgtactgtaacacgagcttggaggaccaaggtgggacctaactccctctatggccccagctcccagctcccagctcctggccgggtgaagagcaaatgcttggtcagttgtgatatgatgaaggcacagcctctgccctctactctcacagtctgatgcacaatgtgctaagtgcttgcggtaataaatgcgtaaagcccagatgatggagcaacatctcagggaaggcgaggaaggcattgtcactcaaccttggagactgggcagatattctccaggcagagaagggcacagggaatatttagaaagaaagaacattaccttcaaaggcagatgttttcagaattacaggtagtgcagcggggctggcacacaggaggagcggcagaactgaagctgcaaagggcgtcagctgacagatgccagtaatgaaggacaaaagagacttcccatagtttgagctgaaggctcaaagcagctttattttaggcaaatcacaatgcctactattgtaaatatttctcctctctgaacagtcttttgagactgacaataaccaggctgttggaactacaggtctgggcctagggctctgactccctccagaaagcttcctcattcgaaccccaagccagtcaatatacccttgctttgggattcagactaaaagtacaaattaaacaaagtaatatgagagcctattgcaagtcaggcacagtgctggtacattgcattgtgtcattaatccttccaaggctcagggaggataactgatgttctcaaggtctcacagctgggtggctgcagaaccaggatgggaaccccgctctcattcccagccagtctcaggaggtttcccgcatacttcaagcagcttctcatcttggatttttgttcagtgccttttcctttcctttcttcctatccaaatccttccgggccttcttggtccaccctagtctatagtgaccctcatggttggctttctcaaaattcccttgacaattcaccttgtgccatatagtactcccccaattgttgtttttaatgctgtcaacgttaagtcttctcaggctgtgagaagctcttagaggacagggacctcagacttgcactgcctttgtctcccttttgggagcagcatagtgctttgcgtatgcacgcacacacacaacaccaatacatatgtttgtaaatggatttgcttttgctttttatccatattaatagagttgggctttaaaaagtaaaatctaaatttggacagttgtgtgactttcataattgtgtgaaagcaaatatgaaagaggaatttggaataaaaataatattaacatctattgcacacttagtggggagcctgctctgaacactttgcatgtgttaactcatgtaatcctcgtaataagggcagggcctattattaatccatttcccaacttgttgcctttgctaagtctgcccaaggcaatgtagctagtaagagcaggtggaggaatttgaacctgtgtactcaggctccagagcttatcctctgaacccgtacaacagtgtatggaaaggctgctaaattgtcgacatgttccaatcaccacagtatccttaactcggattattctagataatgaatgcctagaaacacagactctcttcctggagagaaataaatgcatgcttatttgggtcgaatgctgggtgtggaccttgccctcaaataagccatccaaatgcacggtgctaagtgaggagatgtagaagaaaccccacaggtctcctacagttcctaccgctgcctccaatgcacattcttcaatgtcctttcttccttgacctctgtagcattaaaatgttttccccctaaatcaaaataatatatgtaaacagtttaagaagccaaagaatactatgaaagtttataataaaaaataacagtcttctgcttcacccacatacctgagtgccattctctcaactcctttgctatttcttccagaattcacttcaacatatctaaataatgtgcttatacagcaatttttgattgtcatgtgatgttctctactacttccctccattgcattatctgccacttctgaccagtagaatctaatggaaaggcgtcattttttgcttacttaatttcctatgtttctattaatacctccacccaaattagctgacagaactataaaatccctctgacatagactttcccgcatggtcaaacacaccaggtcatttatctgacccacagctgtcatctgcccagagcccttgctgctggagccctctgcctggccacagtctggtcaggttgttttccaggcctgctaagcattcatcatttgtgacttcttatcacctccttctttattaaaccttttgcttcctggacccccttccttggcttactttatcatgtcagcagagtgcattttccagctgctgtctgagaaaaggtgaatcgggggtatgattttaagatcttgcatggctgacgttatctttcttttactcttacacttgattgataatttgggtatagaattttaaattgggaataatttcccctcagaattcttaaggttattcatcttcaggctcttctctagtgatgtctattggcatctgcttcctaactctttgcatgtaatctcttccctttctgggagctttcaggaagatgagtgactttgaaaaagttaactaggttggccacttgcaatccgtcagcccatgtccctcagctatgggaaatgtgcttgtattatttctctgttcttattagtcagattttggacttgctgaattgatcctttagttttcttacctattttgttctatttatttttagcacacctccccttccatttatctttcaacccatttatgggaattttaactttcctatttctaatgtccaagagtgctctccttttctctgatctatacccctttgtgtatatgttcttgttttacattgacagtaatatattttctttcatatcttgacaggctatagtctttttctctttgaagttctcttctcctatattattttgtttcctttgagttcttttgttttcctatttgtcttggtcttttcttacttgctggaaggtttcctcagatgtctgatgatcctctgttcatatttaagagtgagatgccaaaaagctctgtgtcaactgctgactgtcatcgtaaggtgatggagtggggacccagggattttgtggaggatccacagaaggcactaccagagtcttttggtccccccactcttctgctgatttcttttctaatctccttccttatagaggagatatgatacatttggctgtcaaaaatgggatctagaatgtcattttcaaaattcagttggtacttatttcctctgtttttggtatggtgactctcccttccctgaatctggaagctccttgttgatatctctacggaacaagcctccgatcctctgccagggtgggagaagacagtcgcttgtccatgtgagatgagggaggaaacttaagggtttcattgctgctgcttccacgtcacatagactctgaatccacccgtttccagctctgtgcctcacccctgcctttgctgtacctggaggttttctgtgactctgcttctaattgatacctccctcagcaggggctcagcattccgtgtctccacactgctaactccatccactctttttttcaaaagtctgctggcatctcttgctggctcttgtctcttattctgtttgtccttgtgggtttactcctgcttgttttaaatcattactcttattatagtgggactccagggcggtgaggcatgtaacagtcaaccacaagctcctctcagtagcatttgacatgattctctagctcctctttgctgaagctctcttttccctcagctttaaaaacagcacactggccgggcacagtggcttatgcctgtaatcccagcactttgagaggccgaggtggacagatcacaaggtcaagagatcgagaccatcctgaccaacatggtgaaaccctgtctctactaaaaatacaaaaattagctgggcatggtggtacacacctgtagtcccagctactggggaggctgaggcaggagaatcacttgaactggggaggcagaggttgcagtgagctgggattgtgccactgcactctagcctggtgacagagcaagactctgtctcaaacaaacaaacaaacaaaaatcaaacaaacaaaaaaagccagcatgctttccaataatcctaccactgtaggccctagtcctcatcctccttttctggctcttcctctaattattaattgttggtgatcttcaggcctctgttttaaaccgatccccccttctcacctagctctctctatccaattttttgaggtctcagcttagatgtcgctgtcatgtacttaatataaaccttccctgactcctaccccaattaggttagcaccccttgttggtgcactcctaggccccatacttttcctctgagctcatcacagtcacattactgatcaatgtctttccggacagacttgaagatccactagggcagagtccctgtctgcttgttcacaacagcagccacagcctgaccagagtgcaaggcatatagaaggtgcaaaagaaacacataccgaataaacacattcacaaaaatacatgaatgaatgaaacgagagaagtgcatttaaatctggtcttgtcacacttgctgtgtgatcttggaccagtgagaaagcctttcagggttgggggcagtatggtggctcatgcctgtaatcccagtactttgggaggccgaggtggatgggtcacctgaggtcaggagttcgagaacagcctcaccaacatggtgaaatcctgtttctacaaaaaattagctgggcgtggtggcgcatgcctgtaatcccagctactcaggaggctggggcaggagactcgcttgaatgctggaggcggaggttgcagtcagccgagattgcgctgttgcactccagcctgggcaacaagagtgagactctgtcccaaaaagtaaacaaaaaaacaagaaaaaaacctttcagaaaagagccttaatttttctgaaactcagtttgctgtgtctactaagttgggacaataatcttaccatcctattcagtaggttgtgtggatcaaaaaggaaaaaagaaaaaatggtatgtcattgtgttcagtaagctaaactcttacacaatgtaggggattattactgtaatggtaaactctgttacacagaaaattcttgtctgttttggggatgcggatgtaggaaacagaacagcaggctcgagttttcaaatctcaggattctttaaaatatgctttctttcttaaagtgaatcctcagtaagccttctctgtattttctaacactaggccttcaagatctagagaccatctggggtcttttttttcctctcaagcaaaactggtttagaaacatggtgggccttcatggctaatggttttaacttaatgcaatttcttaaacaacaaaagcaaacaacattggaaatatttaaaatatttatatgcatacaggtgtgtaacagagctgacaaaacatacacgtgcccatgtcaccaggggcacttaagtaattacactggcaggaagacttttgctcaactcagatccttttctggtcctttacatttgttcattttatcacttgagctaaatggggagaggaggaaactcttagaaaatcctagctcttagaggttttagggttgacaaaagtgttgtctttctgatatggtttggctgtgtccccatccaaatctcatcttgaattgtagcttccataattcccatacgttgtgggagggacccggtgggagacaactgaatcatggtgacagttctcccatactgttctcatggtagtgaataagtctcatgagatctgatgattttataaggggtttctcctttggcttgattctcattctctcttgtgtgccaccaggtaagatgtgctgtttgctgtttgccttctaccatgattttgaggcctccccagtcatgtggaactgttagtccattaaacctctttttctttataaattacccagtttcaggtatgtctttatgagcagcatgaaaacaaactaatacattttcacatccccatcagaatctttgaagcaccacatcaggctcagcttggtagatccactggactccagtgatcaacctgatgaaccttctcctgaccataccctgtaaatggtgccttggcttccagggaaggaagtgggcaggtggaaaaagcaatggtctcagagttgaaagacttgaattccagttcaaactctacctctaaatatgtggattaggcaaattaccttgttattaatacacatgtttatattgtaaacataacttctgttttctttctcttggactgaaaattataagcattttcccatagttcagacttttatgataattttaatggctatataatattaagtagatatactatattttattatatgctttcttataattagacatttggattgtttccaaattgccacaattttaaacaatgctgtgataagtgtgcagcttttcctaggtactggtttatttctttaagagatactctcagaagctgaacatttttatggtttaatacaaaatgccaaattgctttcccaaagggttgtactgatttatgatgcaactagtaatatatattggtatagttccaccgcagcctcaatgggattggatattaacttgaaggattctaacttattaggctaaaaaaaagatacaccattattttaatttgtactgcttcaattattagtgtggttaaacatatttcatgtatgtttattgcgtactatacattttttaaagcttttctacacataagctttagccattacctgtaagatcataatgccttttttcctcccacagcatctgagctttaatgtaatatacatattaactcttggtcactcatgtttactgcatatattttcttactctgtgatttttcttattttgtaagttttataagacatgtggaaattttacatatttatgtaaacatttctcaatctttttctttgtggtttcttcagtgactttagtgcttaaaagtcctcttcgacccagagatatgtgaatattgggttttaccctcttctagcttgacttttaaatatttacctctttaatccgtctgaaatttattttggcatatggtatgaggtgaggtctgaatcagaggttgaaaatgaaaattcctctagggggcaggcaggtaagttaaaggagtaaagcaggccaggtacatgtaagaaaaatggaggaggtggagatgggtgaattacagagtatgagttccatccaaagggggcagggccttgttctcacaggaattttggtcttctaattttttaagggaagccataaacctgtagttttatggagggtcatccaatgttaaatagtgggccaacactgcaggctaaaactccttctctgtgtcttatcaactgcatccatctcactgaatgccactttgcagactcgggttacatttgatgcttttccaagttattgcaaaaacatttattgatccagccttctcttctccattaatttgtaattcttcatttttcaaataataaatttttacatgtaactggtaatatttgtagtacttcactaatctgcttgactcctattctcatttattaaggatttatgatatattaagatatttaaagatgagtaccctttcatgattcttcttcctgtaatttcttccatactttcatctgtttattattccagatgaagtctttagccatgcaatcaaatctcttcaattccctttaggattctgtttgacattccattaaacttataaattgacatatttagagtatttcaccttcccatctaggaacatgttatagttcctaattattcatgtcctgttttatagctctcaataaaattttgcagtttttgtcacacaggtcacatgtagtcctcattcagatgatactttaatttttattgattttttttgactggggcatttttcattatatttcataagtggttgttgcaggtatatgggaaatctattgacttttggaaaagctatcttgtgccccagttacaagttctgaattcctattaagtaaaatagtttttcagttaatgttttttttttctctaggaatacaaacacacccttcacaaataacgatgactttttctcagcctcttgtttctatgtcatatcttatcttggacaaagcttctaaaacaatgctaactaatcggtgcaccttattttattagtgattttaaagataatttttcaaacatttaaccaggaaccataatattgacttttgactaaaagctgatgttcttatgatgctgtttctttttctgtctttcgttttcagtatttctatgacttagtattgtcctcagaggtgtttctgttacttagtgaacacaaaagacacatctcagcacggtgcattcaaaagtgttgggggcttgcaaaatacatgtgaaccagatacacctgctggggtccctagctctgcctctgcctgccttcaacacaactccctgcctaatctggaaaatggagatagtaattctgactgcataagttggttatgagaattaaaataagttaacgtaaataaattgtgcttagggtaatatttggcacctaagaaaagctcaacagatttcactttcttcctccatcacttaaaagaaagagataatggtagaacaatctcccaaatgcaagctttccaaggaatagcgtgcacttacaggcctgagaaaactcaaactctatttgtggaaaacatcacgttagccttctgctttaggtcacagggctttttctcactttctcaaaattatacagtccatcccttgtaccctgactagactctcttggcctatgacacaaatgaaaataaaaaaaaaatcaggctgacatgtaatatgaaccaggaatgaaacaaactgggcttcttttagccgagaacatgagcattgcttagataaaggcatgaacaagcagctactcaaactaaaaccagatgctcagaggtttctggcttacaatttgttataacccttcatataacactcattgtgctggcgtttcaacagaaagtcttctgctctgtttaagcagcaagaaaccagccctaacctccctcaaatttgccatcactaaatctttgcttaattgtaaaggagctcttcccccaaacagagattcttggtatatactcttccgcccagagaagtgtcagggagtgacaaagctcgcaccctgcagcatcctcagtctgaactgtcttcccagtgttgtatgaaaggaaacacgggggtactaaggaactgggtactgacttgggaggggcccaggaatgaaagccagtgtggatagagcatgattcttcaggcagactggcctagattcaaatcctggctctgctcttactcaatgtgtgactgggcaagtttgttaatttctcggaaccttgtttcatcatctctataaagaaaataagagttgttcctgctttcccaggtctattacaaacttaaagttaggtaatgcaggtataacacttagcatgctcctgggaccctgtaagccctcaaaaatgttagtgcatgttactgccaataacaatagcgaacacttatatagcacctattacatgccaggcactgttctccatattttacaattaactcattttaacttcataattaccttcatgagttgggtactaatattattgtcatttttcagataaggaaactgaggcactgatgggttatctttcttgcccaaagtcccactgctattaagtggcagagactgtattcaaccagctacctggcttcaaatccattctctaaccactaagccacactgcctctctttattgttatattgcacactattttatttagtgccaccttgagactgccttcacacagaagggaacacacacaatttaggccataagtgggttactctgtcaggcaatccatttctggaaagcactgctgaccctgagatcagtgtgaatcctaccctgtatcccactcccctccaccttcaaggttgatctcatcttccttgccctctccccatcccatgggaagaggtgtgtctcctcctttcctaggctcctccttctgcctctgcctgccattccatgcctcccaccttcttccattagtcatctcccctctctcctgggcctccagtcttcccccctggctcctttcccacagctgacagcacgtccagggcttccccaccttacataaacctttacttgaacctgcctcctcctcaggttactcccatctgtctccttccctgctctgtctagaagtaactgtttccactctatgcctctcattcactcctgaactcgtggtgaccctgcttctgcctgcaccaatgggtggaaactgctcccaatgagggcgccagtgacctcctaatgaccaatgccagcagcttctttgtaatcatcttcctaagttttctctactttttcccgtctgtcttctgaacgttggggctccatccttaactccttgcttcttggttgatacatctcctcaggtactctaagctccacctgctactctgttacacccacactcatgctgtccaccaggtaactgtctcaaattcagagctatctccaagtcaagacctacttacccatctgcctattagtaactgccaacaactaacttccactgggaagttccattagcagctcaacaactaacttcccctccttatttcctaatgtaattagtgatatcaccatccatctattctccaaggtcgaaactcaatgcctctcccttacaaggtaaaatacaagtggtcaatagaaccagcctataatgtcctggaatgtcttccctcctttatacaaaagcggtggcatttgctttagtgtaggttctcttctctcatctaatcccactggctaaagaaacagtcttccaattggtctccctgtctcatttatatatgttgctgccagccaaagatacctatacaacacccaactcatgctacatcttcacttaaaaaccatcctgtgcttcccactgctttcaaaaccagacttccaagctggctagccaacagagacaaagcctgtcccaggctggcctgaacctcattttccaggctctcctctgggtatcaccctctcatgtactcctcctacttccagtctcctggacataccaggcactcacacaacaagcgcatacatgagagaggacatggtgagaaatgtgtagatattagggtcagacagaactggattcaaactctagccccttcactaactgggtatttaacttctgcctagtcatttaaatattctgagcttcattttcctatggaggggtggtaggcagaaaatatttgcttcatatgcctattgtaaaggtttgaaatagtttatgtaggccaggtgtgatggctcatgcctgtaatcccagcgctttgggaggctgaggtgggagggtcacttgaggccaggagttcaaaaccagtcggggtaacatagagaggccaggcatagtagctcacacctataatccctgcactttgggaggccgaggcgggtggatcacctgagctcaggagttcaagactagcctggccaacatggtaaaatcccttctctactaaaaataaaaaattagctgggcatggtggtgggcgcctataatcccagctacttgggaggctgaggcaagagaattgcttgaacccaggaggtggaggttgcagtgaactgagattgcaccactgcactccagcctgggtgacaagaatgagactctgtctcaaaaacataaaaataaacatagagagatcctacttctacaaaaaataattttaaaaaatttagtcaggtgtggtggcacacatttgcagtcctagctatttgggtggctgaggtagaaggattgcttgagtccaggagttcaaagctgcagcgagctatgattgtgccactggactccagcctgggtgacaaagcaagaccctgttgctaaaaaacaaaaaaaaacaagaaatagtttatgttaaatatctaagataatacttagatacagtatgcattgaacaaacagtagccaaaattattaattttgccaagtagttccagagaagaatttgtaaagattgaaaagccccgaaactagaatgggacattggagaagttccttatgaactctgaagaaagccaaatttataagaacaaataaaagttagtgctttggaatgttctggaactcacatttccatttttgagttaaggagtactggcaaagaaagatggaatctagcagccttgggatgcataaagtcctgaggacagaaagagccttccttagccaggtacctggcagtgccttgaaagggtggctgtgccttcattccctcaaagctgccgataagaagttcatgcccataacagaagcttctagcttgcagggaaaaacatcagtgatgcctgaccttcttgctaggtgttcactgaccctctgatgggggtcttccatgttccctgtcttgtcaggcagctgggctccaggggaagttactggagttggattcgaagactcggctttatgttgtgtgagccactggtcacagactgtttcctcatctttaaaatgcaaataatgatcctttccagccagttcatctgtgtggttgagcagagactgctactatcttatggtcttctcaattcctccttgttattaactgtgtcccctaccaaattcatatgctgaagcctaacccccaatgtgactgtatttggagatagggcctatatggagataacaaaggttaagtgaggctcacagtagtggggcattaatctgataggacttatgtccttataaaaagaggaaaaggccgggtgcggtggctcatgcctgtaattccagcactttgggaggccaaggcaggcagatcacgagttcaggagatcgagaccatcctggccaacatggtgaaaccccgtctctactaaaaatacaaaaattagctggttgtggtggcgtgtgcctgtaatcccagctacttgggaggctgaggcaggagaatcgcttgaaccaggcaggtggagtttgcagtgaaccaagattgcgccaatgcactccagcctggcaacagagtgagactctgtctaaaaaaaaaaaaaggaggaaaagacaccagagatctctttccctccatatatacacagagaaaagcccacatgaggacgaggacaaagcaagaaggcgactgttgccagcctggaagagaggcctcaccagaaaccaaccctgccagtaccttgatcttggatgtgcagtgttcagaactgtgagaaataaatttctattttaaaccactcagtttgtggtattttgttatggcagccctagcagactaacacactcctttatttcttctttttagggtgactcttttcttgtatttttctttctggattcccacttctgctctggccccaagttgttaataattatttgtacactgctttccagctcactaagtactcttctcaaaatatgtcctttctgcctcacaacctccttctacatgcctggcagaggtagcagccctcctctctgctcccatggagctcccacagacccctttgttggcccaggccacattatactagaattatttatgaaagggttggttctcccgattgattataggctctttgagggcaaagcttctgttttattcactgtgaagcctctagcactcagcaaagtagatgttcagcaaatgctgaatacttgacacatttagaaacacactgagtacctaccacaaatcctatgctttcacatcattgtcagattctctaaagtaagtttgattcccaaggatagatgagtttggtgagggtaagacttatccaaaatcccacagctcataactaatacagcccgcatctaaacccaggctgggctgactccaaagcctttgtcctttcctcggaccacaccatctatctggtcagctctacccccaactgtactcctgcctccaacaacctcaactatcgaccaccagtgccaattccagcagagattcacatgttacttgcagctaggttattcctaagagggtgttaccgaacaggcggcctcacatttaattatgtcccacatatcagtggtgctgtaaagggaaagaaaaaataatatcactatgtgagaaccctctcaaagctgccgttctgtcagtggaaaagccagctggcaaacgggaatgagcaactgcctttagcgactgacagaaaaaaaaaagagctaaaagaaaataaaaatttaatcatcagttataaaaattaaaccactgctgacaaaatatcttctatcagaatctacatctgaatggaggataggagcaggggttccttcaacaggagtgagtaccaggttagagatgttctataaataagtcagatgagcggactgcaggcacgtggccagcacactgtgagcctaggaggtgtgatgccatggtctctaagaccctatctgtcttgctgattctctgactacgagagggtataaagacacacatggatgtcaccactccagaaacttggatttagacctggtcactgagatgtaagagtaagaatgtgtgttttggattgctaacctaactctgctatttcctatttatgagatcttggcaattagcattagatctctgagcctcatttctgaattaggcttctacgtgtttctctggatatcttttctaggacgtgtgcttaccacttatcattatttatctttacatatgtgtatatatatttgatgattgtatttaaacttgagaatccatctcaaactgcctcagacctgtctatgaacaccatggaggcagaaagcatggctattttacataccagtgacagtacatgcctgctcagaactggcacatgaaaggcaatgagtaaacacgggttgaataatgaacaaatgaacagatgcagtgtctaggtctgtctgcaactggcgtctaccactctggacttgctcctgctgtctgtccccgttaaagcatcatgcaaggtgcttcgaggcataatggaaaacgtccatggttcctggatgatacaaagagactgaaccaagccattttccttccacctcaattacatgggcagcttctcctttttctcagcttcgcttaccctaacttactagcccatgagaaacctcaaggccaagtaccatgtctgcctcctggctatacccaatgtccagacaagggtctggcacacagtaagagggggtctcagttggtctttgttgaaccaaacagacctgatgaagtctgtggcagacactgctatgtgcctaccccatattcatttcccttctctctgagagaaccctaattttgttgagagtaccaatgtagcaagctaaaaatatccccttcttcagacttccttatatctctgagtgtccaagtgacacagctctgccaaagaaatgtaagctgaatgttttaggaaaaattctgctttcctacttccttatcttttcttatttttcctgcctgacatgcagacataagccccggaactatagctaccattttatgaccatgaggtagcaagcataaaaacagcagcccatctcctagacaaaaagtgtgcaccagaacatcaaaactctacttaaatgctactctagtggggattttggttatctgtataccaaatgccttgctaagtatttcccacagaaagacaagcctttattgcttggttcctgcagtgtccttgggctactttttcttctttcctgcccttgcaattccaggtaaagattcagaaggttcagcaatcgaaggtaagatcccaagggcagcagagatgctgggggtggggacagtggggagccctgcccttcagtgagcagagacagctactggcagggctagtctctgagtctgcagatgtagtgctctgatactcctagctctcttcccctcagcagaattttagccacagtctgtctccaatgtgctgacctgagctcccttggcctacaatttcattccacttataccagattgctccaaataaatcactgtatcagggagaggtaaattcacagggtgcttttccaaagaagtgtttccattagaaatttcacaaagtgctgccaatgtcatttacaagaaggttaatttattaccaagagacctcaattcttcattgctgtatttatatcttataatataattcagaggaaggggacataaggagaggtagagaaggggcttattaaaaaccaaaaatcactcctcaatcatttttcttagtgtcttcaatgaagtagtgcaggtttttacacaaattatggtatataatgtcagagatttttctctccggatctttgcaaatgcactcagaggcaaatacccaatcaaagtaggagaaataaagaaatagcacaggccagtgttctttggaaaatcatgaaggacccaattttggtgactcttggaagataggaacttaggtgaagtatcgaggcatacctagagaaaaagaggaatggattgtagggaaagcaaatgaaaaacaccactgaacatcattgaacaagtcctttgtccttcctcactccctccttccctccctcctttttttttttttcttctgaagtcactaagttcaatcccagtaacctcccttgaccacataaattcatgagctcttgttccgggtctcatcagatagacctctagctctaatcattttattcccttgctcaaaagcctgcgatagtgcctaatacttaaagaataaactttttgcttagcgtggcatttaaggctctccttgataactcatttctgccctttaaggcatcctgggctctagtcaaacagaactgctggctccttatagccagctcttaattttctgcctactgaactttcactcatgctggtagtacctactacctggaataatttccttaacacctgccctcccattttccttttttaaatgtaaaaatttcacccattctttaaggtccaaattaaatgtcacttcatccagaaagccctccttgacccatccagctaggcaagtcctcaccttccttcaaccctcatgggtctttgaccagtgactccaggagtgactgttcttactcttttccttggcttagagctgtttaccgtataaatctttcatctcccttaatctggactatgagctacttttgccagaaaccatgtcataccttccctgtatcctcagcttgggaaagagcaaggatgcaatccttgctggataatggaaagcaaagaggaaggaaggaaggaaggaggaatagaaggaagaaagaaactaaatctgtttctaatccctggacataaagaacagactgatttacagcaaccacctggatacgaacaaaatgactcttctcttcaatgagcaccagagaggccagagcaagtttctcgtaaaaattcccagtccctacattttctaacagcaattctcatttcttttctctaggtttctaaatccactgcagggcacctctgttatgctccagcctggctcacattgccacaatgtcaggctgatctgtcctctatgcttcagcatcagccaaaatgaaaagataagatgctacctgaagaatgaaaacgaacttgttaggtcttgagttgcaagcaatgcatacaaaggtatttttacttttaaagttttagatgtgagactttcctcatggtcttcttaatgacttctcaagaaaacttcttgggttgatgtaatatggttattaataatggaaggcaagggggaaattacattccatataatacaaatggaaaaaatatttaatagtaaccgtgacaaatagtgagagactgtggtattgtggggaccttaactttgggctagtcaaccaagctttctgagccttgatttcttcatctgtaaagttgaggtcaacatatctattgtctaaacttcttgtgaggattaaataacataaaaaagagagctaagcatggtcctcaacacacaataggtgttctgtaaatatttgctgaatgaatgaatgaatgaatagatggaaaagagaagtaagtgataccaaaaacgggggtttgatgctgggaagaaggcaaattgctaaaggaggaggatcataagctttggagtcagacagacgcaaattcatgtcctaacttttcttttaacaaccctgaaccttaatttactcatctgcaatagggaggtgataataaaaataagaataatcatctcatggaattactgcaagtcttaaagaatgtatgtgaaaaccctttgcaaactgcaatgagtgaattatagttcagctagtgatatacattctcctcctttattcaacattctggggtcagctaggcagcccacctcggcccagccaggaccagggtcagtaccctcagattctggatctccacctgcagggaaagcctgttgtttctgaaaaaagcttccatgttttattctaaaacttgcttggtttcagtgctctgtgtgtgtgtgtgtgtgtgtgtgtaaatgcatctagttcactgggagctctgtcaacatcaggtctctgtgcgtatatatttgtgtgtacggtttgtaaagtgcttttagattttttaaaggcaaaagttaaactcatttcatttaaaatcatcagctggattgcattaaatggaggagaaagcaaaaacatacacaatatagccatttgtgaaacacaattatttctcctgttacttaattacaaacagacataaatactctggattctgacatctcagatcttcttaaattctagatctgcattttgacatataatgaaggaagggtcagattccaatttgtgtgttaagcaaacccgagagttacaattatatattggggccataatgacttcactaaaacaagacctaaacttttaattaacctgccaagacaaattactactcatagctcacaagtaatgatcacagacagctgagactcaatgccagggactcttggggaaagcgggattaatagcaacatcagaatcagtctgtttttgtattagagaaaaaaacagtattcattaaaccatcactgtagcttgaagggacacagacaggtcagaaaggcagcaagagaaaggtggaaggagaaagaggatgggagagaatattaaaacagcttccatttattgagtgcttgtggtagcccagagcctgtgctaagcactttctatttctctgtttaattttcacgatggggattgcaaagtactattgttccattttccaaacaagaagaatgaggctcagagaggtggcatgactgtctctgatcacagagctaacatgtgacagtggggaaggaaggaatggaaagtagttctcataaggcgtctgtcttcaaagcttccttgacagaacaccagaatcaggatcccctgggcttcaccgcaggcctactgagtcatattttctggagaaaaggcccaggaatatgaatgttcccctggcttcccaggtgattcttttattcaacagtatttgagaaccatctgtaaagtactatgtctaaccccttgccacttaaaatgtggtccacagcagcttcagtatcactgggtgatggttggaaatgctgaatctaaggtccacccagacctgctgaagcagaatctgcattttatcaagatcctcaggtggttcactcaagtctgagaagcacggtatgacctattggccctaaaatacagggttaagaggaagtgaagacaggtgtccacatttaggtgagaatggcagaaccaaagggaaaagaagaccgtctccctaattatgagaagacaggttagcaagctctgacaagccaagggttggcaaagatgcctcactgtgcctatggtttattcctctaagatgtgtatcctaattaaaagtggctttcttctggggtttgattaatatcctttcatatttatgctaagttattaaaaataaggaattctgattgtaaaagcacttagttttgaacaagcactactctatgcttctctgtaaaccacgcttaagggaaatcaggccacgagaccatgaagctgtaactcaagcaccaccacgacttgatgatcatgtccctaaactgtcgtcatcctatccggagagaaaaaagaatcagggcctgtagcctcccaaaccctgccaagtgacagcctaacaagatgacggccagactggggcctctgatgacagggaacaggctatactgttagccttaatgtcaccagtgactctgagctgcagcctcaaataccagaatcctgaaaaactaagagctgggaaccccaagtgatttgtgcaaggtcaaaacccaagtttgtgctggagactgaaaatggagcacaatccctgccacagttcacaagaaggtatccagggaggaaaccaacagcaccacaactgcctggcagttgctgccgccaatcctgccaggggagttcgttccctcattcactgcacgacactgcaccccactgggctgggtgccaggaggcagacaagatcctgtcaaagcccctgccctctaggcattcggagtccagcggctcagacagacatctctaaaacaaggactgtacaaagtgataatttctacatcagagctagttgcctgaaagcctccacctccttcattttgccaagaggtgaaatattgagcctgtatttagagcagaagcttttcagccacaccctgtatttaatgggaagatactttctgtctcaacacaaagggcaaatttcaagtaagcaggaaatggactgaaaatgactcctgttgtttagaagtaagaaccaggggctgggcatggtggctcatgcctgtaacctcagcatttggggaagtcaaagtgggcggctcacttgagcccaagagtttgaccagcctaggcaatgtggtgaaacctcatctctacaaaacatacaaaaattagctgggcatggtggtgtgtgcctgtggtcccagctattcgggaggccaaggcaggaggatcacccgagcccaggagttcaaggttgcagtgagccgtgattgagtcactgcactccggcccaggcaacagagtgagacctggtctaaaaaacaaaaagtaagaaccagggtcttgtaagagttttggaaacctagtaccagattcagagattttttggggtttgtttgtttgagacagtgtctcagtctgtcacccaggctggagtgcagtagtatgatcatagcccactgcaacctcaatctcctgggctcaagggatcctcccacctcagcctcctgagcagctgggaccgcaggcatgcaccatcgcacctggatacttttaatatttttttttgtagaaaggaggatcttgctatgttgcccaggcaggtcttgaactcctggtctcaagcaatcctcctgcgtctgcctcccaaagtgctgagattatagtatgagccaccacacctagcctggattcagaaacttttatcaaactccatttttccatgtcagagagattcctagccaacgactgagacagagttttcaggtgaactccagaccacatagaactgttgattaagcagaaaccccattcccaggtgttctgtttaatggagttatattcttccataacttttattttcctgtagggaatttttatctccagactatgtcatagtgcttctaatataaactcagaaaaaaatgttttctgacccgaactgccaagaccactgtgtcctgcagcacattagggcagtctaagaagcagacacattctgtgcaatgtattggtaaagaagagaaactctttaaatagggtgccaggcttcccagacacctacaggcttctgagctggcccaggggctcagggtgaactgggagctgaggccctcttccactgcgagggagagtgaaggtgttaagcactcatttatttcgcacatcagggcccactctttgtcagagattaggacatctctattctcaacaaaaccccagtctgactgatggcatggttcatccagccttttgcactgctgttcttactctctcttcaagcctgtatcctcttttctcattggccaggggttgttggctccaaaacaaaaaagaatgaaaaccaaaacaaaacccaaaccacaaatcagtgaggtgaaccaagtgagactctaaagacaaatacgtgggagagaagtgccaagaagagagatgttgcctctgtgtggcttgtccaggattcctgtctcacaattccactcccaccttgaaatgcactgcacaccaaccacagacagcaggagagaagcagcgggcaacagccctgggctcagaagccagctcagaatggcgggcgattccctgtgtagcaggcccagtcaggagggtctcgtgccaagctccagggccatccacagctctgacatccccttgtcagtgtcagtcccagaatctccatgcagcctccgaccaaaagagacaatatcccacagcccccagagggtgtggctcccttaccaatggcagtggtgagaaaggaaaccacttctgactcctttccgtcattgtaaaaagccaagtgccagattcctgaatccaaatactggatgaagcctgtctcatggctggaggggggcacagttccccgagactggcgcggggtcccctctaggctccgcgcctcctgggttaggagcctcctgccatccagcagctccacaaagtcaaactgaaagacagagaaagcacagttagcagtgggtctgttccaccacgcaccagcgtccttcccggggcttctcctggagaggacattgggaaacacaaatagaggcaaaaagggcccaaagaggctaagggtgcaggaaggttgatcaatcaactcaactcttccccagacccattttttcatggtgatattctcccggttctcctgtgagtgaggcataattagaggattattttttagtctcattttgttttagttctttttgtactggtggtgaatcttcccctggctgagtctgtaccaggacaaccatgcttttttgcaatgccgggtgtgtggttagaaacacagccactttacaattggttgaacttcatgcaagtcctgacaagaatcttggggggtggtggaggggagcagaggcgggtggctgggactgggattggagcattggatgtgattggaacatcagtcatgtgcaaatgaaaatttgatttatgtctattttcctttggtcaatggttctttctgaatgttctagtttcagggagcaaatttaggggaactcaactggattagctcaaaactctatcaataattacatgctgtgtcaaatacaattgccaattgatcggagactgcttgtgtgagactccagaaaagtcagttacactgtgttaacaacaagtaggtggttaagtcctactggcctattagcaagcaaattgggtagttatctagctagctagctagctagctttaaaaaccaaacaagatatttattcaatttcatgaaaaactgtctggagatatgcaggccaggactagcataccagtctgcagtcaacagggtctcaaggctcttctcctgtgattccttctttagcaaacatatctgtcttttagctaaaaatcttaaataactactagggctaggaaggctgcatttggcctaggaatgcctgatgaatgcctatgatttacattactccaattccagggctggcaggaccttgcacaagtgtctgttcttcattaatcatgattggtaatatgtcagtcatcctggacaaggttttttcagtgtttctggtgtgcatgtgtttgagtcaatgtgtaaccctgaaggagagaaggaataagaaagactagggaagaatcatttattctgagccaggtcctgcactagctgccttataaatgttattcttctttcttcacaacagccctgccaagtgggtattgttaccggcatcttatagatgaggaaacttgctctgagaagctaagtgatggagccaaggttacaatgctgataacaagaggattcaaactcagatctgtctgattctaaactgcatgcttttttctctagatcacatttcctggataatttaacttaggagactgagtaatagcagaaaggctgttaagagatttcctagaattctttcctcctagaaagccccagtgatataaccttactcatctgaaagggtgggtctgagagggactacatgaatgaatgggctataaaatatataaatgtcccttcaggcttaaggctctggattgggcttcttaactttgggttaagatttgaggtaggagcccatgcagatcaacagggtatgtggggttctggttacctgtgtatgtgaaggagggaggccttttctgccataaatgccaaccagggctgcctttcccagagacacattgaatttcagatgcacaggatggtctatgaacacttgagatctccagaaagtgccaggaggaatcttctgggaagctcgccttcccacatcaatttctccagaatctatgaaactgtcctctggaaagaaactactgggctttcctaccaagatagagggaagggaagacaaagacatctcggttagccacatgggaaacgagaaaccagggcatctgaacacccgggactctccttagcctcacatccttctctataatgttctgctgtcagcttcctccccaccctggccctccccacatggaggagtaaaaaggtccagaacttttttttccccccagcgatgctcaaattattctgctaaaaatatgcattcttccaaagcagtatgggtcctccccaagggccatctgtttactgcataattccacagcttgttaagatatattttgatcctaaaaataatcatttgtggtcacatgaaaatagctctgtgatttggtgtgttaaggggctcacggtaaaatagaaaggatgggggaacaaagtgttattaattttccaactcagaatgagtcccccagcagtgggaagcatgacttgatggagtaaggtatttaaaaagctcactaatttgtgtatacattggaagccaaattctgaggctgatatgtggatggggggttgtgcttagggcagggttaggggctggggaagatgaggaaaaggtacttctgaaaagaggaaatatttctgcaaaatgttcctttgtctttggatgagggtaaatataatatctgtgctaaaatgggtcaagctgagggaatttcccaagttcacacaccaagcctatgccatacctggaaattccacccaggctcccaaccctgtgctaagcatccatgcagggtgtcatgagtaaagtctctcggccatttctatactgattaggagggtgacagctctctgggggcaccacaaatgcaagcaaggaaggcagcttatcaaactccttctatttagtaattaagcacactcatatgtgaaaaatacaaaccctaacttcctgccagacatcagcctcctgaagagttgagaaggaacaggagagactctagggatgttaggaagaccacccttagcacactgaaagaccagcatcaagtcaacaggctgtattttatttgttgttatgaaggacttcctgggtatcctggttccaagcggtttttttgtgatgttagagatgttcgaagagacacttcagagaacaagaattcatttgtaaagaaaacacactttggaactttttgtaaacagcatttggggaataggaaattaaaatgtctttctttccccctagctttgtaagactccttacaaagcacatttgatgctgaaatgaagcctggcagggcattgttgtagtcataaaacattttactgttttaaataataaaattcaatttaaatgttaaacttctccatatgttatcactcccttataaactcctaggcagaaacatcaggtttttagcttcaaactgttaaatgttattttaattaaaaatatgccaacaaaaaagttaaaatgtgcactatcaataaaagtaccactagtattctgtcattagcatgggaaagagtttgctttttaattcctttatggaaggaatgtacttcagacatcaaatatagatacaaaaaccaccacgctgtgattcacaaagttcaaagacagaacccaaattcacaatgcattgagatggaagagaattatttacattctttcttatctgatttttgggttcccaataccacagccattctatattccaggaggaaatagtctgccatcagcttttaattttgctagggaggcagaactaagagggagaatgaaacaaagcagatgccttctgagctttttcctcctagaaactgaaaagaaataagcacaacactgctagttccaaggatgcgtttcctttgtgagtaggtggcagtctgagctgatgggatttgagaattgtctgaattcaaataattcccatgtctgaaaataaatactggaaaactgctcccccattttagcatgctgctggagaaccctgcacagttcattttctccctcaatgagcgtatttttaggagacagtgactgtatcagctaggttttgcagccttataagtcagaggtctgcaggcctcaggcataaataagttggctcttaccccagaggaggtgacaaaaggggacttttctagcactttagtatttcacctagatgggctggatgggagggagaaattgtcttgagtgtgtatatgctgaaaaaaaaaagtgaactctgctctggggcatatcctctatcaggaccttgagggcctctggtcaccagtggtctccaaatcccaccacagggacaggctgggagctgttgagggggaaatgctaacagcctgctgatcacctttacctgaggggaaagagtcatgacatgggctgggctgagggttgggaaagtgaaatgccttccttctgtcttgcttgttaaaaatccttattgccttacactttctagatgctataagactttttgtccttaattctgagcacaaagctgtgagcactaggatataaaatatcctccaccatgaagcaaaagccaccagtggtggaatcataagggagaggagaggctagaggcaattggaggcaaaaagtcttgtgtatacaattcttcttatccctacctacactctggaagataaaaatagtaatagattttaatggtggaaatagcaataaaggtagaggtattagtattactagtcatattggcttccacttgatgagctccaagcacagtggcaggtaccttcctgtgtatcagttcagttaattaacatctgtatatggaggctcagaaagcttaagaaaccattttgggatccatctttatttattaaaatatggcttctgaagggatcaaattgatgaatgattaattaaaacactacaaagacattctcagtggtggtggggtgcattgaccttcttaaagatcaagagtccgataggattcacagccccagcaggctaaatatcagagcttgaccaggtagatccaaggcccattaaaaaacttcctggcatcctagggtacaaaaagatcatttgtatgaattaggaacctacaaacaggtccaaaagttaaagggcaacagtcagggtctcaaaacattcatgagaaggacactctacaatcactgggtgcccccagagacttaacaaacactgcaaaaagcttaggtcacaattagggctcccctacagcaagattaggcctcacaaggcagattttactgataatagtcctttgctttgtaaagctagatagattcaggcttcccatagcaatgctgtgcaaatatgcaatcatgtctataaaagaaatttcttaatgaattgctaaaatggatagctcagtcaaaaagcaagatttggaagaactgaaatttcatgcacttctcaatcatagcctttactttcttgaactgagatctacctatatagattctaaattcctaatcaactaatgttctttctctccctccacctttttggttcttttcaatgcaataacttgcatgaagaattctttagtttccttagcaactggttgaaatttatttggttatcaaaataagctgttctgttttggagagcccagctgagcctgcgcacagcaatttgcatggttcaaactaatgggcaatttttatttcactgcagaaagaagaaaatgctatcccaagcccaccaattcaaccatcagaaatgcctgtttattcaatgtttttttcccttccccattaatgtgtaacacaagttcttgtggctttagttcgaaaagctgctgtatttggtttctgtcccatcacaaccctggaatggttacagccatttggaaaatatagtatgaactgcagtttcatgttattctcaaggacatgatgaacatttacaattcttggattatcatacatttaattcatataaataagaaatatatattctttaacatattcaaaaatacctcaaacctttgcagaatctgtggcagggagagaatgttaattagtctggacttctgggattttaataactaatatggaatggcatgggatttgagtggataagaagaagagaacaaatatttgttgagtgccacttcaacattaggctttgaatggatagatatagttatccttgttctacagatgaggaaggtcaagggagatgcagtaagtgccataagttaacagagccaatataaagcagggtcaggattaacatcctatactgtctggctccaaggcccatttacccctttctatcacaccacattgctttctccatcattgtgaagcagagactctaatcttaattctggaatcagctgtcttcttgaatatcctcagaagggatgagaaatatgtgctcacatcagagttaaagactttctgcattgagatatatctaggggaatgcatttttaacatcacaatgaaaaacatacactgagtagacattggtttgaccagggcaaaataaaggaagaacattgtggtctcacataaactataggaagctttgtcctctggtttccagtctgacgtattttttttgtcacagtgattgcttctgatgctgaccactttgcagcacagtgctgcattgaaggcatttgcaaacaggatttccatttgcatcagtaatgacagataatccctttaagcaaaaatactccaattaaaataaaccaataatctggtgcaattttattttatctcttatctgcacctcctgttccttacaaaaacaaaacaaaacctaaacaacccacagactaatttcattagagtgagagatttcagatagatccgactcctgtttaaagaacgtctgatagagatcatagagggaagaaaatacgttttgccaaatgagatcctttaccagttccttgagggttaagcatattttaaatctacatttgtacatgctgatctaaagacagtcttcacattatggtattaacccatggcatctgacgctagaagctgacatgggcaccacgagccaaaaggcaggaccatggacagggccaacatgacattctgaagagccatctggttacttacatgattctattgctattttcatatgtagaacttacaaatcagaatgcaccttagagagaatctagctcaatattctccttttgaagaggagaaaaggactcccagaaagtgtgttcaagggatttgcttaaggtgataccacaggtcagtggctgcagctggaattgaactcagggcttctgacttctaacccagagctcttcccaggtcccattcatgattcctccctccatatcctattaagaggcaaagaaagtgtgcactatttagcattttaagacttaaaatctttgcaaatgagaggactggctttgtccctcaaaatagtgggcaggggttctgtgtggaaatgatctcagttcccacttcccttaaagatgaccagaagccaagagttgactttggccctcaggatcctcatttcagaggtcatgagtagatactctgaccaagtatatgccaccctgttaaacaaactggtggctggaaggcaaattattgcaagggcagagaggctcagatgctatgacccaaaagtcaactgagagaaaagaagatgtaagcagtgaaagttagaggcagctattgccaatgtgctgactgaagggtcacagggagagaaagcaggccatagcaggtgcaggagaagggaacgccacactgcccagaatgacaaccaggctgggttattagctcagacatctttctgggtgccaatttttgtgagtctgtgccactcttggctgacaatgtccatggcatgttagaaatatttctaagacattgagaacatgggcctatggatatcccactcaggaatagcaaacccaatgccaccaccatttccatcattgataggaaatatccatgtctcattgtacaatagaatttcacacccacatctccttcagggccttgtaaccttggggtaagtcaggtggggaagcttatggagatagcgagagccctggagtcacagacctgggctcatatcccagactctaccatttactggctgtgtgactctggccaaatcacttaattagtgcaatcctttgcaccaattctagtttctatatctagaataattataaaataattatcttacaggatctctgtgggaattaaatgtgaaatgcttttggcaaaaagttttaaaacaaacatgctgtacgaacactaatgattattgttattattgcggatgcggaaactgaagctcaggcaaataagtgacttgctcaaggtcacacgtttagtaaatgacagaccacttaaactggtgtttctattaaaccacaagagtccaagaatctttccattacaacaccccatctacctgcctccccataccccactcccacagatgcccaactgtcccatgaggtttgcccagaagagctcctctcaccccacacaaagatggccaccccagcagtgtgaagcccctaatgcttccctcaaggcatgggatgggattctgctgagcaccatgagcccttcctgagcctcccacgaactctcagtgacaaggaactgcgatgaagacacaggtggactggcagcttgacagctggcgtggagtgtggaaggatggagggagcgccagagcatggagctgtgagccaggcacatgatgcacgcacgttatggagggctcttcagctcagaggcagacacagaggactcacaacacggacaacgcagcaaccctaccttctgtggttcctttgcctttcctgtcaggggtctctaagccagtgccccctgaggggtatagggagacgtcggttggcacaggccaactgctggctgtgtcctccgtgatctcatacatctgcccctccatcggctgcaggtgccagtttaggccaaacaggtgcatggctgtggtgagcaatgagaaaagtcatctttttctgctggaggcagaaacgggactcccaagccataagggaaaggtgggcagggtgggggaacacaggcattcagttcagttcaacaagtagccccaaaaggaagctcttgtagtgccagccctgcaaaggagactggggacagagaggatcaaggttcagaccctgccctcaaggggctcacagtctggtggaactgggagtaggcaggatcggggagtctcaggaggtcttggtctttgcttcgaaagataaataacaatctgggggaaaaactgcaattggtatgacaatgttaatttccttaacgcaaaaataacttgtacaaataataaccaaagtccaacaactcagtaggaaaataggcattggatatgaacagtttactgaataagaaatacaaatagcccataatcatatgaaaagactcttggcattattcatagcaaaagaaatgtaagttagactctgaaatactatttttcacatatggtttggcaaagataaaaaaggttgaaaatacactatattggcagagaatggaaagcaagcattcccatattttactggtgtgagaatataatgtacaaaatctatggagggcaatttgataaaagctagcaacattaaaatacacataccctttatcctgggacataaagcttccaattctagaaattcctcctccagatatacttatacatgtactaaatgatgtacatacaaggttattcacttcagtataatttgttatagcaaaatattagaaaccagtccattgataaggggcaagaaaatgaagtaatatccacacaacaaaattggatgcaaccattaacaagaataaagaggttctttatgtatttttgtggaaagataagtataacatgcagaagtgtatttgatatactacctttgggtttaaaaattcctggaaatgtataaaatatttctggtagaatatgaaagactggtaacagtagctgtgtcctgtgaaggatagagatactatggatcgggggataggagggaaacttgcttttcactgtacaccttttgcacattttcattttgtgccatgtgcatatatttctgttctaaagatatttttccatacaaaaaattagccgggcgtagtggcgggcgcctgtagtcccagctacttgggaggctgaggcaggagaatgaagtgaacctgggaggcggagcttgcagtgagccgagatcccgccactgcactccagcctgggcgacagagcgagactccgtctcaaaaaaaaaaaaaaaaaaaaaaaaaaaaaaagatatttttccaaggtagcaactgctaaaaagtcttgtacgacaatctagaaagagaccataaggcgcaaaagaatgaacattgtcccttgagatatacatgcttgagaaggctgggaagttcatctccaataatgtttgtgatctagcacaaaatatctgcttaaatcccattttaggattccaggcttgggccttgtcagtggttcaggctcccctcttctgatgcccatctgaattccccacacatggaagtaagcgctcaagtccctggaccctcatgacaccctggatgtaacattcactcctttgcttggtgaacactgtctgaaagcccactccatggcagattctggagagccagaatgaaatcagagagtccttgcttcagtgagctcacagccaagtagggaagacagacaaataacaaagtctcttcagcaagaccagaaggcctagaggagggggtgcctgacccgctaggggggctagaagaacacagggaaggatcttcagagagatgaaggcccatagtaattgtatttactgtgtgacaggcagtatgtgggggaacttgtatatattaatcctcatggcaatctcaccagactgaatttacagaggtgcatattaaggctcagaaggttaattaaaattaagatagccataaaactattatttattgagtacttaatgatatgccaggcattaggctgagagcattacaagcaataattcctttaactctcacaataatcctatgaggtattaataaccccattttacagatggagaaactaaggcacaacaagactaattaacacacgcaaggttaaatggctaacaggttgcagagacgagactataatcccaaactcttccaatcctgaaaacatgcactgtcagtcttctcggcatcaaggcccaggcttgcctgcttggctagggcacctcttgcttggtgtatctatcagggtgggcgttacaaagacatcccccttttgtacatcaaacagcctccaaggcttttaagtctctttttaggcagtaacacaggatcctgtgagctagagagggaactctgttacctggccccagtgtatgaaggtgtcactgatggtggttttgaggggctgtgtgactgccatcaagacacacacaaaaaaactaccgaggagactggagcacagcatacccgtttgacttctagtctgaacacaagccatggggaacacacacaagtctgcttcagccaggaggccacgctcgggtgaaagcaacgagatccgacactttgcttttttctttggttactgtggtacaggagaaggtgtgtgggaccagaggaaagaaactagttttgaatctcagctgccactgcctagctgcattcttctcatctgagcaatgagtatagaaagcttcaaaacattgttgtacctaatgaggtaatacatggtaaaatgctttgcaaactgtacacatgtgtgataactatacgtgataaccattcattgcatttgtactgttgatgataatgaaatgacaatagtcactgacatttattgagcaccttttttggtaccaggtaccaggtgaggtgctttgcactgctctcctctacctcctatgtaggtgacaataatacttgaacagttaacctgcctggaagcagtgaatattctgctatttccaaggctggattagctcaaaattctgtttaccttcttactttatatattagcaactccaaaggtaacggagaaattgtttgagctacagacgaatcagatatatgcagctaagtaagcaatgcttctttccccattagaatcaattatctcatctaagtgtgcaacagtgctgtcttgttaaaaggtcatgagaattaactaatcccagaatgaatagaactctcacagctttgtgaagagaaacatttttattgtcacagctttcttttatatttaacaagatgcaaataagtccttgcttaaaaaaaaaaaaaaaaaaagatacgttgtgggtaggggtgggaataagccagggaaaaaagtgttgcaggtgaaaatgatcaacaggtctggggtcccagggaagttaatgagggcaggacagtccacagttatgagggtgggggagacatggggggaggggtgttggcaccccttcctctccactgtacccccctggcaatcacagaggccaacacagctgtgaggctggccaatagtctccgtggcctgtggaagatgcactcctgaaaactatctgggaaagcaaagctctgtattcaactccaacttagactgaatctctcaggagatttaaccattcaaaaataactttagaagctggtgggtagggaaggaaacctagggtcacccaaccaaggttgggctgagaaatggctacctggaaagtaaggagtaggatgaagcagagattcagagacatgaagttcaaccagtaatgtcatctttttaaaaaaaattttaatttttgtgggcacatagaaggtgtatatacttatgggacacgtgagatgttttgataacaggcttgcaatgcatgatactcatgtgatggaaaatggggtatccatcccctccctccagcatttatcttttgtgttacaaacaatccaattatacttttagttattttaaaatgtattgtttaattgttattgactatagtccaccctgttgtgctatcaaatagcacagttctttatttattctattttttttttgtacccgttaaccatgccacctatctccaaacctcccactagccttccaaacctctggtaaccatccttctactctctatctccgtgaattcaattgtttcaatttttagctcccacaaatgagtgagaatacagcaaagtcatcttaaagccaaaataaaggggacatttaatctgtgatccaaggttttaaatataagtcatgctagtgaccctgtcattcttttactgtattgttaggcaggtggttaattctatagttctgggttatgggagagggggagagggaagggagagaagtagtttgctctgctctcctctttccaaaggacacagcacattctcagccagagtctgcccatgaaatacatatgatcgagtggcctctcttctttatcctttgtaataatcaaaatcataacacaaaaattagtatcatttgaatgcacactacatgccaagtgctttatttatattattcagtttcatacttatataaaagtaggttgaaaaaacattactggagaatggaagtagaatagaaatagagctatagtgctatattctgatttactcagagaagtaaagtaagttactggagaccacagagctggtagaaatttgaggcaagtttaaaactcaggaccctgtgctcccaagccaagcttcttcttttatatattttattttaaatagaagataaagccagcagcaaataaaatttgaaataaatatttagggagggggagctgatagtgatgataaatattccctggcccacagcaatcttcatttaaagctgtgtatagcagctgagtgcgtgttatccaaatgatttggaagacagagccacagattaaaaaaaaaaaaaaaagctaacaaatataaacggttctccccagcctgctaaggatagactgggccactgaaacaatataaattataatcactgtattccatgttccctgaagaatgaacggtaactactcatcatctgtgttacgtcacaggattctctatatgatactctgcagtgtgtatttataactgttgtgcaaaaccttcctcaagtacactcaaagtgacctagataagtaacttgatactggttttcccgttagactagtttgtaattcagtgaaaaggtgaaaagatgctaaggagttcagaaaaaggctgtggaaaggtagctggttcacaagatcacccacgctgaaatgttaatgatttctaaaagccaagagccaaggtgggggaagttctgattctcttggctctggtcaatctcatcccagggctgacattttccccgtcgccttttcctgtccagtgagacatgagagatggctcagaaagtgcaagctctatcttgacattttaaagaaaggctccatagatgttcagacattgaaggctcccctcagcacccggccagcaggaggcaattaacaaagtcattatgcaggagtcaccaatatcagtacaggtgagtttctgctgtcacgatgcacacttcccttccaaaactggaatgcacaaacccacttgcatctgtgcatcagcagctccagggagtgactagacacggttataaccacaaggaactgttgattcaagtggcatttttggtttcaaaaggcagtgggaaccaacccaaccacgcagctacccacttttctgttttatattagtgctcagtttttttttttaaatgactatttctatgaaatcagtcactgaggttctttgacttatggtcctctaatggggtgaaaaactaaaaagataaaataataacagaaatgacaggctttcattccctaggttatcttcctggttttgctacaaagccaccacatttaaaagttccaaaccaagaaactatatacacaagatgtacacggcaggataacagaaaaaaaattggaagcaaactcgatgtctaaaaataggagaacgacttagctaacttatggtacaggtacaggatggaatataaggcaatcattacaaaaaataactaagataaacagcgatgcaggaaaatgcttaaaacacaatgtcaggaaaagaaaaggcagggcaccaaattgcatgtgtttcctgactgcatctctgcaaaaccatgtatgcatatgaaaaacaatttgtaaagaaatacataaaaatgacctcaggatttgaattacagcagacgattatttcctagtttccaaactcattttagtgcatcagcattaaaaaggaagcctccaacttagtgtcacaagcaataggtagaagagaaagatgatacagcatgggggaggggtcctgactttgagcttttgccttgtgtccgaccccagacatgaggaattacatatgctctctcactcaatctttacatgaatcttgagaaactcgtttgacaaatgaagaaactggaggctcagaaaggctcctcagctggcccaaagacacacagataggaagtactaaggccaaatttgaaccccgatctaaaaacagatctgaatggttccaaagcccaggttcccctcctggcacatcacactggtgatgagttacaatgcctgaaaactacattacaatttaaaaaaaaattttaagacaaagatttcgctgacagcatagctagatttgctcttttgagatagtttgttaagaggcttttttctcagggacaaagcatgggcccccatcctttcatatcctgactgcctgaccagcaactgatccccacaaacaaaaaccatgtagatgccagtaagcaacttgccacaggcacagtcagtctgtgtttgggtctttctataaaagcactcagagcttgttgagttactggttttgtgactttgggcaaagtacttagcctgtctgaatctcagtttcttcacctgtaaaatgaagctgataatatccacctcaaaggattgaatgagataatgtaatttgcttagaactatgcctggtacataccaggagctcagtaaatggcagttgtatcatcactgtcattttgctatgctgatttccctaattcctatatctactgaaaactttaagccagctctgtgatactgcctttttcttctttctatatgttccctattagttcccttccatgccagttgccaatttctttaaattgagggccctcacctgctcccattagctgacagactttggtaatgggaactagagatatttgcccaatagatgaaacatcttttaaaagcatgattgctataaaactgcctgtcaggatcccactgatgactacgtgggggtaatttttaatcaagtaaatatactgcttttcctcctgtctctggaaaaacttggctgcaataatcagggctactgtctctcactcccaaattaagtgttttctggagaatggattctggcacagttaatcatttctctgtgccatgcaaagttatagggaaggaggcctttcagcaaggattcatgggtgctgctcaatgtttctttaaatcatggcggagttggtcccgagccagaggatcaggtgcagtcagccacagaggcagggaacaggtgagcccaccaccaatacagaggaggaatgtcaccttaactggagggcactgaaaactggtgacaaggcaagttgtaggggaactggaactgaaacctaatttgtacagaataaactgctattattgcagtaatagaataagaaagctgtgttttctgggcacctttccccgggtgggctctactaagacctcttccgtatataactaatttaggagttggccaccccccaccaacctttggactcacctcagcccagttatctgacctctccctgccagacctcccacattgtgctggttcccaagtcaagaaaatggctgtgaagagcagtggctgtgagcacagcctctggagccagagagacctgtgttccttctctggttctgatgtgaccagttacatgacaactttactcttttgagcctctgtttccccatctataagacggtgataataatacctagctttgagagttgtggagattaaaagaagtgacgtgttttatgagctcctcatggagcttggtatttactgacatgaactaccagatgggagctctctttgttggcatcatcttcattgtgtatcaaggttttcactgaaaaatgaagtgaggacatatcaggacctggggagtgagaagcctgagttttgtattaggggacattgctatgactgacatctcagctcccaggtacctaccaacccactcaccgcacagatgaagaaactcaggcttgattagcgcctttgtgtcagggcctgggactgagctaagcccagttcttcagacttctagttcaaagctcttcccacgaagtgaccctgttattacattaatcacaatagaaaatcatgtccagagcaggacagccatcctcattgcttgttcttccatcaggcgctgcttcccaggtgaagggaaccatctccttgggtctaaggtaaggggaatgaacccacagcacgggccatgtcaggccatcaagcagccctccctttagggcagggattattccagtcatctctgcccccccagaacctggtccaaaggggtgaagaagaaagcaaggaaaggaaggagacagagtgaggattattattaaagaaacaacagctcctacttattaaaattttaccttgtgcatgatataatactggaggattcacatttattatgtcattcaaactcacaactctttaagttagatagtattagtaactccattttatagattaggtgcctcaaaacagagataagtagtacatattactactttaattttctatctctagaaaaccgaggatccagaattgtctacaattgtaccgttcaacatagcagtgccaagatccaaaagcagattccagtgatgccagatatgaagttcttgtcacactgtcatcaaggaagcacaggacaggcttccatttcatcctgatcaggacaaaaatgcagcttttgtcaaatcactatcaacagggcaagcattctaggaagcggctccacacagaaggggtgcttaaacctagtacaatgcctaccatctgcccttcatagtcaggcctcactagtgatgcagtgatcactgaacccaaaggatctcctgcctgttcaaactgctctgctggtgtgaggagtcagcattgccctttgggtggtacaacacgccactgccaggtctgggatggtgcctgttatttcccaagtgtgccatcatcacattcctttctttgtggcccttgagtccatgatgacaccattcccagtgctatctgaagtgtctatataaaggtgttccaacttgcaaaggaccagcctctcacctgagatgcatcatcccctccctcacctgtgttaacgatcaaatgaggcaggaaagagaaatgtgtgtttagttggtgcttgggagctcacacaaggagaaggtgcttgttgctatgctccatttccatagctacaagaaaatgtactgctacttggctgtatagagcaaccctccagtcttctgattttctttggtgtgccagccatgcaactgatttttttcatgatcaaagtcaattaggaggtggtccccactgtacctcaaatggagttttaatttgtgtatgtattattaggagaggccttttccctttggatcattcacttcagcaagaggaatgagggcagacagcttaacgtggagcctgccacccagatttgtaacttgggataatatttctttataatgagaaacatttcaaaatagcactttaaaatcacacagaacagagtgtttgatgtccctcctttacaccctacagcttcccagtctccagtcccatgggtattttccagcccttggggaccatatcatattttcctgcccccctgcctttatctgtgcacggagcaaggcactcatatgtgagttacctctgcttcttgtttgattacacacagacccttggtttggtttagtctttaactaaaactaggaagtttaaggcagtaaggaattccagggaccatgatgatgataatgttaacagccatagtcattacttggaagctatactgtaccaagcactgtgctgagtgttttagaaacagtatcatttaatcctcacaaagcccaatggggtaagtattgttattactctcatttgtaagatgaggaaactgaggcttaaagaggtctatcaacttgtcccacgttaccttctaattagaggtagagaccaaattcagatctgagttaagtccagatggaacctgcccctaaccactataccacactgcttttctgattaggtatcaagctgtgaaaatgtcaaaaatggaaaacaaaaaacaaagaaaccaacattgccaatctcattgttatatggacctgcctttttactcaaatttcgttggcaatatttttctgaaaatagacacttgacatggtatctcttcagaacagaaaggatgttaaaagagcattttaaatgtgtgttgaacacaatattcaatggtctacgctacttctgcctgctcaggagtctcactttgtgtggatttctctgtctcttgagcctgcctggccatctagcctccatgcctttgctgatacgatgccctctgcttgaacggtcaccaccttctctattaagaaaaaattcccccatccttcaagacatacttcaaatattgcctcttctgtgaggatttccaccatcactcccagccaaaagtagccactgccctcagccctgggcccttatcattatttctgcccctctcccataaacactgccctcatggtatgcatacctgtgcttcctgtcccttgctgatttctctaccaggcttagtacccagtggaacagatctgtagagagacagtaaggctcccagctctggcccttaccagctgtgcatcaacagggaagtcacttaaccaacctgactcttagttttttcatctgtggaaatggaaataatagaaaaccatctcccaggctcttgtaagaattaaatttaatgaggattctttagaatttagaatttagagattataaagtatattgaaaatataaggcattattataatattgcttaatagttaatgaatgaaagaacacccaaatgtcctaatgtaatacagtctgtgtttaatacacagactgttacaaagatttatatgtgaaaccacccacacagtttcagacctcaacaattaggtgtatgcatagtgctatttaatagacttactgcactacagaaaagtcagaagacataaacaaggtagaaaagaagaattttcagcttctaggtaaagaaaagtgctaattatcctaaaattttcatttaaagctttgttaccctcctactccatctcctctcaaataccctttttgcaaagagagttggaatcaagtgtgtgcttatatacacagtgccacacacaggctgagacacacacaggggtctgaggaatatactccattctacagatgatctgagtggtaaaatttgagacaatgtgatgaaatggaggccacactacaattaatgatactggcattttttctttcccactggaggctgtgaacaaaatctaactctaggctcaagggcatgatcaatctagctgcctgccacatgccagcaggaagggctttctccaaagtgacatgttacgccagtgacaatctactcatgctggaggaagcctggagaacagcagaatcagatactacaaggtgctgttgctcaataagcaataggttttgaggtctcctgacattcataacctggcctcctgttggctccagtcctgaagcactttgggtgcaaaccgccgccccagtcagtgcacatgtgcatggcagtgctggcacagtacacggggcaggacagacggatggatgttcatttttccttcataagaagataagttagtttctttcatttttttttcttttgagacagagtctcactctgttgcccaggctcactgcaatctctgcctcctaggctccagtgattctcttgcttcagcctctcgagtagttgagattacatgcgtgcaccaccatgcccagctgatttttgtatttttagtagagacagggttccaacatgttggccaggctattctcaaactcctggccttgagtgatctgcccgccttggcctcccaaaacgctaggattacaggtgtaagccactgtgcccagcctagtttctttcattagcaaggagctacttgcatcctctcagtagttcagaagggtgaaaaccttccctaaatgccccccagcatatgggaagggtagaggccaatgaggagaggatgggctctgggtgtgagtcctgtctctttctctcactagagatctggctttggacatatcatttaaccttcgtggcctcagtttctcatctatggaaatggaaataaaaacagcatggtgcccctgtttgcacttaacaaatacttactggataagtaagactgttgaagaatattaaatgaggaaatacatgtaacactcagaatagcacctgcctggcacaaggcaaactctagatttgtgtgtgctgccatatttgtgtgtgctgttacatcagcttaggctttgctgggagtggctgggagcaggggcaaaggcaagctgcagacagaagggcaatgtggcccttgtttgttctgagcctcaggtatggggacagggacatgagaggagggcttttagaggcagcacggtctgcatagggtttatagttggaaaactggatttctaggtccagcgctactacttaccagccattccagccgaacaagttatttgactgcagcaggcctcagtttccacatctggggcttgcagggcaaggaaatgcagttaataattatagagagtgcattgactgctggagagaaaaattaaaaggccttacataaaggcatggtatttattctgtatttgcctagtggagcctctcttctaaggggaaaggcagccagtgtctaccagcacttgtgatttctgtagttttatactgaaagtcttcagtaaaacagaatgaaagtacagattgaggcccatagataggtaaaatgcacaaatggacactttaatgtggactcttctgatacagatgcagaaatatccaacattcctgtctactatcctctacctttgcttaggctgttcggtcttccagaaagccattccgatcttctctttcaatatcttacttgatttacaagctcaatgccttgtaattttttcctgatcctcccagttagaatgaattgctgtctcctttggaatcccacagggataggttcaaactccagtaatatacctttatcatctgcatagaattgccatcagctccttacacatctggctgtccaagaaagtatggatggctcagaggcagtgacgctagcttatctggctttgtctgctcctcacagcctgggacacagtccaaaagacaggctcagtgaatgctccccaccagtttaaacctgaatttggggaagctccttctgcttaatcacctgaaatccctgcatccagggatggctcttggctgctaaacctgaaagggtttaaaatctcctggtgattcagctgctggaaagctgcgtttactccacacctactatgggtcatccactggactgggccctttgcagatgttctcttgcttaatgctcaaaacaccacttagatactaattgacattttaccaatgaggaaaccaacatacagagaggtttgaaaacgtgtctgagctgggtttggaatgcaggtcttactcggcccagtctgtgcttttgctctgagatcatattgctgtctttagaaggatgaagctgtttagttctggttttgttgttttactgataggaagaagcactgagtggaaggagaaatactgtggttttttcagccctctctcttcctctcactgctcccttcttccttccaccctgctcttcctccctgccatgaaaagaggctgagctctgctcccgccttgtcccctaagcctagcagacttaagtttggccccttcctaacttctcctccagttaggtatttactcagtgcaagaatagccatcaggggggctgttttctctttctctctgcacttaagtgcaattaaattatgttatttcacagtaattagtctggaatacaaacgagacggggaaaattcctttccaagaaggctaaaaatctataaaatcaactccttttccatactccctgggcaatgttgtaaaaggagcacccagagatgcagttgggggtccttcctgaccaaccatggctgtgctgcctcccctgggggctttaaattgcccccagggcctccaacccctaggagagtgtgttgtttctgcagctgctgctgttattattaaaaatgaatatatgagtaaatgtgggtcccttctttttgacacatttccaaactcagaaactgcttggccctcaaattcaacacatcttgtttgccagggggaaggggcaggcagatttcatttatgagtggctcttactattaagaactaggtgcctgagaatcatttcatctccacagcagcctcttatctacattcatgggtcaggaaactgaggtctgggaagagtacacttcttgcttgagtcataagtagttaggagcagatgagcagttagggcaaagccagcctgtgccccgtgccggctatgtttcagcagccgcctctggctttgtctcctctggttttccctccacatagtttcgagcagccatttttcactcactgatatacactttccacctttgatctctgtgagaacttggaacctctattctttcctttttctttctcccctctccatgccttgcaacatctgttgggttctgatcttgtcatcctgccctcctttctttccttgaacaaacttttgctggacacatgcaacatcacgccagacccggcacaagaagctgtggctatgatactaagtatgacggaaattttttcggccctcatggagctcataatctaatgctggggacagatattaaacgatccacgtcacagtcatttagcagcaattgtgaggagcaccacaagcaccataaaggcatagaactgggttcctggctcagcaggagaggctcacagatgcttccctgaagtagcgacacttgagctaagctcttgagaaagaactgattggtagaagtggggtaggaggtgatgggcagctctcttcaggaatccttcagccttttttggtctcagagccacttgtgaccctgcgcccacctcccaccaattaaactggcagacccaagatcagagagaaagttttcttctggcaggactgtggggaaattggatacctggatgggagccctgaagttcagtcctacccttctgaagaggatctagcagtgagtaacagagctgttcacgccttgtgacccaggaatcctgctctggggaatacaccctttctaaaataatccagatatgaaataagaaaacagagcagaggcacaaagatgtttacagaagtgctacttataatgccaaagaactggaaacagctggaatacaatgatacagtaatagcacaaatataatggcttttacacttggcaagaatgagaattgtgtcagtacttgaaaatgtttgcatgaaaaaatgtcctgtgcaccatcccatctgggatgtgaggagcgtctctgcctggctgccccatctaggaagtgaggagtgcctctgcccggctgccccaaatgggaagtgaggtgtgcctctgcctggccaccccatctgggaagtgaggagcacctctgcccggccaccccgtctgggatgtgaggagcgcctctgcccagccgccaccccgtctaggaagtgagaagcgcctctgcccggtcgccccgtctgggaggtgaggagcgcctctgcctggcagccgccctgtctgggatgtgaggagcgcctttgcccagccgccacccgatctgggatgtgaggagcgcctctgcccggccgccccgtctgagaggtgaggagcgcctctgcctggcagccgccctgtctgggaggtggggagtgcctctgcccggccgccccgtctgggaggtggggagtgcctctgcccggccgccacaccgtctgggaggtgaggagcgcctctacctggcagccccgtctgggaactgaggagcgcctctgcacggccgccaccctgtctgcgaagtggggagcacctccacacggccgccctgtctgggatgtggggagtgcctctgcccggccgccccgtctgggaggtggggagtgcctctgcccggccgccacaccgtctgggaggtgaggagcgcctctacctggcagccccatctgggaactgaggagcgcctctgcacggccgccaccctgtctgcgaagtggggagcgcctccacccggccgccctgtctgggatgtgaggagcgcctctgcccggacaccaccccatctgggaggtgaggagcacctctgcctggctgccccgtctgggaactgaggagcacctctgcctggctgccccgtctgggaagtgaggagcacctctgcccagctgccccatctgggaggtgtacccaacagctccaaagagacagcgaccatcgagaatgggccatgatgacgatggcggttttgtcgaaaagcaaagggggaaatgcagggaaaagaaagagagatcagattgttactgtgtctgtgtagaaagaagttggcataggagactccattttgttctgtactaagaaaaattcttctaccttgggatgctgttaatctataaccttacccccaaccccgtgctctctgaaacatgtgctgtgtcaactcagggttaaatggattaagggcggtgcaagatttgctttgttaaacagatgcttgaaggcagcatgctccttaagagtcatcaccacttcctaatctcaagtacccagggacacaaacactgcggaaggccgcagggacctctgcctaggaaaatcagagacctttgttcacatgtttatctgctgaccttctctccactattatcctatgaccctgccacatccccctctctgagaaacacccaagaatgatcaataaatactaaaaaaaaaaaaaaaaaaaaaaaaaaaaaaaagaaagaaaaaatggcctgtgaaaaaggcagaaggacataaagctgtttatccacactgactatgctgaggctgtggctgctgttgttattaaaaatgaatatatgagtaaatgtgggtcctttctttttgacacattcccaaactcagaaactatgagccatgatatggaggtcaaggataacacacagaaaaccgcagaatgtttctgttgtttgccccagtatcttgaattctggatgataccttaaaaaatttctcaacaacactgaaatatctgagtttggagattattttaggtaatatctgattttaaagccagtaaataaatcacttctttactatatttctcaaaaacagtgcctgaaactacagagacagagaatagatagatgagtgattgccagaggctgagaatgagaggggggttgacttcaaaggggcatgagggaacttttgggggtgatggaatggttatgtgttttgactgtggtggtggtcacgtaactctaccagtttgtcaaaattcatacagtagtacacttaaaatgtgttaattttctgtatgtacattatatctcaataaatctgatatgaaggaagtggcctgggcctggtggctgagtgggtgcaaaggtaagggacaatgtctgagcagtggctggggtttcaatcctagttaggtccctaagagcacagtcagagccctgtgcatggctagggaaaggaattatgacacaggggaagacagatgtcatcccgctgccttccacactcactctctatcctttttcaccctgctctgtgccctgggaggctggtccacatggcctggatcaatggttcccttgagctgtgacttctggttgggttccaccaccaggaggaggttgtcagggtgggaagagagtgaggtggagatttccgttctccggctccctcaccgccatgcctctattgaagaccatacatccatgtcaagcagcactctcagctggctaacttctccaggttctagtaacccctccttcccccttgccccttcatgccccttcatggtatcctagaaccattagccagggggtagtaccattccttgacacactgccctcacttttgtacccagcttcttaaactctcctcaaattaaaagcaaatgaatgatcaaatgacaaaccccataacccgctgcctgaatacttccattgccaggaagggcactgtcaaactcttctatcatggggaggctctgcaaactggaaaacgttcattttcttccctcttcagccctgcagagcgagttggtcccttctcccttcgtcagcatttcagacaactgcagagagccatgctggtctcctaagtcttccttttagggatctggaagatatctgtctgtggcctgttataatgagaacaacctatatatatcttgctattagcaattcccacagagcagcatgaaggaatcgatcttggagagagaaggcgttaatgcaggatcctgtatctttatcactttttcctccttctaaaagaccaagttcaatcatctccatttcccattctttgggctataaagttaaatctatggctcctgtccaaaaggcctgatgtgaagtcaaagagaaaggagggaaaatgagccttactgcacacaaataacacctaggcccaagtgtaataggctcatgctaatgaggcaacagcatctgagatcctgatattgtatgagctgagccagatggaaatgaatgggtgttggggggtggataaattcaccctggcctctatctgtaattctttctctacacatctcatgtccatttcacctgtatcttagccccagaacataaaatacacagttcggccaccatgcttttgcccatgctgctcttctgcctagagtacccttggcagacttaaccattttgcaaggcctcttattcaaccaagtcttaatttagcacaggtaccttgtgccaggctttgtgctagggattgagtatgtgaaagcagagagtaagacaagaggagatgggggagtgaaactccattaaaaagaagggaagtctaatatgtcttctaactgaattgctaccatactgaagtccagtttgtatgatgaaatgtcagagatattgacagtctataccactctacgcaacttgcacttaatgctcaagttcacctctatcaccatttcctagatagcctcaagaactgcatgacccagggtcttccagaccaagaactgcaatattattccaacaagcaaagctctctaatagctgccttttgaagagcagcaattaagcattaagcttagcaacattctcagttataaattaaactatcaccacttcaagcaagggttctgattttttttttgtactccacaatcagtccttcttgtgcagttgaaaaatgcagatgcaacctaatttaagaaaggatccctcattgctattacacaaattggaatgttccactgtggttacccagaagatgcagaagcccacatctgagactccaccctttatatcctggtgcaatttcctagagatatagaaatacagactaggaaggaccttacaggacaatccactcctgccacactgtgggtgaggtccaaggacgggtaacaaccatctcccaaggcgaccagtaagggacatctcctttatcacatgctctgtgtttttcaacatcatctcatttaacctgcacaacagccttatgaaagtaatactattattcctcccactttgcgtttttcaacatcatctcatttaacctgcacaacagccttatgaaagtaatactattattcctcccactttgcagatgaggaaaccaaggatcaaatggctaaacagctggagagtggcagtgctgagatttctgcggaggtggtcaggctccaaatcccatcttccttcctgatgagaaccccacgctgcattagagaaatcacagaaaatggcgccactgccctgcagggcagacctggacctgatgatacagcaatcagcaaccagtgtcctctcaggtcttcatttaaatgtaaagccgctcctcattttagatttattaacaagcctttttcgtctcctattccaaaggcctacctggcaagacaggtgcttgaagaaacctcaagttactaatctgaggctcttctgcagcacgcagtgtctgcgttttacatacacattcagaacacaagggaagctgtcagttttatctgcacagaagcaacagttagtgaatcacaaatcaagttttgtcctagttagagaaatgatgtgagctgctttgcagctgacgattcttcttgtggctgcattgctggaacagtgagacatccctacaaatgttttctgacaggtccccctggttgttctgtcagctgcccttgtgactaacacgggccaggaagcctgttggtgctgcagtgagacaagccaggtccaagttctcactcaggagtaactaatactctgttacatgagatgctaataattctaataatacttttaacaacagtagtgtctaacttttactgagtgctctgtgtcagggagtgagctaggtacttcttgtaaattatcttacagaaatttcaccccaaccctgtgaagtaaccactattataatcctcactttacagatagggcaactgaggcagagagaggttgtgtaaactcgccaaatgtcacaaagcttggaagcagcagtgctgagatttaaaagcaggcagcctaatttcagaacctatgctctcaaccatcatgcggctcctggttccctctcctataaaatgggacagtctttccagccacttccataaggaaagtgaaaaccaaggttcagagaggttaagcaaactgcccaagtttacaccgtcagcaagtgatacagccagggtctgaggtgagatcttttgattctacattgtctgttccagcccagggctattatatagcatagttggctgaaagcatggcctttgaaatcccaagtcttggttgcatcccagctatgtcatatactggctatgtgacccaggcaagttgcaaacttctctgagctttagtttccttttctagaaaatacagaaaatcatactcatcccacagaattgtggtgagggtccagagaaatgatacacgtaatgggcctggcccagtactaggcacatagcaaaaattcaaaaagccaaatattaagatgggagaattacagcatacaggttaaaagtgtgagctcaaaagagaaaataattcgaaagcatcagctcaagagcttgagtgcctgtggttgggaggatcatagccctaacatttaccatgcaacagtgggcaagctacttaagctcatgggggctcagtgtcctcatctgtcaattgcgaataataactcatgattgttaggagatttcagtgaggaaacacaagcaacgtgctcagaacagaagggcacgtggacagcatacaatcaaaactaactgctctttatgaatgataaacagcagccaaatgtgatttttactactctatatcacaccttttttgctaaacatgttttaaaaacaattaaatgctatacaataaagcatttaattgcttaacaactggcagtacaagcttcagggtctgacctaaaactagcattgcccctttcgacatcatctcatgtaacctgcacaacagcccccattgtgttctgccaacagatttctccagaaaagaaaagaccgggtattcaaatggagactaacaaggacctgagaactgtactaggaagaactggtgaataaagcactgtaaactcatcctcagtggctgtccttctgaattggtgcctttggagacaaaaatacatattttctctctgaagagatcccacagctgtgtgagggtcctccctggattcccagctcaggccagagcagccaagtagcactcccaggagaggaggagatggcccatgggcaagcctctggcttccgcagtctctgttggtggtaagtgctgactccagtgtctctactttctcatgaaaatacctgtaaatgtatctgtaattgaaatgtccctggtggcacaagtttctcaagacactttctaactaagaaatggaacatcagctgggcgtggtgccgcatacctgtaatcccagcctgttgggaagctgaggcaggaagatcatttgaggccaggagtttatggcagcttgggcaacatattagacctcatctctacacacacacacaaatttaaaaagtagccaggtgcagtggggcacaactgtagtcccggctgctcgggaggctgaggtggaaggatcactggagcccaggaattcaaggctgcagtgagctatgactgtgccggtgcactccagcttgggtgacagagtgagacccccatctctacacaaacaaacaaacaaacaaactaaatgtcaaatgaatctgtcaggattaccaaccagacgtgacagccctaggcagataacagcaaaagaaaaactattttccaccctctgtttctgcctcccactctggtggtgagctgatgcaattcttatctggaacctgataggatgtagaaaataattacaaatgaaaaggttattcataattcttaaatgagttaattagtaaacccagtcagactcactcattacagtaattaataattgattatacttgaaattaaacacaatttttcatcaaaaatctaattaaatatctgtgcttttgcctgttgattagatcggttggtctgctggaaaagggtctttgttagggatatttgtgctcagctgagacaattaatttgatttttaataattgatagttccttccaagttagtcgtcacagcctgtaattatggccaagcaacaagatgcttatgccttgtcctcagcagctgcaggagagcaagcaataaggctgctaccccctagcttgtgaagcaagggtgggatggcctgcacacctgcaacgcgttcacctgcgttggcttataccaagctcacaagcatccttctgaggtatgggttgtgcctattttctagatgagcaaatcagaactcagaaagagaaatgactttcccaagggtgagcagctgctgtgtggtagagcagggcctggaatccagggctgtcatggtaggtgtaagctcttccccaacaccttgctgactctccaggaaacaaagggaatgcccaggcttgcctctctggcttgatccttgtatatgagccctagcatccagtccaagtatttcgacacagacacaatattatctgtgtagaaatatctgtgttattcttggcaaggacacactatcagtgaactgaccattcctggctcaagacacaaattcttcaaaattgaccttccatccacctcctcttctccacctacgttgtcagtgttgtaattgaagcgatcagcttttcctgactagttgactgcaatagtttcccaacaggtaagcttctactcctccttcctctacccttacctttctaaaataaaaatctgtgtcctatcactgcttaaaactgttcagtggtaccccagttgcccacccaattaggtcctcaacttgtcctccaagctgatctccacaatctgatgaaacacttctgtattagctccaacggtgcaccccacactcctcaaatgcttcaaacacagaaaacatctttgctaccacatcatcctctttcaagtctttgtaagctcccttgctttgaaataccctttctgtatgtctacttctggctaatgcctactttaaaattcagctcaaacatcacctttcccaggaagccttccctactcctcttggctggggttgggtattcccacagcctctgagctctgtgtaaatcagtcactgtttcagatttgcctgctaacatagctatctcttcttttaagctacgaatacctcaagggtagtgactatatatttaaccctggcacttagcatagagcctggctcaaagcaggtattccatatggtttgctgagtgaaaaataaaattcacaaaattgtggatttgaagactgtcaacgttggaaggaaaattaaaggttacccagtgaaaactcccaggcagtgcttgaatcttattctaagtggtccctgagctctatctgtatccttcctcagacagagagctcactaattcccacagttgcccctatctttaaatagctgaagactaatcatgtattcttattaactgggagagaaagaagccatgagatggaaaacaggagagagtttgattaatcatgtaaacacttactctttctcactgaattaggctatatgatataaaccttaagacttcaacgcaaaacaaatggatgtgtatagcagcaaactactcaaattatgacttatgactgcctgtccagaagtctactcacttatgaaaaataataatgttagtcaaaaccaagagctgtgccagtggttggtggtgacatactattcgtggtgccagaagaaaccttcatgccaagtaatggtactggaactatacaaccctcattggtaacccactctatatcaacgatgcacctcacagagcctgggtaggccttgacctctcccagtctggctgtttcatttatacaatgacccatagcagggatggcaaatacttgacatgtcatcaatattctccatttctgtgaccataacagacatcactaatcaatcacagatagtctcttacattgagcctaaatatagccccagtatcttcctcaacacagcattctaggcagcagcaactaaacaatcagacagaagaagagatgacatgcatgccaccttggccttggagccatggaattgtctaagccaatattcagaaggggaaaagagacctgacatgccagaggaggcttattacagcttgagatattgaaggggacctccctctttgcaggactgtcatcttcctggtcacttatttttataaaattcaagaatcttgagtggaattgaccttacagcttatgccactcaaaccccatccatgcttgaaccacttctctatctcttgaacatgtgatggcccatgttgtattaatcattcttagtgacacctcttactacttctcaagacagcccctgttcagccacagtgactttgctggttaccaagttctttttcacagtgggcagcactgtcttttttggcctctgccagttagttctatttctgtttactgggcttgtgctgaaaaagtcccctttgcttgcagaattatcttagaattccttagcatgggttcgaggccttctcaagctggcccaacctaccttaagcctttgaattacaggaaaggacctctagggttaagccaatctcccttccaatgcctttactaagaggctgatttatatagaggcagcagatgctacacaacacccacagatctctttggattaatatctttcctgggaaaagaccaaagcaaggggtcagaagtaggaaggggtcagactgtgttacaaattcatcagaagactgcacagggggagccatctgctgtatcaaggcagaggtcgggaggagctccttatatctgtgtttgcacccagggtcaggtgagcactgctccgtgtctgtgcgccctcagccagcgttctctgctctctgtgctggctgggaccttctgcttctcagtcagaatttccctgggttcctgaccatggtttaactctggaccttggttcccacaataccctcagactgccttgccagacatctaccttcagacgtgctttcctgccagtttccctccaagcccagggtgctccacctccttcctgctcctcactgcagccacacagtcccaacaggagaggctacctgctgttcagcctctccaacttgtcatttagttgtattgactcaatccatgacacttatgccatagatccccatctcaaaggctagtcttactgagcactcacgccttaataccaggcacccaacacacaaaaggacagatgcccagcttccttcctgatataagtgcagagggatggagaggaaagagaggagggccctgaagagctgcccttgcagtgtcaggggtgcagactgtccagaactccagggctgcctggctcacactgcgtgctttgcctgccatgctagtaaggagccttcagtgcccacacgtgtcttggttgctgccctctgggccaaagaggagcaaggggagctggggtgaagaggtgcttacccacaaagtatgccagcaggatgaccagagtggctgagatgacgatggcgctcagggctgcgcacttccagttacagtacttggagggcttcttgaggttaaaggccggccgggcgaaggtgctgcggggcaggggtcggggcggaggagagtacactgtgctggacgtcagtgggtaccctggtgatgtggtgcagaagagcggggaggtgcctccaggcttgaagaggaagtgcctgcagatggagagcagcaagagggtgtcaggggctgcccacagaccaggcacccagacaaacctggaggccagaggcggcagtagaagaagcatgcagaggagcctggatagagagagtcaccacagagacctgggaaaggacaggaacaaggagagctacggactagaccatggaacagggcacacagagacacgtttccactgaacacggatgggacagccctacccatgggaaaacccacccacggcaaggcagaaggtgttaaccaactcaacagaaggctggcactgagatccttttcctgggaacggatggggctgggatactgtttcttggggaataaacttcctattctctaaaattattacagtaacttggaaaggatctaaaatcctgttgtgtaccctggagataatgagacttaaaattgttcttctccctccaatgcttctgttgccggtgtatctcaactgaggattggaatacccttctttttaaagggggttttattggtgttgaagccaagaaaccaccactaagttatgccatggccattagtcccctagtggctgtcacacagccaatggcagcaaatgccttcaaagcactctgtccagaagccagactgctgcctcccaagtccaaggtgaaagctgtgtcgggggacagacaggcaactgcaccctacagcctagtcatgagggcagcggggtatggtcaaagcacatggttgtgaccaaactaggtgtcaggagctcctccacagcttggctttaaccatggccatgggaggacttgcacacagcctgggaaatggagtgtgctggttgcactgtaccccccagaagccttagggcaaacccacccctattggggtacaaggtgcctcaggtcacagaatacacactcagggccagagtccatacaatacagggcctgtgctgcattaaaaatgctatgtgagatggttttggaatggcaacggcagccaatgagatgccaagagctgcatattaacaagactgctgttaatatgctgggggatagggtatttaaaggataaactgttgcaagttgaacacggacttggtgatgagcatgccacatggatcacctcccccagaagatcccagggaaaggtctcagggtctgcatgcaagtgcaggagccacaaggagagcacacacagagaggagaatggggatgtcacctacccgtcactgtaagccccatcatggcgggaggcgccgagaatgtccatctcaatgaggttgtcctgcaatgtccctaggaatggctgcttgcctaggtttctacgcacacatggagacatgaatgaagcaatgagtcatgcattgatgaagggggctagtagagaaacacacaaagtggctgtttggtgcagctgtgtgcgtaagaccagcgggacacggtttccaggcaatgggtcagtgtgcaagccacatgtgcaaggggtccacctggcacagagcatccagagagaatactgtctatataaaaacaaggtttggcagttgtgtgcatcaaatcacagttctcactggagaggactgacatgtgtccgggactgagctaggtatgctacatccagcctctcaaatcttcaaaatggctatgtgaggaaggcaatgtaatcctcattctacaggtgaggaaactgagatgtggagaggtaatgggtcttgccaaggtcaccagctagcaaagttcaaagcaggaattagagctcaggttccaaagcctgtgctctctctctctacttgaggctgcttacatcagcttaaacagtggctagagacactcatttggctagtccaaagaaaaaaaaaagttagcatttttggccactgtcttctaaagccatggttctccaactttctggagagctgagcattgctgaggcccatccctagggattctgtcagcaggttgggtggggcctgaggatctgtatttctcccaggcccccaggttaatgctgaccatggtcagaggatcatcgtcctttagcggtgcagggacctgggtgataactggctagcaaggatggagctccacggaagacaaaagaggatgctctttgttccccaagtgcatagcattttgtgactttacctatttctaacccagaatgaagacagacatacttgccctttttggtctcaaccaggtctgctgagtgacatgattcacactcaagtaggctggagcctgtctcctgatcttttcaggacagctatcacctcactttcagactctgtggtgaatcatttgtaacaatccagtggtggcttcagcctgttgcatgcacccaagaaaggaactgactgcagaaagccaactttggacccagccctgccaaggaccttctttctgacttcgaccaggtcttagagccagcattcccaaattcaagacccttttatgccactctcttcctgtgcaactttgggtataacccttaacctttctttatcttatgttcttcatgtaaaaagggattacagtactgagctcacaaggttgttatatggatcggctgagataatggtggaagaagtattaagggctatacaaatattataggagtactaatgctaagtataatagttactacctaccctacatctaccacatattatttattgttccagaagctctgcaactatctaatttaaattttattcctcacaataaccctacaaagtcagtaccgtcatctctattttgtagattggcaaagcaaagcttgtagaagcaacttttctaaggccatatcataaacaagtggagagccaagctggagcctggggttatctgaccccagaactcaggctctctccactttataaccctgtctctctctgcacagctttgtggctactgcccctggtcagcctcaaagacccaaacgaggaggggctgtaagtactatctggaaatcccctttcgttaacatcccttgggacagtggaagcatatggcaacactatttgcaggtacagtgctgagtatgcagtggtggtggggacctcctcttttggtgagtcgtgaagcactgtctgggccagcggcctgggtggcagtctgttctgctggtgtgcaagcccctaaagtcttccccagtgcctgggaggagcttcagaggtgtggacatccctcagagtggctctatttccatcaccaggcagataaccctgctgatgggaggcctggtggcccaatgggaggcatacaggccctgaggccagacagatctagcttcaggtcccataatcatcattcactggccctgggcaggtgacccaatctctctaagcatccacagaaggggataattgttcattttacaaaacccaaagtgtaatttggatcatatcacttctctgctctcaaccctccaatggcttcataagcattttagaataaaccatagtccttaccagggcccacaagctcctataagctctggcctctagtacttctcaagcctcattttctatgctacaggtacactggtctccttgctgtttcttaaacaagctaaaccttggctttcctctgcctccctcaactatctttatgaatcagaaccctcctgaaaatatcttcatggaatataacctccttcctcccctcctcaactattagcttcttaccctaactaaaatagctcccagcccactcttcccaatcactccctggccccttgtactgatttttcaggacttcacatacacacacacacacacacactcctctctttctctctctctctttctgatgaaaaataaagcaataccggagcaaggggccaggaagtgattaggaagtgataaacacacacacacatatccaatatatatatgcttatctgattattgtgctttttcctaatgcattttaagttccacaaggcagaagtcttatctgtcttgttcactgctatgtgcccagagtctagaggaatatgtggtacatggtagcaggcactcaataaatatgtgctgaatactgctgaattcaggatacacaaagggaagcatgcccggcatacagcaggcacatagtcagtgcttcattgaagatggcagcagaaggcattctgattgtttcctccatccctgcatttcaggagggaactgtccactctctctacagcatgagcaggtccaaggaagaactcctgctgccccccgggacctgaggctggctgcatggcatgctccctagaagacctgggagtctggcttgagtcagaaggctcagatcccattttaagatacagagtcaaatttataccttaaaaccatcagaaataaacaaaaaaatacattcagagaaaaagacataaaggataaagatcaaaatgttagcagtaaggattttcaagtgactggaaaaacagtgattctgattttaacttttacaatttaaaaagaaacagttatttttaaaaaaagagagactggacaattatcttctaaaagtacagatctgttaggagaggggaagaggtgatgcaacagagtaaaggatttctagagtaagagggtgccccagtctcctgaaagagcttccacactcatgctcatgtgcatattaattatttagatctctctggaatttggagagacatgagcacttgctgaaaatgttggctattggccaggtgcagtggctcacacttgtaatcccagcactttgggaggctgaggcaggtggatggcttgagtgcaggagtttgacgccagcctgggcaacatggcaaaatcccatctctagaaaaaaattcaaaaactagccaggcatggtgccacgtgcctgtagtaccagctactggggaggctgaggtgggaggatcacctgaacccggggaggctgaggctgccataagcctctgcactccagtccggtccaacgagactcggccttaaaaaaaaaaaaaaaaaaaaaaaaaaaagaagacaattctggctattcagaatgctactaccgccttgaaatagtcttgttctgctgggcgttgtggctcacgcctgtaatcccagcactttgggaggccaaggcaggtggatcatgaggtcaggagatcgagaccatcctggctaacacggtgaaaccctgtctcttacaagaaaattagctaggcacggtggcgggtgcctgtaaccccagctactcaggaggctgaggcaggagaatcgcttggacccaggaggcagaggttgcagtgagccggcgattatgccactgcattccagcctgggcgacagagtgagactccgtctccaaaaaaaaaaaaaagaaaaaacgaaatagtcttgttctgtacttttaaacttagttctgggtcaaattacttggtgtcatttgattgatgaggaaactgaggcccagagagacatgtgccctgccctcatacccataccatagcaagtcagtggcagagctgaaactaaaacccaggcaccctgacttccagttaaaggaacctcccctcaaatctcctatccacccactccccaaaactctaggtgtctagttcttctgagaaacaaatgcccacctttcttgatggggaccctaagctgcagagcccaccttgggtcatagtcacgcagggtctcctgctcactgctgctgagagctcaagtgtgggcacctgattcacttgaccctcacactggtgggtgctattacctcattttacagatatggaaactaaggcccagaaaggttaagtgcccagcatacaggaaaaattaggtgaagatgggatttaaaccagatctctctgacctcacagccctgagctgcctctcaggaaagaggttcctgagtacttggagaggaaccttcagctaagtggtgggctgttcttaaagaggggatagactggttccctctaagcatgtggggaggccttggactagcccctgaactgcctgtaggaggggctcccagtcccatgtgtctgacttaaggcaggctgagctcacctctcaagggcagagcaaagggcttttgggaaggaagtagccaggaagctgcaaaggccagtagttcctcaggaccgccctgatcaacggttcaccctctcacagtgagcccgctgtcctgggccgtgtttccacccacaaagccacgggacagccacaattgcctctgattctcacaactacctactggggcaggacaggcagggatcacaccccatattctgtagctgagacctccaggtgtgcagggggttagtgactcagccaagaccacacagagttagtgatggggctggcagctgaacaaatgaatggaaaaaaaaatgaaccaggcaccaggtcttccaagccacggtcatccttctaaaaggccaatcccataatggcaccttctgatttaaaagctcttgctagctattcaccctcatgtctaccaccccagcctccaggcccacagggaaaagtacaacctccttttcatgtagcccaagatcctccattgctgatctccatttaatctcatcctcaagagactccctgtgctcccgcttgagccaactacttgccatctctccaaaatgccaagctctctcctggctctgtgcctatctctcagctaaaaattcctttctcccctgcaaactcctaccaatttatgcctggagaagctattttgaacaatcaggaagacggcactgcatagtggttaggtgtgtgggccctggagccagccagcctggggatggaccctggttctgccacttactggctgtgggacctgaggcaagttacttaacttgtctgtgcttcagattcttcatctctaatatggggatgagaatatgactacctacatgcgcagaagagtgaagacagcagccctgactgctatcctttgcaatgccttcttataacagtggccctgggctggcatctgggaactcaggtttcaggagagttgccaccattaactgacgagagtggctggctcactgtgcctcaacaattatgatgaataactgctttcctttggggagtctggaatccaggtacttgccgggcagggggtgccgacatgagcacccccagtaaaaaccctggagctcaggctttaatgagcctccctgattggcaacatttcacacgttgtcacaacctgttgctgggggaatgaagtgcgtcctgtgtgactccactgagagaggaccccagaaccttgtgcctggtttgccccagagtctaccccaggcttcttttccctttgctgattctgcttttctgcctttcactgtgataaaccagggctgtgagtattaacacctatactcaactacgtgttgagtcttgtgagtcccactagtaaatcatcaaacctgggggtgggggcctggggactcccaacacccaccttatggaatagctgtgaagaatgaagttaacatgtgccaagaacttagaacagcacctggccgttcccagtaagggctctctctactgctgctcccaagcagagggaaccatgctctcttctctgctcagaggactccctctgtcacaacatcagtcatggtacctgtcctcattcatttacaggtctgtctccctcaaaagacggtgagcttcttaataacagttggctgtgtcttctgcatgtctttgactgaatcaccaaattacaaggaagactgtatatcccaattctctgcaacgctctggggctgacctggcctgccagaaggcactgtgtgtgccattctgggaaccacactagggctggtctggagaccaccaggatggcccccatccctgagggtgggcagggtttttccccaaattcagtgtgaccacaaaatggaccccaggcttccctaccaggcttgagatgagatgagctggagccaaggtctggcagccttctgctctgacttcccctcacccaacaggaacctgatgggttattaatcagacagtccctgggaaatcaattaagtgtctgatgctgcagagtgcaaaagaagtggatcagggtttgggggaccctaaacatatggctccctccagaatggatcacagatgcacctatagaagcttaaagcaacatcttaccccagctcaaagggagcacaggtaggcccaggctcctcaatgggggactcagttaacattggagactgccagaagtatggcaggtgcagagaaaggagcacatttaccaaagccctctctcttcttcatcctcctgctagcctttctttttctgccagcatgaaatctaaatccctcttggtcattctaccagctgttatagtatttattcagccattaattctagactctcaatacagactgagtttgacaatcagggaagggcctgtgactatttctctgatatcaagaggctcccattctggtggggactggcaaaagctgtttaggctcccattctggtggggactggcccaacctgctctgttgggccgctaggcctctgctcagactgtgccctctcaggccctcctttctgcccctcctctgcctgggagactcctgcttgctcttctcagtcatgctgtaccaggtcttccaggaagccttcctttctccccactcaagtctcagttaagtatacatattcattcatttatttcacctgtgttaataattatcaaacagctaccatgttgtgggaagccctgtgttgtgtgctggggatctcagggcaattaaaaagtagcattatttcctgtacttttctctatcaaagcacttattctattataggagtctgttctctgaaatgtcttacctggtagacacatagtagacactcagtgaatatttattgaataataaaacactacataataagtagttgagcatttactatatgctaagacattttcagacattatcttaatatgtttgttacaacagccttatgaggtggtgtggtggattaaagatggccacaaattcttggacactttttccactgagaagtggggtctgtttctcctcctcttgaagctggccagcttatgactgctttgactaacagaatatggaggaaatgacactatagcattttcaggccaagccttaaaagcatcaatagctcctgtctcagtgccttggagccgcaagccactgagtatgaagcacaattaccctgctaggaagcctatttggagaggcccttagagggagaggatgctatagtttggatgtttgtccccccaaagctcatgttaaaatttaatacccagctgggcacggtaactcacacctgtagaaccagcactttgggaggccgaggcaggaggattgcttgtgcccaggagttcaagaccatcctgatctctacaaaaaataaacaaaatcagctgggcatgggggtggcacatgcctgtagtcccagctacttgggaggctaaggtggaaggactgcttgagtctgggaggttgaggctgcagcgtgtcaggatcatgccactgcactctgtctcaaaaagcggggggggggggaaaaagaaaaaagaaagaaaatttgatacccaatgttagaggtggggcctaatgggaggcgtttcggtcacgagggtggatcctgcatgagtagattaaagccctccttgggaggagatcaagttctcacttttattagttccttccagagctggttgttaaaaagagcctggcacctccccacccctctctctgttgccatgtgatctctgcacatactggctcccctttactttctgccatgagtggaagcagcctgaggctctcaccagaagcagatgcttgtgtcatatttcttgtaaagtctgcagaactgtaagccaaataaatcctttttctttataaattacccaccctcaggcattcctttatagcaacactaaatggactgagacagaagggtactgccaagaccagctttccagccatccccccacaagatgtcaattatgttagtgaagtcatcttggatccttcaaatgagtccagttgccagctgaatactaccagtggacccctgtcaacgcgatgtggagtggatgaatagcctagctgagctcttcctaaactcttgactcacactgtgaagtgtaatcaactggatgtttccaaagccactaaattttggagtcatttgtttgttgtgcagcaatagataatcacagcagaaagtgacttttattttctccattttagagatgaaattgaaggtcttggtccatagctagtgagcactagggtggggtttctgaggatagggtatgtctgatcctaaaaccggtgcttcaaactcactatggtgaatgggccatcacttgtaccctcagaacataaggccaaacttacttctctgaagtagagaagaggtagaacctactatttcccctcaactcctttggggcgagtaggagctcaagaaactctttttgaatgacatttttatccacagggtggatatggagagaagatgtatatgaaaaaaatgggaaatagcttttagagtgtgttttctaaatgctaggcactgtgctgtgtgcttcttatatatcacatttacttcctcccaacctctttgagaggcacgaattcttatcccaatttatagatgaggaaatcaaggttcagggatgttagggaacttggccagctagtaagcgttaaagccaaggcaggtatgaaggtccctctgactttgaaggccatattctgtccaccttgccaaggtggtcagcttgtgattcagtctgccagacttgatgctgatccctcctaaaccgtgccttgttagttttgtgccttcaaccagttaaggtcagcatcaagatctagaattctgattgtgtattcactgaattaagcaccttttccggctttaggtcatccttggagggacaggactctggggtcacagaggaagacttcctcaaacatttcaaccggggcttcaagaataagtaggactggatagaccacgaagtgagaaggtgagcgactctggcagagctctgcaagactctgtgaaaaggcatgaaagggcctcgcattgggggaaatacatgtacatgcacatacatgcatatacatacactgaatattaaatatatatgatatatatcacaaataatgttatatatgtatatagatgtacataaaatggtgttatgtgagtatatacctacatgttaacaatggttacttttggtgacaaataaaaatgattttcttttcttcttgcttatttcattgtctagctgttttacaatgaacatttcttatttgagtaataaagtataaataaaaagaaaaagctgcatgtgtttgagcaatggatgtgggaagatagaacatcagaaaggcaggtgagcacagaaagacaggagacgtgagctgggaccacctttacaactcacactaaccattaggaaaaccgccttgctgctcatcctctatcttcctttccttgaaaaacctggagactcagaataggaagttctaacttgatcctaagtgggaaagatgaacatccaagcagagggagtggtgactgtggtccatgcagagcatcagaaccatcgattagtggctggcttcttccagtcatgttcggtctttcaatgagcacattggaaataatggagatctgattaagctaccctgggcaggctgacacacaattatcctactctgttactgatgaggcacacagggaaaaatcacacacgattttaaaggatgccaacagaaataatataaattaagagactggaggcgggagcggggaagctgcttgggctgcatctctaagaattttgctttcggaaaaacaattctacaggagtaaagtggtacaaacaatgttcattttctcttactggcctccacaagcttgatgtgccattaccatagctgtgtgctaggcagtcacatgtccacacttttcacatgcaggttaattttacttccttaactgtgggatgacctttgttctcttcacagataaagaacaggagtttggggaaataaaatctacgtttcccactactttaggaagtagggtagaagataaagtggttccagttttgccagcctaggacacttcatctacagtttagagaaagggaaaggctatgctcccaaagtcaacagcgcttatctcagagtggtaggattatgggtaaatcttaatttttgtcttcatagttttctgcattttctccggtgagcttgtatggtttttaaaatcataaacaaacttcattttggaaaaacagtgtgtaggcagagggaaggagaacagctacagaactcaaggagactgatgtccctgagctgacaaatcactgaccaacaaagctggaagaaggaacagggcagagggatcccggccagcagagacgaagagaaggtggctggggtgtaggtgaagcagcactggacagggagtcaggcaacctgagttcaagtttcagctgtgcctcagtcgcctgtgtgaagtgagctagtgatggacccgctctgattctcagcttccaaattcccaaatggggattatcatcctaatacccacttcatagaggtatgaggattacataatgtcacacacaggaaagcccttgtaacccaaagctgatgtatacatgctaggggttattagggctttgggcataaaggtggtagcacagcagggaaggaggagaggtggggagactgacatagctgagtgccgacgccaggccaggcaggtctgacactaggcattgggtggtagaatcatgtagggaaaggcaaagatgagggcccgagccaaaccagactgagagcctgctgttggtcacacatctgtgaaagcctcgttcacacattagctctcatctcctttaacagttccgtcccgcaaacatcatggccattgtgtagataagggaagagaggcaaggggttggtgcggggggtgtctagcaacttggccaaggtcacacctttggtaatcagcaggctagcactggaccttgggtctctcgggttccaaagcccatgctggcagtcagggaaccgcatccctaaaccgtgcacccaaccccagctcctccggccggcgttatctggggacactgaatggccccgccagccaaagaccttggtccgggccccgggtgcccaccctcctcagcctcaccctccctaccggccgcgcacctggtctccagggggatgttgctgttgagcagccagttctcctgggcgtgggcaggctcctgggcgccgccggcagggggctctccggagagcgagtggtccgtgggggccgggctggggttgctcctcggcgtgaagttgccccggttcagggagttaatggaggccgcgtggtgctggttgggggtgtgggcgtgcgagagcggcggcggcggcgtccggagccgcgcgtggttctgcaggccgcccggatgatctagggcacaaacatggcggtcagcggcggtgagcttggtgctgcccctcggctggaaaagcagccacggaggtctgagcaagaccacagaagagggagccggcagattatacatattgatgcagtcaatcagtaattacacgacagttgtttattgagcacctaccattctaggtgctagggataccttaaccaactaaacagacaaaaattcccgtccccactgagcttaaattctagcaggggagtgaaacaataaacaacataaaaaagactagttacccatctcagcaacttcacattgtttcatgcttttaggacgtggtttttaaagtgtggccagggaccagcagcttcagcatcgtctgggaacttgttagagatgaaaataagccctgccccaggctgactgaatcatgaaccctgatagggcccaggaaactgattttacaaaccctccaagtgactctgatgtatgctaaaattctagaaccgctgattatatatgatggtacacagtaaacgaaacaaaccaagtttttaaaagtaaaacgtggccggtcgcggtggctcaagcctgtaatcccagcactttgggaggccgaggtgggcggatcacaaggtcaggagatcgagaccatcctggctaacatggtgaaaccctgtctctactaaaaatacaaaaaattagccgggcgtggtggcgggcgcctgtagtcccagctgctcaggaggctggggcaggagaatggcgtgaacctgggaggcggagcttgcagtgagctgagattgcgccactgcactccagcctgagctacagagcaagactctgtctcaaaaaaaaaaaaaaaagtaaaacatagagtttactgagatggtgataaatctaagagcacatacagccaggaaggggactgtggcctgtgtatgtaagggcagtggtgaaattttagatagggtggccacgtaacgagaaagatgacttttgaataaagtgagccatgctggggtccggtggttaaaaaccactcaacatttactgagcacatcgaatgtgccagagtcccgttctgagccttctacaagtgtaaattcagctaattctcacaaccactgcagagtagggactgcttttatccccagtttacagatgagaacattgagatactttatttattccctttaattattcagaacaccaggtatcatcaccaatttatagatgaaaaacgtagacttggagcaggtaagtaaagtgcccaagggtttgtggctaagtaggtgttattggcaaagaaagaaaacaaatacaatttctggtgataccacaaatgaggcaagttgtggaggtaaatcttcaccatccatctaagctatgctcacagaaagcctagtctttcaaagcagatgatattatgcgggtggtgaagaggccaagaaattagattctaacctagattctaccacttattaaccacatgggcatggacaagtcatttaacctctttaagcctcagttttctcatctgtaaaataggggaaatagtttatttgggggatcacagggctactgtgagatcaaatgaggcaattggtaggaaataaatatttctgaagtattctgcttcctttgttcctcatgagaattctgtattttatagaggagactaagaatcagaaagaacagcaatattccaaaagctgtgctcttccttggatagggagaaggctttttggaaatcatcaagcacagtcaagtatgaagcaccattagtgttatggatttttttagtgtaagatgcatcactctgctttttgagtaaatcaaccttttatgccaaagaggtacaaagccaatctggtggggaattcgggaaaggggagttaggggtggaagggagaaagaaacaggaacccctctaagtggatcacttccttattacaagctgctactttcggcataaagcccacacctggcttattaatacaaaaccctccggaatccgatccatgtcttccagcctcttctcccatcagctccatcatgcatcctccactccagccacatttttcctccgaggccaggagatgtactgagaccatctgaatggccaaaacctcaactcccacaaggagggtccccaggaaggtgacagaatgtgaatggtactccctgaagatatgcagttctgtagtgctggaccagaagggaactagcaaggatgttccttgctgggaagggagagaacctggcaggcgaatacaacttgtccaggcagagtggtgtcccactcagagaacagggagtattggacgagaaagaaggtgagaatgtgcagggtcatttgttttgtccagctgtcctcaggtggcacttcggtggagacagacagagcctgggacagaagccagcagcagaagcagcctcttgggctgactgaatgttcttcccagccttggcctttcaggctgctggcagtagttcaccagagcagtgggaggcagtggctgaaccactactgtccaatggttatcaagaggccagcagagaagtgtgacccagtccttgctcctgctctggtcctaggagtcaacctcatggcattttacttaattgatatagtttctgctatgtattggagcatctgtaatgtgtgctttcaaacccttaacgtttctaatgctcacaacaacccttcgggggcagtatttgtattcccattttacagatgaggacgctgaggcttacaaaactagtcagttctcataaacacaaaagccaaattcagtctaccaaaccatggtgcctttgcataaaacttaaacacctcctggaatgtctgtccatggctaaatgcaggaaaaaggtcctcagtgaagacagtagcatctgatgtctgaggcaggcaagcctacagacatttgctttgtgactaatggggacaccaggctctggcttgataaatgttcaggagaactgtcaaaagtcctgcaatgatgaaattttaagtaagatcactggtccaggtctaaaaactaacttctaaaaggaaattctcctatggggacaaggaatgttttctatggggacaaggaatgttctgggccaaatcctttctatcttttgagctctcagctcaactgcctccccgtccagaaagacttccttgatctgtccttttcctcttgaatgctgacagcaggcaacccagacctctcattttcatttcctccccaagagcatgcatactgatgtccacatgttgcctcctctgggaggtgtgaaagtccctatcttctcttctctgtgctgggtgaacacagagcctagaactgagcagatgctcaattaagtttattgaatgaatagccatgtgaatggcctgagctgtcagtgcaagcaagtgaggttcatgtggggcaatttgtgtgcaaaaaatcatagtagaccactctgggcctgctagaccatgggtctatgcaggccttcacttatttgcctggagccagagttgcagaggcttgagctaggccctttatttcccttccctcaccctttctagcttgagaatgttaagaaaggggaccttgatgtttcctgggttcccaaaggaaaagctctgtatttgggagctcagcaatggaaacctcactcacaaaccccagaaagaaacattaacttcccaaagagcaaatgtttcctctggtctgaatggactccttttttttttttttttttgctcctatggccaggagggaagacagaggtgagaggctacagaggagacttcttttatcccccgacaaatatgcaccctcgtctttggagggaatctcagaatcagttcacccattcagcatttattgaatgcctattctgtgccaagtattgtacactaggtattgggaataaaacagtgaacaagataaacatggcctaagagagaactctcttatagtttctatttactggctgggtgacctgcaacaactcacttctcttcggtccttggtcagtgtgtgtgtgaaagggcacactttcctacttcaccactttctggaggatgaagagccatgggtaccatcaactcctactaagccctgagggaaagacccatgtgtcatttctttccatatccccagcgtccgcacagagctgtgcctgatgcatggtaggccctcagtaaatatttacagaatgtcggggaaagaacaacaactcaggtagttgggctttttgcctgcacaagcagttgcttctctcacgctacctgggagtacacattggtacacttgcaaagctgtgatggaaattccaatttataccctcttcttacagatatagctaccaagtatatctgtgaatcaagcccaaatgtgagtcattttactgctatttgtgcacaccactgccagtaaaggtcacttgcttacctgagttttgcaagcctggttttccaggaagtttctttgcttcctacaagttcttaaatatatttgcagttactagtgtcctccaacacgttaggcagttttcattttagatgcacagaaatcctgaacaccgaaacctcctggctgcacctccctgaaccaagatcatagtgaggctcctttacaatgctgggcagagccgtatgtaagagaaagagactcggctttggtgtcagagagccctgagttcaagttttggctctgccacttagaagctgtgtgactgtcatcaagtcacttactttctctggagctttagttttcttatcactaaatggaaataacgcccaccttataggattgttatgagaattaaaagagataatgtatgtgagtacttagcaccatgcttggaatataggaattctgaaaaatggtaactattaattccacaattacaataaagtcatgttgaatgaataaatcgcaaagccctgaatcatcaccatggtgatcactcttcagcgtttacaacaggggttccaaagcaaaaaaccttgagagaaaaagagcagaacatatctaacagaagtgtgatactattttattacactgaatcccactctggacaacctgctggctcctaggagctctagtcgcaggagggtgcctgtagctgaacttgcagttcagaaactgatgagaatggctgtagccctgacactcagaataaaaccagacacatgggctcaccatgtattcaaagatgaaagctcctttctgcattagactagcatctcagagcaaaccaggcaggggctgctacccaaatccatacctctctgccctgggttgaaggtgtgccataaggagaaggccctagtgttaatcagccaggaatattaaacagccccttgttgtatgcagggacttgatggattaaaagatggggataagcctcatccttgacaagtagtcagtggttgggaggacagctggcaaagatacaagagcagagctcggggatctcacagacctagaccttaattctgtctcctactggctacattcacctctatgagcctctagtcattcatctataaaatgtatatataatagtaatggcaataaaaggaagagaaagaatatggactaccgtaggttgaatacatagagattgagaaataaaacaaatatggtccttgactttgagatgctcatagtctagtaaagaaaatggatatacaaacagatatatactacacaaactggtgatgataaaattacacatcagcatcatcatcgcatacattagttaacatttactgagtatttactacttgccggatactttctaagtactttgattatttaatccttataacagctctgtaaagaaggtactgttattactcccagttttgtaaatgaggaaactgacacataaaggctaagcaatttgcccaggatttcgaaacctttaattggtggagccagaatttgaactcaggcagtctgcctccatagaccctactgttaaacattcttttttgtgtgcattcaatgagtgaatgcaggtaaggtgcttacatcaaggcctgccacatactgagcactttccaagtgtcgaccacaataattcttatcggcatacgccacagccccagggagcaccacaggtatggagggcagctgccagactgactgtcaggctcaggaaaggtttctgagaagtgacatgagacctatgtctgaggggcattctaggcagaagataatgcatgtgcaagggttcagaagcaaggccagctggggacagttttataactagagtgaaatggctatgtgaaaacagtggctgcgggtgaggtagagacactggggcaggcccaggtggtcacttcctggaggtgccaggctaaagaccttggcctttatccagagggtggggggtcacattagtatgtgaggaagatttctggtggccacgtggaggatgaaccaggccgggacaggctataagaaccccctagactgatggcagggtgcctccctcgtggaaagattccagtggagtctaccactattcttttataagatcacattcatgagaaaaagccataaacttccagagctttggctcaggcaaggaactcaatcatgtcaatagccctgtgatctaaggacagctctggctccaagaaagggtgccaggctgagtgcccacatccagccctgcaaatggcagacaggtgcctgaaggtctccttgctacggagctaatgatgacccaagcatacactgcagtcattaattgggtcctaaagattgtcagatatgaaagatgatggtatttagttatcataaaacaaaaactccagctgcctgagaatgccaacagaaagagttatttggcttccattaaaatgccatcgactaccactgacatgggatggtgatgtagcagtgctgagagcttagctaatgaatcttggcctacacgaccaatttatgaaggccggaaagctctttatcaacacagtcagcagtcggaatctgatagcctgacttccagtctcagttctgcctccttcaagctgtagaatctcaagcactttatttaacctgagtttcagtttcttcacttgtcaaatgtgtatgaaagcaccttgcaaactgtaaagtcttgtgcaagagttagagaaaacaatcagtattattgttacctgaacctagaatggatcaaaacaatgaagtccacaatgtaaccaccagtctgaacatgaggctaggggtcacactttttgtagtgttttctctgcctattcactccttctccggacaaaatggtttcggttcattctcactttagtcctatgtcacggccagtgctcaaggcttctaaacagtatttggcctgaaatcccagatggactcacacacaaggaagggcccacagaggacagcagactgtggggcttccctggctccccttccagtattctgatggggaataaaaaatagcaccttgaggtcataatatggctatttctgcttcctcattcatttagtcaggacagaactttcggtgaacactcagattattaaattgctttgcattttacaaacagtgatgaagggacaatgtatgaaaaagcctcattgtatgatgcagtggtttttaaacaggggtgtatggaaatgaggaagggtgttttctggttgtcacaatggctgggaagcacagctggcctttggcaggaggtggccagggaggctagctgcatgcaatgactgggaccagtgatcccaggggatatgtactccagttacagtaggatgggtaaacagctactgtaagactttattctctgtttgcctcctccagccccatccttagttccagaccattctctgcctttctgtgtcccaggaggctgactcctaaggactgcatcacctgggctcccttgcccactggcttctggataggtttggctaatggtgagcacagcaggacactgaaaggtaggaagagagagaggctggagtaaccttcttgctattgtttggatgtgtaccccaaatgtcatgtgttggaaacataatatccaattcatatattgatggcatttggaggtggggcctttggaaagtgattatggtgagacaaaaccatcagggtggggccccagtagtgggtctggtggctttataagaagaagagagacctggtctgacgcactcttgccctctcaccatgtgatgtcttctgcaaagttatgacatgctaagaaggccctcaccagatgtggccccctggactttggatttcctagcttccaaatgtaagaaggaaatttcttttctttagaaattacccagtctgctagagcacagataatgaacaagacacttcttttcccccagcccgtggcagctcagcttccgctctgagtctcaggcagtagccacatccctccaggatacaacaatttacacatagagtggtctaggaaagcttctaggaagagcaagaacttgaacagagcactgaagtagaggcaggacagaggcagacaaaaggggagcaagagggcattctaggtaggggcctggcatgagtgagcaaaggcccacaggctgaaagatacagaccccttgtggcagcagtatggtgagagacctgggcacatggaatagagatctggcaatggaccacaaagagagatgaggttggaacccacctttaagagcctggagccagagggagtttcaagggtgttcagaaagagggctcaccccgacttccagtgagacagagtcttgctctgttgcccaggctggagtgcagtggtgcgatctcagcccactgcaacctccgtctcatgggttcaagcaattctcctgcctcagcctcccgagtagttgggattacagccgcacgccaccatgcctggctaatttttaaatttttttagtagagactgggtttcaccatgttggccaggctggtctcgaactcctgaccttgtgatttggcccgcctcggcctcccaaagtgctgggattacaggcgtgagccaccgcgcctagccgacttccaaacttttaaagctaagagtagtcataagagtgaaccagaactcccaggcttcattaaaatgcacatgaggttcctcaaccatcagtgaatgttctctaggataggactgggggagagtgccctactgccctttaactagacaattgagggaagaacagagttttggcaactgccagagagaggtgtaatcaacaatgctctctattcctagggtcatggtaattcatagacaaattaagccaagagcatcaaaacctgtctcttttaagcatggggcttgcataatttgactgggccaccatttgaatccaaaagtagaactctctcacaacatatactccaccaaatttcattcttgcgcttatcccaatcagcggctaatttgctgtgtgaccttgggcaaaacacttaacctatctgagcccgtttccccaattgacaaacagaaaaggaggtggtgggagtccattccaattttaaaatctaagactatatcattctgaacctgtacttgttaatgaacatctgcttacaaaatatgtgcacagcaagtcgtgtattatattgtgttgtgtgactgggcaccaaacaaggcaaaaggatggaatgaaagaaagggaaacatgtgatggttcttcccttcctccttccttcccttcctgcttctctgctttcatttcttttacaaacatcactttttatatgccttgtcctcgatactggagacatagagatggattagacaaagtttctgcctgtaaaatctgaacaggcagattttgttgggaaaggccagctgcagccggaggggtgggatcttttctggatacatgctttcccccaacttaaagctgtgtctacctcaaggcagaatttgtcctgggaaagctttctggctgtcaagtgagttttccttccttccattgccaccttcttacccttttcaaaaatgatctgatccataaacagttaggtcaagtcccaaatcaacaaggaaccatagttgatgggtaagaggtatgtgtgtgtgtgtgtgtgtgtgtgtgtgtgtgtgtgtgtgtgtgtgagtgtcgggggtggaattcagctcaacaggagtcggcagtgtgatggagcggataagcagctcatggaaatgtaggtaggctgcattcacagaggaaaagcacgaagaaacagggacggccatgctgtgctgatttgctggagcgggcccagaggagggatactggatggcggggtcaactcagtacagtagaggctgatccttctcaaggtctctggagctagttaatgctttccctggcttccttggatggtgaagggtttagaaactgtgtccctgagggagtagggggaggactgatgctgttagcctggagaggagaaggggaaggagaagagcttaaagaaggagtatgtgtttaggagtccagctgaaaaacgctaaacgccttataatgtccaagtctcatagcttatgcccacagaattcatgtgctaggaaataaaacacccaatcacacggtgtattcaacggtcctagatggaagaactattcccagccttgcctttaactcactctgtgactttggggaagtccctttctttctctgggcctcaatttgtctatctgaaaaaggaagttccttcatttttaatctcctgagtcccttccagccattgatggtctagttcctcttggcttcccttgttcctctcagggaatttcttggaaagaaggaaatagcgagaatactactgctgccttcaaactgccaaaggggtgggagaaggagtaaatctactccatggggctttaggaagatgaatgacaaccaagaccaggaagttacctggagcagacagcagttaagcttaagaaaacccttcctcctgccaagctctccagtattgaatgggctgcctcttaaggtagtgagctccttgtcagtgaagcagggctaatataatgagcctcaacctcctgcctgaatgtcaagcctctactgctctaactaaatgtatacacagttaaacttaatgcctccctgtccctgcagccccaattctatactccctctcctaatgctcctgatctcaacatcaccagctgctgtcagaacctcccacccaatcaatcaaccagacctctgggaactgccactgtgtcttccttctttttcaggttcaacaacttaacaatgtaaccaattcctctagctgtcatcttccacatatctgctagctcctcaccacccctactgccactacgttagctcaggtcctcactggtggagagtcaggccaggggcatagtgaacattggtgccccagcctgccggctcacccgcttcaattcagtggctatccatcagatggagtgaactccctaaaaggaaactgggttatgttgcttccctgattgaaagcatttttgtggctccccactgcctacagtacgagaccccccaccatccggcatgagtccactgctccagggtagcaccccatagctcgccacctccctctttaaaaaggtgccaaggttaacaggttaattagacaccactcatgaaactgctcactgcttgtctcatggccatggctatgcacatattgttttctgcgtgggaggcttttcacacctttgcctggttaactcagattagaagtttcctcctccaggaagccttctctgaccactctcactcctagtttgggctctctagcctccatggctcactctgagttatcaccatttgtttacgggtctgtctcttccaccagactgtacgctccaagggcagaggttgtatcttaatatatcatagcctgtgtgaggctagaagtggatgattaccctctctggggtaccaggtaggttcccatctgtggactctcttacctaggaactgtcactgattctcgaggggcctggggtgatttgggcactctgtgcatcctcatccttctctttaaacttgacctgacatttctccaaactgcacatttaagacagctgataattgagatgggcataaactttttatttttatccacagttggagatgccatgaaaagaaaatcaagacaatgaatctcaaggctcctgcagggaatagcctactttgttgaaactgatggccagcatcaaaggtcaaggcaggttatcaggtcattttccaaattctaaccccaattccatgggccctgcaggaggctaaataccagcacatggaagaggtgaattctcatccatcatgttcatacctttccctccactttgtagccatcagtaattttgaagaaacgactttctcttggaaaagacactgagattcctcaaatgaaagggacaggttggctaaaaggtcgctagaacgcacagagcagtattgcatggtgggtaagcactgtggctcaggctcaagctgcctcgggatcaaatctcacctgccctgcatacacactggtcatattacagaccttttctggaccccagtttcatgccacaaacctcattcaaacagcacagtggccaggaggttgagtgctgaatcaaatggaacaaagtttgaaaccagggtttaccacttactagctttgtggctttgagtgcgtttttaacctctgaaagccttgatttcttcatctgtaaaatggggataatagcataatctacttcttagcgttgttgtaggaatttagtgagacagtggatatggagtccttagcatagtgaccagccaatagaaaggatcaatttaggctattaattcactctcatagctccttggaattacatctaattaatttttccttatgctatagggtctccaagggcagaaatcttatttgcttttccacttagtgcttggtggctataaaatgtttgttgaatgaaactaaattaagcctttgtccatgtacagtctttaggtctggacactgggaggttgtcagggaggaaaaaaataaatatttatttttaaatttatttcctttattttaaaaattccaccatgtagaactagagactgaatatttattgacacatgacaatgatcagggcttttacaaaggtttccttagttcatcttcagaggaacagtatagagtaggacttaatttctccattttgcagatgagaaaactgagcctcagaaatctactcacatctttgtttatgaaatttttcaatttttttcaatgatgggatatttcaggccctagcattggggtcaactctgttaaatgtgacatcttgatttaaaaagcaaacaacatacaaaacaagaaatctgcccatggtcacactgctgggaaatgataaaagctaagatcccaatacaagcttctgattgctctttctacttttgatgcctcctagaggcagaagaagaaaaaattaattctgaagtacctcggctacatgcactgagcaatttattaaatgcaaaaacccctcatgtatttttgttatgcttgaacagcaaccatatcaatagttatatgaatgatgttttggggaccacaaaaagtgttgctgtttgataacacaccagaaggacaatcctaagatatgggtgttattatcctcctttcacaggtaagaaaatggagactttgcaaggctacacagcttgcccaggtggcagagcccataaacagagactccaaatgcagagtccttcccagcctttagagaagttgcatgcaaacgcctctaccttcaccgaagagcggccatccaaatccagcaagtcacaaggcagcatggtggcctcctactcatgtgacccttaccttcttcctcaggccctaaaaggcctcacttgggggaaaaggtggaaagcatctaactaagtgtacaaatcagagagatgcttttcatcatttacgactgaccacatgtgggtttttttatttttattttttttatatcggctcaggagatcttgggcaggtattccatccatcaatgtccataagccaagtcatactacaaacagataaaagaaattttgtcttcctgaagtcctctccaaagtgcccagctcaatccctaggcaacagaaatgtaataataataccaatgatggcctcaaaatattgaaggcttgctgggctgctagttagtctgcaaagcatctttaggccactgtctttccatttcatcttcccaagagtcctcggacataggtttaagaggaacgtaatacagtatggtaggagggtggcctgggtttgaatcctggctctactatttcctagctgtggccctgcccaagttacttagcttttcttgtgcccattttcctggcttgagatatagagacattagtcatagggttgccatgaggattcatgtaaagtgctaagaacacgcatgacacacagcaagtactcacctaatgttagctattgttatctctatcttccagaagagaaaactgaggctcggggagagaatgtgttcatgctccatggcaactaagtgccaagaaatccaagtctgtctggcttcgactcccgtgctcttaacggcgacagtataatttccacccctcactgacctgtacgtttcacctggcatgcagtaggtgttctgaaaatagtactattattagtatttaagaatgtcctcttaagtgctgtggtcctcgtcaatgccctcctactccttctcttaccacagcatcatgtgctgtttatagagcagtcccctcacaaaccccagagtcaaggcacaaacgacgctaactttatttcaatacaaaaggtgtacattctgtgggtgccacctgggcttattccccaagttaattcttttctctcagctgtggaatattttatttttccaattttagaatctacttatgttaaaaaaaaaaaaaagggacagagagagaaatccaatcagcccagttcaggtttgtgaaacaaataatgcagccggcatggaaccttaatcaaacagttatattcataaccacagcggtcactgttctgcctaatttatacagcccagggcatcctgaagaaaatgtctcttgacaatgtaagatgcaatgcagaggtgcgctgacaccactgaaggggtgtagatctccaggcctggcatcctgatgaatctgaagcaaattgggattcggaggcacatccccaggaattccacccatgcctgaatgtcattctgtattttctttttaaataaggaagtgcgagaaataaacttttacctggctgcttcctttgttttttggaagaaataaagtagaaagaccaagctgccttcatgttctagagaggacaagtgcttcagagtccggttgacatgggtttgaatcccagctctgccactcactcagctgtgtggtctagacaagttacttagcctctctgagtgtcatctataaaatggagataattgtacctactcagagattgaagcttaaatgagagaaagtgagtttcctatatgaatttttgtattcctaatggtcccagcacaagacctacttattgtaaatctaatctaaatgtgtattcactatgtctacagtcctaatgtctatggttactgagtgaatactatgtgccagagactgtgttaagttctttacatgcatgaacttattttattctaaaaacaaccccataaaacatgtattattatccaatttccagtttgaaataaccaaggctttgagaagtgggtagactggtccaaaataacacaattagtaagagggggagctattagaggtgccatgatcacagaggtagagccaggatccaaatgcaggcttgttgattcttcttctctgtcctgccccctccctccacatcacccatcaaactccatgctcagcaccctggctagggtgactgattcaggcaaatatgtgactttggtcaggccaatcagaggcaatcacaagatttttctggagctatagaaaaagtggcactgtttttttccgtttggttacaaggctggtagtagataagcttgcaggggtccctttgtcatcatatgaggaatgcctgcctgagaataaggccaaaacaaagggaaacagggtcaggagggattcattaagacgtctgaatgcctagatctagctgcgctgatgggaaaaggagcccctggactttcagtaacaccaccgtgacattttccttgcttaaaaacgtgagttggagttgggtttccatccttacagctgggagtcatgcctaacccgctgtgctatcagcctagagtgcctttcctagaccctcctcaatccgtgaggttagaactcaactcagaggctgaaacaccgcgtcactcttcaggcagacctgaccacaccctccttcatgtcccaggaacccaaaaccacaaggtagctgtgcttgtccagctagcacactaactcgtatgcatgcatatgtcccccactaatctgtgagcccctcgagatgcctcttatttatcaccatgtcacttgcactgagtccagtgcttgtcacatagtaggtgcgaatgttagtgaacagatgagcaggaatcactctctcaaacctcatcaacatctcagcagatgttcactatttcctcagaccatcgatatcaactcagccaagcactcctttctcaaatatttttttcctggagcacctctcatatgccaggcattgaatcaggcacagagggcacaatgacaaacaagagtagtttttaaaaccagagatgttttaaaatataatgctctactactataaagttctgactatttctacttcgtaagaaaaatgtcctgtaatgatctgtggatattaagtaatattaacgtccatttccaggtggacagaccatgacctgtgtggaaatgggagcagctgcaccgctgagcccggaggcaggaataggcatcctctgggtaacagtaacacagcctgcagctttgttcacggtctcgtcctctcgctgcattactcctggacgctgttactaatcacacttactcacattgattttttttttctccccgaggatgaactacctcatccttccttaatctaatgactgaaattaggcaaaagcagccatctgatagatgttaggcatcatcccagagaggaaaacatcaaacaagattatatatatgtgtgtatatatatataaaagccttttaatgtgtccattctcttaactgcccatgcaaatcaggcagaataattccaaatggggaaaaatgtatttgagtctgtggctgttttcatgacccttccttgtgtcaggtcaaccaaagagtgcatttttgtggcggccagtctttcctcgtaagtacatgctgagcctcctgtgtgccgggctctgtgctaggtactttaaatctgggctttctgatctgtgttacagcactgtgaagtttaacgctatcaacttcatttcacgaatgaggaaactgggtctcagggaagtgaagggttagcatgagtctgtccaataagtggtggattcaaaccaaggactagcttgactctccaagcacagggtctttctacctctctccattgtctaccattgacactgtatgttacagggatccagaaaagctgggaagagccagtcctgtgaaggctggcatttatacggtgtgttgggtcccacctatggcgtgatattacttaggtctagaaagtaatgggggagatgcctgggtctgtcatgtgtctggatatcccaagctgaggtctggagagggagtgccacggcacagcaaccatgtccaaagacaaatgcactgtgcccaagggaacttgagaaatacaactctgtttttctctctctctagaactcaaatgtggcatttaggaatatttctagatgtcgaaagcctccatgaagatacagtctgactgtcccctttacatacacttgaggtacacagacacttccttcctgactgttcgtatttgccgtgtatgagcctgactgtacagcatagcggggctgtagccaaagcaaccaggctccctggggaatcctgctttcccagtagactgacagggaaggcctagagatggaaggtgcaggaccaaggcaaggagggaggtgtcagtcctgggcagcctggggtcttattgacagctcaaggcaatgttttgggctcatcactagactgaaatcacacactgcctatctcacttgtgatctcagactgaggatcatgagaattcccttggggccctcaaacccacagactctctcccttctctgccttcagagtacagaggcaagtcaaccaactttcactggtacctactatgtccaagatcatgtgataggcatggagagagggaatagcacgaatgtcatctctaccatcaaggcactgagcctcctgaaggagacaggcttacagacaacagccctaaccagatgcagtgtgggaactgctggcacccaggctgtatattgaatgtgatgaggctggagtgactgatgttttcttgcaaaattgggagacagtgcccaggagaaggcaataaatgcctatcagatgtccatgtgcagcaggcgctctgcagaacatttctattcaaggtctctgaggtgatctctggaggccttgaaggatggacagaattaaatgatagggacaaggtataaaatatgcagagacagcatgaggaaaggcaggcaggcagaaaataataggagggcagcctatacctttcaaaagccaattaatttaattaagccttgccctcatgatgtctttatgatgacaattctcttgttaactcctcatgtgtttttgcctagtgtctccaattaggacaacatgtctaaatacttctttaaatctctgtttctccctagagtccacacagtgctctgtttgcaataaaatctgacttaactcttatgataaaatgaggactacattcctacatgcgaaaaaaacagattggactgacacagacacaaatatcatttctgaatatcctatccaaaggcagattttaacttcaaaaagaaaaccctttgcatggtgatccaaagactagcagtgaatgaaggcaacagcaagagaatcccggtcaaacacgtcaaacatgtgattatagttcagcaggcatcagccccaaaggcctaagacctgtgacatatcaggaaagtgagttaaacaaaaatgttcctcaagtacaaaatacaaggagaggcattcgggaggttaggtgcacccggaggtagaagactctcaggcctgggatgagaatccgccaaggaaggaggtgagatgtatgatgctagcctccagccagtgctcaagacatcctcagcatctccatcactaccacttaccactatttcctcagaccagcgatatcagctccaccaagcactcctttctcaaatgtttttttcctggagtacctctcatatgccaggtattgaatcaagcacagagggcacaatgacaaacaagagtggttggttcttgctatcaagtgggaggcagagcagtgaacacttaaacattgtatgcagcaggcagtctgtggtgagggccagattcacgggtgtgtgaactctttagtcacccagagccctgcactcagagggcccgtgtttggtttgatgggctgtcactatcttgaaattctgaaaaaattttgaaccaagggccctgtattttcattctgcctggggccccataaaagacgtagcctgtcctggatacgatgaaagacttttgctctccagcttccattctgccttttcccttgagtaacaacagtgtggtttggggaactgatctacactcaaggtgcctgagtgacctaagggtgacctcatcccctgagccaatgagtgtttcaggaatgagcaggtgacccagttcaagccactgaaactccatgggaagatttccagaagtttctggaaaaaattgttatttgtttttatttttatttttattttttgagacagggtttcactctgtcccccaggctggagtgtagtggtgcaattttggctcactgcaacttctgcttcctgtgttcaagcaattctcctgtctcagcctcctaagtagctgggatgacaggcatgcacctggcttttttttttttttttttttttttaaagtagagatggggtttcaccatgttggccaggctggtctcaaactcctgacctcaagtgatctgcccacctcagcctccgaaagtgctaggattacaagcatgagccaccatacctcgctattcttttttttttttcttttcttttccttttgagacaagagtcttactctgttgcccaggctggagtgcaatggtgtgatctcggcttactgcaacctctgcctcccaggatcaagcgattctcctgcctcagcctcccaagtagctgggattacaggtgcctgccaccacgcctggcttatttttgtatttttagtagagatggggtttaaccatattggccaggcttgtctcaaactcctgacctcaggtgatccacctgccttggcctcccaaagtgctgggattacaggcgtgagccaccatacccagcctgttctttgtttttaatactgagcaatggaagccagtctgtcttgaccattcagtgaacaagcacatggtccacagtgctgctagcagccaccctacaacaaggggaaactggcctgagtatggcagagcaaaaccaggatgagaatctgggtccttgatgatactgctggtctctggagcagccagccctgaggcccaccctacctctgggcttccttttatgtgtcacaatatatgtcccagtacttggtgttaagttttctgctaattacagccaaaagtatctccactgacgcagaatcagatcaacctcattttataataaatcttgattctaccacttacagcagtacatctttggggaaatcccattttctctcctccactagaaaatgaaggcaagaaattacactgtattagactgtagtgagtgtcaaaggctgtaatcttagtgaagatgcctggacagtgcctggcacatagcaggggttcactccgtgataggtattatgatgatgataatgttcggccctaacagctgtctgccactgtgtttctggtgatgagttggttaggagctgaatttcccaactgtaagaaaaaaacagcagaaatcattttttaaaaaggtgtctcttggcataaatagcaatgtatcactatactaatagaatttaaagaatttgacaagcaaattcaatcactttgtatgttacagaagcagtaagttggtcagttgccctctcggaaatctggacattccctggtcacccataacattggggctttcctctttatgaatgctaactgctaggttcacttacacaggctgagagggcaaagctgtgattttgcaaaattaaaagtaatttcatacacgtcaccgctgatacaaaccctagtttctttctgttcttatttgagtaaccttctaaatcttaattcttatcctgtattctaactctgatctcttgacatttccagctttttccccttctctcccaacaaaacaaaacagagcaaagagcgtcaactgagatttgtgtgatttcagcttcagagttggatgtctgagtgtagaataaattctaattcactggtgatgggaaatgcacaaattctatccatcagcattttagctatttttacttaaaaaaaaaaaagtgtgtatgtatgtgtgtgtgtgtgttagtagtagtagttttcctgttgcccataacctggacctctttgagactggataattccaagcgaatcaggaaattccagttgggtatacttgtgagatgatttttgcccttccttattttccatattttcagggaaggaaaatgcaggagagctggagtctgttagtgacttgacaaactcccacccaagtgtgggagtttcctaaagatgacaccagttgtgctggaaagattgtgaaaatgcagatgctttcacacactcctccatgtcagtttaaaaactgtttccatatggacctctcacatagccatgggaggaatgttccagaaggtcacctccctgcccttccatggctccgtgctaccctcaagtccaagtttcttagcctggcattcaaggtccattaagatctagtcccttttacagccttgtcagtcactgtatcccttatattaaggatcctgtcccagctacactgaaccacttaaaatttctccaataaggcaaagaaaaaaaaaagcaattaacaactccaagaaaataaatgaaggcatgtacaagaaaagaggaatagttacagtgcactatttggctcaggaggaaaagaaataaaaaaaaaaaacaaccccaaagcccatatattacataattatataaccaatgactacctatttaacaaaaatgattataatattatgatagagttctatcggggagggaaaacgagagagaaggtagtgtgggaatcttcttctattgcacaaagtcaacagataatgtataaaattaataaatgaaaaatagcagtacatgcatgttatttagaagcatggaggtaaatggcagaagaaacaggtagaagagattagagttcctgtctcctggggagtgagacttgggagtggggagggatggggcaaagaactgactttttttttttttttttttgaggcagagtctttctctgtcgcccaggctggagtgcagtggcatgatctcggctcactgtctctgcctcccgggttcaagcgattctcctgcctcagcttcctaagtagctgggattacaagtgcatgctaccacgcctggctaatttttgtatttttagtagaaacggggtttcaccatattggtcaggctggtttcaaactcctgacctcatgatccgcccgcctcggcctcccaaagtgatgggattacaggcatgaaccactatgcctggccagaaatgatattttttattataaaccttttactaaaatgtaacttttaaaattttgtacacatatcactttcatttagaaataattaaaaataaaggtgttttttgtttttttttttttctgccacagaggcatagctttaacatgagatttgacgttaatattatagacactttgaaaaaggacacagtaaacagagctgcagggtggtattttacagatcaagataacttgttttctaatgtggtgaacaccagtgattaggagaaccatctggaatccatcagtgacatgggcttttgaagcttttagaaatgtttatttacctggctttgcgtgattttctaggtttgagagataaagattaaaatctttatgatactgtacatttttgttgcttgttataaagcattaatgctgaccaaaatatgttttttgtacaaacaattaaaatgtttttctttgcttgctgtgcactaatattcagtgaactatttgcttgtagtccatgtatgagcatgatgttggaattccttcacatggattattttgctgtatgtttggagcttgtttctgatgaataatttgcttgcatgcattgtggctactacacaggaactgattcaatgttaaaatagtttgctagctgctgtgtgccattttttaactgatatatttttgctttgtctacatggattgcacagcaatttatttcagtttattttcaaagaaaaggaccaatgatgtgttatttttatattagaaaaaaatgcagacaaaatttgtaaggaaagtagctggctctactccacctcttctctcatttttctactaaagataattaagcaggtgtcaagaaacattagaacatggttgctaagggatgtaaatgagaaaaagtttatacaggtcaaaaatataaaagaaatatctaggggatggaatgggacttgaagagtggctaacagaggcttttcttatagaagatgttattcaaaatagaggaggtttcgtacctccctttgctcagcgtcaggctggctccatctcaaagcgcttattcaacccagacacacatgaatgacactcatgcacctgtgttaaggcaaagggctcttcactttgaagccccagaagatgtgtgtaaaattttctgccagttttgctaaccatgtccttcaagtcaggaaccatgtcaaaacacagaacctgtcagagttggcactcaaccaggctccactttctcccttccatcctaaaaggaagaaaagcatcctgttctctctctctctctctctcttttaattacactcaatctaaagcaatccttggtgatagccacagcttccatttcaaacttcccgacagcccaagggtatgttgtagcccactaagtctgtcctgctgggatcccttaagcctcttccaaggagaccaccaaacccacatctccctactgcctactggttcctgccaactaaagacatagtcctgtggtagggtcactgtcttctgtgaagctgtcaccaacaccaccacccatccctagactaccccagcaagaccccaccttccccgtctccttactctgcagctctttaaacagagcagcccctgggggtccccgctctgactacagtcagaatttgtgtgccctggagcagtttcctggaaggagattaggaggaccagggctgtcctacccagcttgctggaaagttttgagagggcaatatcatacgttaagaagcaaaaaatacaccgccaccccatggtcttaacactacaggtatatataaaagcctggaaggaaaaacaccattctgccactagttcctaaggtaacaactctcaatatttaagtgtataataaagctaaatcaaaacaacaaggaaataggtcaaaaatctgcaaggtgcttgacggaatagattccacagccttggaatacacaagaactcactatataattaaaaagggataaagtggggggttacaagtctgggctttagaatcagatccacataggttcaaattccaactcttccatttgctagctgtgtgactttgtacatattatatcactttcaaaatctcgtttttctcacaattaaacctagtttataattatgtaataaattgttgtaaggatcaaataacaaaatataagggactaccaaacaagtactgattgggtggagcaggctttaaagtgacatggacctggattgatctaggtgccatcacttactagttggaaagtctcatttcacttttctcatctgtaaaagggagttaatggctacatttatgaaaggggagatctgtgaaggtggcatgagccacttcctacagttttgtgtctgcatcttgcagaatgaaaaatgcactggcagaatgaacgagagcagagtgaattgtgaacctcatggctgggcccggagtctctggaaacccaccccatctgtgctctggcaggtacctccctgcacctgcagctgggcagctcaccatgcagagaagggaagtccatctcaccctcagaatgctcattatccaccctttggccccatttgcctataaatctggacccatcaaaagttgcctataaattcagatcaccttgccttctgctaggatattccagacactcaaggagggtgaacacggctgtcagctgaggttgaaataggacaaagcaacagcaatcaaactgcttccatgtgcggcaggtaattacagaatcggctacattacagtgattacgcattgccaaggagaagtcaaaagaagtctccagcaacttcagaggtgggagggggaaagtttaattaaacagctctttgcaactgatttaatctctctctcagaaaaactcacaggttcagaagagagacaagaaggagagagggctagggaaggggagccagggaaatcctcctacaatggggctgcctaggtctttaaatggttcttggggactatgtgatgaaatgggagctggtggcctttattatggaaatgtaagacttaagctaaggatcagggcccccgggggagatggtaaagagggaacctggttataatggtttttaatatcctgctggggctgggtccacttgcataaatacagccaagccaagcttcaggtggctgtagattttctcttcaaggatttattctcttgtgtcaaaagttcaccacctccagactctgtcattttggtgcaaaatgtgccttttttagccaccaaacattgaaaacaaagccttctctgctgggagcctattttaccagcaaaagtttctttgaagactaattaaattaagattctggacagaacagaacccgttgcaattgtggagtggaggacagaggactgaacaatttaaactggttggggcagctctgtgcctccgtcctaaatgaatttagattttaccatgggtgctttacagagaggatgggcttctgcagactacagtttgctgctgggcttgtggtccccaagggaaaatggtgctcagactatagttaatgtcctggttaaatgctaagcttgtgaccttgggcagcttataaaacttttgtgggtctcattttccacatcagtacaagtgcctacttgctctgggtaccttacgttattttgatatgatggagtaatattgagattaaatgtgaatgacttagaaaggaagagaagctaactgatcaatgttccgaaagctctgtttatgccattatcctactcagaaaccttctgtggctcctcattgtccactgaatatggtcaagtttccccttgattagagagttagctgtagtgtagtaaaaagggaaaggaacttggagttagtcttgcacacataggcaggtccctccacctgaaacagttttcctcccttctccaaagggctaagtgttactcatccattagctgtgtatgatcttgacaatgacttatcctatctgagcctcggtacgctcacctataaatgaggaaaatacaaagcctcaatgtcaggatcctggggaagatgaaattcacccacccatgtgaactggcccgggccacaacgggttctcaatggaagtttgctgaatgtgacaaaggtcacactgcagattaccaggcaaaggacaggaaatcttatccaaaaaattttgattgtaacctcaaagaacatttcagatattttaaaaagtaagcggtgtggataagagccctttcttctgactgtggcaatgattaaaaccaggccctgagcgaagaaaaattcgacacactctaacccttcagaggcaggaagctatcgttaaaaggtcatcttttgggcccagacttcatacggtccaggggaagggttccaaatggttatgcttttcattttgctgtgtagccaagaggattgagaatccacagggcctcatctgttgttccttaagcaaacatctaacgtaatttgaaatttcacttcatcatgttgatggccgccagcaactcttccccggcctgttaactctcccttttaggtagactagggcactttttgagcagccaaaaaggtgccagcttgctatgaattctcatgaggaaaattacaaaacaggctgtggagaagcgccctgtccacgatttccccatgtgccttgcaaggtttctctctatctctctttctttacctcaaagccagtatttttaaaagacatgctacgtctgagtcctaacagcaggcccatattaaaaagaaaggatatccacagccttgaaaggaggctcagcaagaagggagttggctgggccctgcggtttgtctgactctaaaatacacagcctaaagcactggtgttttcagtagttgaatgcaaaagaggtgcagtagaaaataagtggtaggtataacatttgcatcaaagcatctaaaagtgaagtcagtaaatatttacttgccactgatctcataaggaaggaaacacctttatcagcatccactggcttttggcaaattgtcatcttatttaatcctgacaaaatcaagtgaagtaggtgttattgtttccgtgatagagtatctggttaagtggctgtcctaggctcactaagctgctatggggtagagtcacagtatggaatggtaaagagtactagtggttctgaaatcagacagatcaggatttccaccggggctaggtgtgaattcaattctttagtgaccttcaaccggttaatgaaacgctgtgctttagttgcttcatttaaaaatggcaataaaccagctgcggtggtacatgcctgtagtcccatctacttgggagactgaggcaggaggctcacttgagcctacgaatttgaggctgcagtgagccatgattgcaccactgcactccagcctgcgccacagagcaaagcttcatctctaacaacaacaaaaaaaggtagtaatggctacttcatagggttatggaaggatttcgcaggcttggaaagcacttaataggctgcctggcacatggtaaacacttgataaatgttagccattgttgtcattactgtgaagtaactagatggcattgctagaggacgttctcactgtaggcttcaactaaacttcctgtagctgtctgtcaaagtcccagatctttgcaaaacacaataaacaagtcagaaaaacaacaataaccccctcaccaccacccccaggttgtaggagctccagccctatgagatgatgggctaattccccatgacaggagttctgcacatcagttcaggggacagcagatacaggtcactcagtctgatgatgctgtggcctccgatttgccctctggtgggagatggctccgtgagcatgagatgggattagggggaggccagaagggttctggaagtgttccgagaagatctctgactactctctggattatctcacttgatggggggagagctggtattgaaaaggaagcactaacactgatatgtgaccaagctaagctaaaaaattctctgttgcagtttccttatctgcataaactgggatggggagacttactttactgcagtggtccccaacctttttggaaccaggggccagtctcgtggaagacaatttttccatggaccagtggcaggtggggatgggggtttgggatgaaactgttccacctcagatcatcaggcattagattatcataaggagcatgcaacacagatccctcgcatgcgcagttcaaaatagggttcgagttcctatgagaatctaatgccactgctgatctgacaggaggcggagctcaggtggtaatgcctcctgtcatctcctgctgtgcggcctggttcctaacaggccacggtccggtacaggttcgcggcccagggttggggactcttgctttacagaactgttgggctggagttcaatatctttgtcacagagctgttccacaggggagattgatgtaccctggaggctgggagcaggacccgaactccgctcctgttctccaggcaccacattccacaggcagcacaacctataaatttgaagctagatttgactgtggaataggcttcctggctgcatctgaggtaaaaggctgcccagtgcttctccctgggacaagtgagaatcggttttctcattggtaaggaggggataatatctcctctaaagagctgaggagagaaataaaatagaaataatataaagggcttcacagggtaactggcacccagctggggctcaggaaacggcagcaataattattacaacacacgtgaaggagtggggaaattaaaatgctgcataaactcaacatattattattagtcttcctatatctacttcatagatcctcaattaaggcataattaaagattagctaaggttacaaggttggctgcccacattttcattcttggtttggtcttcagtgctgcttgtaacttttattcaggcctcaggcaagacataaaaatacactcaaacacccagccacgttaaatgccaatgagattctgcaacatctaaacctggagaacactgctgcagatttgctaagtttcaatctcagaagcgttcaggaggccaaggaggttcactctggggaggcagtgcaaggtagttgcactggaaggcagccagccacgtgtaagctgggggtctcactcggcatcccaggacctctgtttctgtagtgtgagggtaagaatacctgcctctggagaagaaagaacatatgttgctcctggcaggtgctcaataaatgtgagcacctctctccccttctgtgctttataaagagctcagggccttatatttggctatttctgtccaccaactgcagatacaaattaaaaataccttcctggggaaagggggggacaagaggacaatttctcctggggattctagcacaagggtgcactgggaattagagatactgttaggaattttaaaatacccctcaaatgggcagtactcagggcagtatttttgccagggaaaggagcatggtcatccagttgacaaaaataaagaccaataaagggggactgagggaatgctgcctggggagatcctgcagaaagacagagtggggctgtagtcacaatattggggctttgatgcaggctctgtttattcacgcattcatttgttcatctttcccaatcctagagaatcagagaggcaattaaacctgacatgcttatcttaaaaggaagaaaaggaaccataaaacaaaggcacaaacacaaaccctcagcaagatctcagttattgtcctgcattgttttgctatgtgatgagcgaaggattctcagggaaacatgaatcatgtgggatctttccccaactctgcgtgtcttggggacatctcaggtgttctctaggccttagtttctttatctttcacgggttagactggcggacctggaaggtccttccagtactaaagccttgactctctgagtctatgaaatccacagtgctattaggagtgcttatgtacatcacagaaaggcattctctcttcccagagtgaatttaaaacaattgcttcacacgaggtcaaatttcatatacttcagggattcagccattacctagagcaagctcacctgacctgcttttatattagttcataaagtaggcggtgggagatgtgttaatagttttcatgaggtgctatggcccaagatctggagatgatatgaattatgctttgtgttaaagctgtctttattctcctgggaggaagaaactagacatactatatgcaagttttttttattttttatttttttagagtagaggaacttttgatttactatgcaggagggggttgtgtttcatgaccaacacttattttggttctacttcattatttctgtgcattttgtgagtgaggaagtatgcaactttttttttttttttttttttttttgagacggagtctcgctctgtcgcccaggccggactgcggactgcagtggcgcaatctcggctcactgcaagctccgcttcccgggttcacgccattctcctgcctcagcctcccgagtagctgggactacaggcgcccgccagcgcgcccagctaattttctgtatttttagtagagacggggtttcaccttgttagccaggatggtctcgatctcctgacctcatgatccacccgcctcggcctcccaaagtgctgggattacaggcgtgagccaccgcgcctggccggaggtatgcaacttttaagagtttcttgaacacttggaaaaaaggaaggggaagaagggcgctaaacacctattaagttccaggcaccttttattccttgtactccaataactttactccaataacttatgagataggttattgtactctgcccattttacaggtgaggaaatgggctcagagaaataaagtaattgtaccaaagctaatcggccaaatgaatctgtttaactatacagttcccacagtttgtgcaattttgggttgggttggaaatgacctaatgagcttgggtaacaggaagctgtctgggccacagagtaaggaacagagtatcaaatacacatttaagaaagttcaaagtcattgctatgttctagtgctgtgttataatgctgataacaattataccaagacatgcagaaaaatatgaggtaggaaccatcaacttgacataaattccaaagaaatatgtactctattgaagaaaatggttaacttatttttaaaatcccaggcaggaagttgaaggagctggattctagtttcggttttgcaaccgttgaatggagccaccttgagcagatcacccagtgtccctgagctagcatttcttccccttgaaataatagggttgtacagtgagatctgtaagggccctctgagtgaaagcttcgtgattccatctgtaaaattcacttaatgtaacagttcattccccagtgagggataaatgaggtgttacaggtctgccttgtaagtttcatgcacacgtttcatctccttcaactagaaggtgagttcttgcagggctggaatgcatcttatggcacccagcacatgtcaataactgttgagttaactggaagagtgaaagaaggaatgagtcttatcattccttgtgctaaagaacatggacttgggaaacaggaagatgtgcattttaatatagcttgagtctgagcctcactttcttcatttataaaatgggagcaatatcacctacctcactgggttgtttacagtttattatcattgccaagttcagtgtttttattgaaagaaaggcaaaagagaaagaataaataaagatcttaaagggtgcaattaactccttaactaatatctttattagactaatggcagctgtgtgcatgtacctgtgttcactcaagtatttctgaggaactgttaactgcaaagtataatgctaatcactggaaaaggggccatcagaaagagtatttaccaagtacctaaatatactatgtgcctagcacttttctgcactagctatgggaagtaggaactgctcttcccatactgaggataagaaaagcaatgctcagagaggttaactagctagctgatggtcaaacaacttgtagaaaccagcagatgtgacaagatcagagggtttaatgaactaaaataaaatagtgaataacttgtacatttcaataatcatcctgtactattgctaacgacaaggtagtgtgttagaatgagaaggtgggtggggaaggaggagaggctgccctaagtaattatagcacataggtcaaaatcaaggtggggttcacttataaggggggtaaggaacttaaaactacatgtatttgtactgaaatgcaaaaaagggttaattaaggaacttgattgaaaagtgacacttaaagaatccttcaaaaatgcttcccttctcagaaacacatcaaattatttatcattattgcaattaaaaaaaattgggttggaaatttgtcctaggcatctgtgatgttattgtttctttgctgttaacaaacccacagaagagccttctgtgcatggggaagggcagtgatcctggaggttcagaaagctggggaaggaaagagagggtctggtagatacccactctcccagtgcaaagggttccatatgcatttaggccatggtttctagtttgcaggatatagaaagagagatcgtgctacaaatacctctccatttcagtgccagcatgtgtttcccagagggtgcttttctgaacacaagtcctgtgagaagttcctgagaaggttccatgttcaaaaaggtttgggaaaccctgcatatcgtctcttctgcttagacaatcacagtgcacattagctaacaagttaatgctgctgagaactcctgtagcaaggaatctcttccaccttaacatttcccaaatgtatttgtccatggaacccctatttcaaatagctcctattaacaacctgcagagctagttctcttaggtgttaaataaaatttataggaggccattggtttggactgagctcttgcactaggcccaacagagcaaaccaaaatggagtcactcatgcagaaattccactaccaagccaaaacgaagctgttcatctggccttctaagaaatcaggagagagagatgatagtcatattcccaaacaggccagttttagccagcatgataaggaagccccctctgctgtaatttaaacaacgaatgcactttttggtctctgtttctgttttccttttctgtctacaaagctaacctcctctgctcagcttattggaaaatgagtattgcccaattctagaatcccaaaaaaagccaattaagatctaaatttgttgtaatttcatcttttgacatagggatacttttaaagatcatcctttcccaccgaggttattttaacaacccccaggctcacttctctataatcatccttcaccctgataattgagtgattgttctagtaggaaatctgactatgtttgggtcttaatcaaaaactttccatggcttcacactatctacagaataaagtgtgaactctttagcctgatattcaagattcttcctgctgcagctttaaatgacaaccccatgctactcctttctatattctgcctgctggcaccctgccattcaccctaggtgctggccttttttattttgaaataattttagattcacctaaaacttgcaaaaatagtacaaagagttcctatgcacttttcacccagcatctctcagtgataacatccagccttttccaaatgataatcatcatttaccactcagagcatctatcttaaggaacacgtccatgtttgattcttctctgcattcctcctagcacctggcactaagtacagatcaacaaagtataggctccgtggtgcccagatttgcatttcatagtcaatttttttttaagttgagaacaaaaataacaaaagaaaaatatgccctctacttatcattacttcattgaaaaaataatattttaataggaagggcaatgttagagtaagaaacaatcctgatgaacaagtgcctacattattctgctcgtctcatttgttgcaagcagaacccttgtggccaagcagagcagaccatcatctggtaggccaaaagcttggcaaacaaaccaaggagggttacattggctttctagcactttgtcagatttatggtgaggggtttggggacttgtatactaaatgcaactccaaacaagcttggagtataagcacttatagcatggtcacacaagactttcctttgttcttacagcaaaaacagaagagatttggactaacgaagcccagaaattgcatgcaagaccaaaagtccatttggaattcccaaatctctcttctggtggtaacaccttttcttggtctgggtagtaaacacatttctgtgcacatacagctcccatctgggggcttgattccacacggctgcagtgactttctacaagcagataagggtaatggaaatcacacatttctgtggcctcccgttgtttcctttctccttctctgctacttcagctggaacggagatgaattttcctgcaacactcagtctcccgaggaacacttctctctccacatacggctgagcttttcacagtgtttcagaagcccagaatgatctttctccaaggcagagctgaccatgtcagagctccttgatggctcactgctgcctaatataatcacgctcaaactttacagcgtgatcttctatgcccttcataaactggccccgaaggcccttctagcttctcactggggaggaaggaacatggtattagcaatttcacaacaatgtcttgttctttcattccttgatatctttgtgcatggtattgcctgtacccaaaaaactctttcttgctctgtccacttggagaactcacatttatcctgaaagaattagcagatgtaccaattcttcgctgcagccttcttgacccccacatagagaattaatctctccattctctatgttcccatagcagcctgtacaaactattagtaaaatgggttaaaagccacctacttcatggaactgcaatgtttaagtgcaagtacacataaagcccttagaacaatccatagcacttaacaaatgtgtaggtataatcactgttattgttgttaaaaacaacgtatttttgttatctgcttgtatatttttaaacaagttaggctatgagctcatgaaggacagagactaggttcttcagataaatctcttatccccagcacctagcacaatgctagctatatagtaggagtgaaataaattaatttgtaagaaattaatttcctctagactctaaagtaacatgttttccctagaaaatatatagaagaaaaaagtacaaaggaaaaaaatgtataaaagaaaaaagtacaaaggaaaaaaaacaaaacccagtcacagctacaacagtaataactgctgttaatgctccctggtatatatacatttcctcctagtcttttcttttacatatttaagcatatgtttatcaaattaggttcatactgtatatacagtttatatccaatctccacttaacattatactatgagaattttatctttcaaatattatttgaaaacatgattttaatgactacctaaaatttcatcaaatggacagaagatgttattttaccaacctcctactattagacatctaagtcattttcagtttttctgtttttggaaatatttcttgacttgaatcataagttctgccaaggggtaggctaagtcccacattaaacagaggacccccatccccacttaggagtgatgatggtctggtctagaagagcagaggacgaattcctctttcctggggatggtttaagtgtctcttggaaggactagcagacattcacggatgagctcactcaagaggctgacagggcagcaggctcagactgaagtcagtctcttcttcctcccagcccccctccattctccatcccattaacattcctcctgggagatggcagtaccaaaggacaaacaggcattgttgggactcaaggaccctgagaatgggccctgtaacctgagccccactggcttggatatgcttgggcaggtcaccctggggatgccatggtgacagatgaaagtgcatctcagggcctggattgtgtttccagggcacaggtgtggggagattatctttctgacaagccaagcacttatcccaatctctacagctgctttctcttctctccctggtcctaggcctaccagaaatagcaccctcaagccattctctgttaaagccaagagctgtcttcacctgagcctttttgcctgaaaagttaccaaaagaacctgacaaattgcctcactttgtcaagtgaaagagtgaacaaacatcctgcattttgaatgcccaggcaggcatgtcccccgcaagccaatggagccttaaagctcttccagggagctcacagcctggcgggtgcaaagactgtcagctctagcaccggatccccgtgggcttgacacttgctagctgcctgacctttggcaaattgcatgatctctctgagcctcggttgcctcacttgtgaaaagaggacaatgctggtgtcttagaactgctgtgaagatgaaatgagaccagagacataaaagcacttagcaccttacgtgcttagcaaaggtgttcctgtggaaaactgcagagctgtgaaggcaccaggtgtgtttgagaaacagaaagtggcacatggggctggtgggtgggcctataggtgaaggcctagggacttgcctaaagcatttggccaagctgccgagggagggtgggggaaggggtgcccaagtagggaaaggctgttctgttcaggcctcagcaacacccattcagatgtgacttggaagcagcctgacctctaggctcggaggcaggaaggcaagccctggcacggcgccggggcggggtggggttgggggggtgtcccacaagcagcaggtgctggggcagggcagatgtgggaacaggaaccccttggctctcagcgcccaccccagcgtgttgtagaatccagagcagactctccctgcagcccgaggctgcctggactcactctcacctcacaaagctgtccctgaaatgggcagagagctgactctgacacaacacaggctgcattcttggcctgtctgtaatcagatttctcttttgtaagattcaacattttctgagcacctactgtgtgccaggcacttttgtacacaggctctctttggctcccatgacagtcctggggaactatggggctagacacactgaggacagcatgtagtgctgtggtggaccagggctcactgctggctttcctctggggcaggggtgtccaatcttttggctttccctgggccatactggaagaaaaattgtcttgggccacacataaaatacattaacactaatgatagctgatgagctaaaaaaaaaaaaaaaaaatcacttctgggtgtggtggctcatgcctgtaatcccagcactttgggaggccaagttgggtagatggcctgagctcaggagtttgagaccagcctggtgcaacatggtgaaacccatctctacaaaatacaccaaaaaaaaaaaaaaaaaaaaaaaaaaaaaaaaaaaaaaaaagctgggcatggtggcatgcgcctgtagttctaataattggatggctgagtgggaggatcacctgagcctgggaggtcaaggctgcagtgagctgagatcatgccactgcactccagcctgggtgatagcacaagaccctgtctcaaaaaaaaaaaaaaaaattgcaaataaggtctcataattttttaagaaagttgactaatttgtgttgggccacattcaaaagccgtccggggctgcaggcggcctgtgggccaagggttggacaagtttgctctagggcaaaggctgaccgacctcccactcctctgagcccgtagtcattcctaagtgcaagctctgtgggcaacacgagacagaatctatcccagaggagccagtgggcaaaaggatggtcttgttcttgtgccttgtatgtgccaggcttcctgcttaacttttcacaaatactacctcatttgcctccctctccccctcctacgtaaaatttattatccttatttcatgacagacaaaaaaaaaaaaaaaaaggctcagtgagggaggtaaattgcccaaatgctctgcggtcacaaattggagaaatggtgatctgaagccagttctggctgactccaaagcctgtgcccttccacggtactgtgtctttccaagagaagccctgtcaggccggaagtgctcagattttcaaatccaatgaaactctccctcaagagtcggtgcatggtcctgcgagggtctttaggacagactctttctccctagcccagaaatgtgcatctgctattagctccagagaagaggacttcaactcgatatccttaatgaatgtgcacctttgagacaagacgtgctgagtttgctcagacagcaaacgcagtctgtaggtggcaacccccaagctagggcaggaggccctggaggaagggggagatttcacaccccaacttctaggaaattttccagtcctaaaggaagtatgttctgaagcttgagttatgttccaagaaggatcttgactcttggaagaagtgagacagaagaaaaaaaggacgccttggtgtgggggcaaggggtgggcgtcagtgtgagcagcagactcttatcctgaggaatgtggagagtggaaatgtctgacccattgtgcaaatgagcaggaaacaagtctggtcccttcctaccctctgcccctctttatatattactttctctgcttcaccaggagaaattcacattcaacaaatacacatacatcatttaattgcctgtcataaattctcatctgtccagagggatagaaattttcaaggcatatttaaaaaccatttttttttctagtagggaaatgtacctagatctttagtgatactgtagacaacctgtttgaaaatctttataatccaggtgtgctactttaatgtgcaaaaatacaccgtcaagaatcttgatgacaaaatcagaataaattaaaagtagtatgtggtaaataaatgttagttttctccatctcctattctgtacttaaaatgcttctatttattaaagattctatttaccatgtattttagtaacaacaaattctgtttgggtatagccttttgggaaaacgcctgttgcacaaaggtgtgtgtataacgtgcctgcctcactgcagagtgcgtggtgaggactgcgtttctgttccccaccttgggagcactcatactttcacatgccttatctcacagaggccatatgacaggctaaagaggccaccagagcagctggttttcttctttccttagagataagcaaagtgagggccaagaaggcagagtgactctccagtgtcatcactagtgagaggcagaactgggactggaagcagaaatctgcctgggatgaactagctgacatgtggtgactccagtgaaaatgctcaacctctgcagaagcagtttggggttcgtagtcctgactcaggcagaaaaaaaaaacaaagaacctgattctggtccacactttcctacccatccctagtacgtttgccaaaagaaaaaggcaatgatgaagatcattttccctacctgaccacatgtctgggaacctaggctctgaaaaaaccaggttgccttatctgaaggagctgccttactttgaaacaacaaattgaagtttcttctcatcctcagtgtcctcccagcccatcaaatccctagtagcttgaagggctaggctaagagacagcttcaaaagggcagaaatcacagtgcatttttatcatctatttgaagatctgcagggcaaggcttttgatgtcagctggcttcccttggtctgtcattcctggtgcccaagaacaatacttgagagacaggtctggatatcaggagcgttcctgctcttctcagattcggtactaattgtagctctgttcattaaatgctttctatttgctaggtactgggctaagagcttttcacaaagcacactgtatcttcacttccctttgctgggtcagtattattatgccttattttacagatgaaaccactgaggctcagaatggattactaatctgtctgggtcactctgccagtaagtggcatggctgggatttgaattgaggtctgtctgacttcaaagcttctcccgcccttctactaaaaactcttaataaaaggataaaatcaaattattttcctgtgattttccacattatttctcttctattaaggactgtactttggctatcttttagatgaaagcaagagtaattttggaaaaacttctgttcataatcaaaacaacgattctctatagagatctacgtaagggcattccttgttttatttcactttgctgtagcgcattttgcagataccatatttttacaaattgaaggtttgtggcaatcctgagtcaagcaagcccattggtgccatttttccaacagcacatgcccacctcatgtttctgtttctcattttggtaattgttgtaacatttcaaatgtttaaactattactatctctgttatggtgatctgtgatcagtgatctttggtgttactattgtaattgttctgagatgccacaaactgtgtctggtgtaagatggcaaacctagtgataaaggtttgtgttctgactgctccactgactggccattccctgtctttcttcctctcctccggcctttctattccctgagacataatgatattgaaattaggccaattaataaccctacaatggccaagtgaaagaaagagttgtgtgcctctcactttaaatctaaagctagaaataattaaattcagtgaggaagtcatgtcagaagctgagacaggctgaaggctaggtctcttgagccaaagagttagccacattgtgaatgcaaaggaaaagttcttgaaggaaatgaaaattgcgactccattgaacacacaaatgataagaaggcaaaacagcctttttgctgttttatgttttatggagaaagttttagtggtctggataaaagaccaaaccagccacaacactcccttaaaccaaagcctaatccagagcaaaggccctaactcttttcaattctgtgaagtctgagagagacaaggaagctgtctaagaaaagtttcaagcaagcagaggttggttcatgaggtttaaggaaagaagcagcctccataacataaaagtgcaaggtgaagcagcacgtgctgatgggagaaactgcagcaagttatccagaaaatctagctaagattgttgatgaaggtggctacactaaacagcagtttttcaacatagacaaaacagccttctattggaagaagatgtcatctaggactttcatagttagagaggaaaagtcaatgcttggcttgaagcttcaaaggataggctgactctcttgtcaggggctaatgcagctggtgagttgaagttgaaggcagtgctcatttatcattcccaaaatcccagtgcccttaagaatgatgctaaatctactctgcctgtgctctttaaatgtaatgacaaagactggatgatggcacatctgtttacagcatggtttactgaatgttttaagcccattgttgagagctactgctcagaagaaaagacttcttttaaaatattaccacttactgacaatgtacctggtcacccaagagctctgatggagataactaaggagatgaatgttgttttcatgcctgctcatgtaacacccattcttcagctcgtggatcaaaaagtaattttgactttcaaatcgtattgtttaagaaacacattttataagactatagctgccatagatagtgattcctctgatggatctgggcaaagcaaattgaaaactttctggaaaggatttaccaatctaaataccattaagaatgctcaagattcataggagaggggtgaaatattaacaagagtttggaagaaactgattccagctctcacgggtgactttgagaaattcaggacttcagtggaggaagtaactgcaggtgtgttggtagtagcaagaaaaatagaagtggagcctcaagatgtaactgaattgctgccatctcatgataaaacttttatggatgaggagttgcttcttatggatgagcaaagagagtggtttcttgtgatggaaactactcttgatgaagatgctgtgaacattgttgaaatgactgcaaagaatttagaatatcatatcaacatagttgataaggcagaagcagggtttgagaggaccgactccagttttgaaagaaattctactgtgggtaaaatgctgtcaaacaacattccattgtacagagaaatctttcaggaaaggaagaatcgatacatgaggcaaacttcattgtttacagagtacccaccgtgtgcactggtctcacgtacacagtgaccacacacctgtatggtctggataaccctgtaataaatattgtctataaataaccaagaggctgaagcttagagaggggactcaacttgcccaaggccagacagcttcaaggctcagtttcagaaaccaagactccctggtcacaacagaaccctccaactacaggatgcagcagcttctgtgtgtgactggattgtggtctaggcttgaggtagggagtgaggtggggacagggtgtgtggggacctggaaaagcagaaggagacagacaagactttattcccaaacactgcctcctcagaaaactttaaaaagagaagtttacctttgcaatctggaggaggttttcatgtttcagctcatgctgaattgttttatgccttagctataaacctccgacagagagagtgcgggggcaaggctgacccaactttaagtatggctgtgctgctgtaaagctcaggttacgaggatcacttctggtgccaaggcagtttaacaagtatgaatgtgcataattcattccagttgtcctgcctcggcacagaagggctatttctggggtggagctccctacacttctgccaatgtggttcccattactggatccggtgccttgctgaagttccctccatgcccaggaagggcctgttttatcacaactgccaaaccatcggttctctgtaaaggtttggaggggttctgtattccaagaggcgaagtcaatgcttggtgtaaagcattgcttggttgtgagggtgggctctcatgaaaaaaagcacccaatctcacccgtcccaagaaatctttccaaaacccaattgctattgtccagtctctagccaatctaagtacaggcactcccattttctattttgaaaaatctcaaccctaaggaaaagttgaaagaatagtgcagaaaagcccatatactcttcatctaaatctgtcagttaatatattgccacattacttcatctcgatgcataaaaagtttttctgaatcatctgaaagttgtagacttcagtacactttatatcagcacacatctcctaagaataagagcattctatcatctaaccacaatatgactattaatgaataattattccatatcacctaacatacatactatagtttaaaatttctccaattcttcccaactgtctttttttttttttttttgagacggagtcttgctctgttgcccaggctggaatgcagtggcagtgatctcggctcactgcaagctccgtctcccgggttcatgccagtctcctgccttagcctcccagtagctggactacaggcacccgccaccgcgcctggctaatttttgtatttttagtagagatggggtctcacagtgttagccaggatggtctcgatctcctgacctcgtgatctgcctgccttggcctcccaaagtgctgggattacaggcgtgagccactgcgcccggcccccaactgtcttttttatagcatttagaaaaacaggattcaatcacttgtaagagtcaagtttttggctgatttctttagtctcttttaatctaccagagcctcctacccacccaaatactcatcagtccttttgttcatggtattagcctttttgaaagtccaggccagttattctgtaaaatgtcctgcattctggatgtgtctgattgttttctcataattggattcaggttacatgtttttggcaagtgtacctcatgtgtgatgagacgtacatcttactgcgtcatattaggatggctcactaatggagtgctaagtttggtcacttggttaaggtggtgattcctaatctccccactataaagtaactcttttccctttgtaattagtaagtaatttgtgacacaaagcccagtctctttagatcatttacttaaactgcctctgccagctcccctcccatctatcctcctctggttttagcctccacattctgaaaatgcccttaccaaagtcgccagtggtcacatggatgccaaactcaataggcattttcatatttgcgttttgaaccctcagcaggactggatgttaatgctcaggcccttccttgagggcaggagcactgtcttatatatgtcagtactctagggaccagctcagtatttgacacacagtaggtgtgctagaaatctttgtgtaatgaataaatgaatacatacattgagaggaagtcaagattgggaatcagaaggcgtggatttgaatcccagctctgcaactttccataaaataaaagggttgatctaaatcagtgggtttcaaacttggaaaaaatcctaatattagaagttatctttaaataggatctttattcagaagcaaatgtaggaaactgatcaaagggagcaagctgcttttgttgaagcaggcagcagaggctaaatggtgttgctcacaagactaggggcttggggaaggatcagaggggctcaagaagtagggaaagggtgaattctggtaggccatggctgccaggtgaagttggaactgaaatctgcagcattaggtttcagcaatgaaaggaacagctgggaaaaacagcctggtctggttagttgtgggcctgctgcatttggagaaagaaacaagccaagctaggaaagcacagtacagaactgggtgcagggggaggtgggaagtcaggaatgatcactgtcctctctctgtctcggtttcctcctctgaagtcctttgtcatttgaatgctctttgattctctctctccattattccagtgttcccctttggttggcggggcggggggtgcatcaatggatgatgagcagggtcagcagaggcctcctgtgttctgagggggctctaagggactcagggccattccactgagtgatttgatgacctgagaagcctgcccattgtccaggccttaaagggccactgccccttaccattaacccacctcaggacaaaggccatcaccagctcagacaaataagctgcttagccagacctcatgcatcatcttgtcatccacacagggcccaatagaggcatctgaacagagcagagagccggagtgcaactcagcggtttccattcaggggcctctggccaggggtcataaactgctcccaaaatgtgcatgcagcttgatcctctgtgcagcagggtagggtatagtgcagggcggggggagaataaatccctgatctgctttagaggttcccttagaccctatggctgcctgagggttgtcaagaaagggagagatggctgttagataagggaggcagtctggtgggagtgagaaaagattgtgaagagccaggcacacctgggatgcaaaaatgccacttactatctctgtgaccttgggcaagttattgtatctttcttaggctctgttgagtaaaacactaaccagaaaaatgacaacaatgatagaaatttccatttattaagactgtacgataactgggcactttgctaagtacttcacatatattatttcacattgaattctaataccaccaatgatgtaggtattattaatattatccctgttttacacataagggaaaaatgaaaactccgaggttaaaagcatttgctaaagatcacagctaataatgacagagccaacattcaaacccacactcttagctcttctgctctagagcctcccagctgagcagactcaatggaatgagaaaggcgaagcccctggcacactgtaggtgctcaggaatgggatttgctcatctgttctgctgtccaaaggtgtgatcaggccctctttgattccagcacacctgcctgcaggttatgttgcttgtctcctcccacatcaaaccccgggaaaatgcagcgtgctcaagggctgctccctgagagctggaaggggatggatggagagtgggctgtaaagctggcctttgccatggcagcccttccttcctagaaaggaagagagccttgccttgtccccctgtctgcgcagaggactgcagtgcttccttcatgtgtgcccaatgcacatggctgcccatggtgggcacagatgaggtctgaccagagttcactctccagcacaggaccccacacagagcacacaccaggaagagtctgctaaatgaatggacagatgaatgaatgaatggaggaaataaacacttccagaccccacaattaggttgggagcatttggttacacacaaataacagacatgcaaagtctgtatgtctaggctcatccttataccagagctctggtcttagtcggcttaggctgctgtaccaaaattccatagactaggttgcttaaataatagaaatttattttcccatagttctgaaggctgggaagtccaagatcaaggttctgatgggattcggtttctggtgagggctctcttcgtggcttgtagatggtcactttcttgctgtgtctcacatggaggagagagagctctttggggtctcttcctcttttataaggacactggttctatctgatcagggctctacccttatgaccttatttaatcttaatcacctccttaaaggccttatctctgatgccatcacatagagagttagagcttcaacacatgaatttgagggtggtgaatgttgatggtgaacacaattcagtccataggagccctatagatacataaaagtaaagttcacttccagataagcctgaatgtgcaaacttgcctgtgttcctcagtagttagcacctttctctaggaagttcccccaacctcccagtttgcattacacctctgtagccccacacaccctggcacactccgtcaccagttccccttactagtggctgcttcagggcaaactgtttagtgtgtttctgtctccccaacaggggtgagctgactgctttctatcctccatggaccctggcacacagtaggtccttaacaaaaaatttgctgagttgaattggttctgagggtcaacaagcctcatttttcctccatatcactcgaaatcagaaagaccttccctattttcactctgattagtgaggctttggtcttttctgccgacatcaccagacactgaccagaggctgtgttgaatctgcatgaaagtaataaactcgaggaaggatagggctctgggaagaagggctggggctgccctgctaaggatcaggacccgagctgccagcagcgggaaacccagggagggcactagcaggggctctttgagaggtaacagctggaacaacgtgagggatggattaaagggagagacaggggcagggaggccagaaggatgctactgaagcggtccaggagaaaggagacatagtaggaatgttttggctaagaggagcagcattttgtaaaactagcaaatagacagggatcatctccacttccatttttgctccttctcaggataatagcagaccggtgatcacaactttagttttgatgagataacctccttatctcctaaaaatggtctctattattttccaagagaagaccagtaaacactaaacacctgccttgatctcagtgtcttagatgttttcctgtttctcctttatcctagcaaactccccaggttgctattcttattcccattttatagatgggcaactgggtaagagaggtaagcttggtgaggtcactgagatagtggggaaaggagcttggttcacatcaggtatgcattcccccaaggttccactggggcatctgaagaagggtttctggaagtgcaaatataggtactgttgttgttagctggttagcagcttcccagagttatttatagaaataggatccaccaggaaagagggagtggagcataaatgaattaccagtcattttcctttcctttcaactctgggggaaggccagctgaccagaaggaaaaagcatcacagcgtttcatctggtaccaaacatcagcactccatcgctggaactatggggactggaaacagcatacgggctccagcaagagcatctgaagctttgtctctgagactacatgctatgtttgtttagctggtgccttgggcttactgtcccacccgaaatctctggaaatcacccaggagggggagggggattaaagatcatgactcccaggctgagctgttaattgctggggctcttccaagccaggaggggtaagagtgtaggaatctgcttgcctcccaggagtatctggccaaaaacttttggggtccagaaagggaataaggaaactgacattcactgggcatctattatatagcaatcactgtgagagaagccttatccatattttctcatttataccacaattttgtgaagtacaactgcccctccaaatccatggactcaaccaatggttgactgaatatcaaaaatagtcagaaaaaaaagtataaaatttaaaaatacaatataacaactatttacatagcattcacattgttaagtattataagtaatatagagatgattaaattatacaagaggatgtctgtaagttatatgcaaatactatgccattttatatcagggcttgagcatctagattttagtatccctggaggttgctgttgcggggagggtcctggaaccaatcccctgtggatcaagagagaagactgtactattctccattttacagacgagactgaggcccagagaggtgaagcaaattgcccaagactacacagcacagacctgtaaacctccacaacctatttttccctgccattgctccacattgtgccatttctgtttttcttctggcttcagtccttttaggccttataaagcagagggaattttttttagttgtttaatctcaaacacctatataaataatggcagttcagaaggagaggaagggaagggagaaaaggaagccacaaagtttcctggtttaaactgggagccattaaccagtaatgggggatccagctgagctcaaagcacccagctcagacatgatgacaggggcagagggcagggggctgcctggggaagggtgggaacagatggctcccaaagaccacgtttaggaaatggaagaaggatgggcctgagagcagcgagagatgtttattctcaaggtgagcaggctgtgtgggggcagcattaaaatcctacagagtactggaaaaagccacagagctgtgtacccaagggatgtgatttcaggtgattacagtgagaacaaacattaaataacaccgagtcacatgcagaatagcttctattttctttcaaccctttggatgatgtcaaagaggaagtctaagttgggaactagtgtgttttcaccacctatcagttgccaatgtccttgtttaatgcagagaggcaaatctctcctcactgtccttgagcagacattctgtcaccagaatgggataacctgctttcatagtatttatttttacagttaccttctatttatggcaagtcatacacttgccatatggcaagtggaatgcagcagtaatatacaatttccttttgaaataaaaaaattcactaaaggagaaaaagtttggaaaaggcagcagtttaaaggaacataaataaccatttaggtgggcacaccgctgtggcacagactaagacagtgacacagaaatgaatatggtttgggaaatgctggtttcatccagttctctcactgctcagactagaaagccgaagaaccaacagatgagccttttgcaaggtgacacagcaggctagaggcagaactgggatcaaagcagatctcctgcttccaggcctgtgcctctctgtaagcaggttttcatgatgaggcttctccagatgaagtttgtaactgggaaactgagctcacatgatagcagcgggcctcacatgatggcagtgagcctcacatgttggactgaccatccatgaacaaagcccaaactagttccaagccttgtggccaaggggcagctctgtgctaagctgcatctccctgagcctgtttctcacatggacacagtgttcaccctccttcacatttctccaatctcacaggacttttctgtggatccagtgagatgacagaggagaacgagcttcgggaatgagagggtacacaaatgttagttctactaatctcccacactctccttggcctccttccaggtgcctcttcaacggtctgggccctaaagtgtcaggagatggtttaaaatgtggtctggtgtccacaagggatccatggagcagaccatgaccatttcaacagggtcacaaactaggcttagtttccagatggagaaagcctggacacatagctaatgtgccttcctcggggagtggtgtaggaattcctaggtccaatcaagccatacatggaaaagtgttatttttgtaccttttaatgcagtggtatttggggaaattagtggaaaaggaactgcaaagagtctacaatgagtgactaattagagggccctggttctcccaggatgttcagttacattaattcaaaacgtgacctgtttattttgcaaggtcaggaagaagccttacctcctagaaagccaatgtggcaattaaattagagtcaccagagtttcccagaggtaatgtatgaaaaagggctttgtcaacagtataaaaacagaagtgacccctgtgaggttgtcaccactgccctcaatgcggggccataatggtctgccccaggtggaaggccataggtgagagcttgtctaattaagggaggcacctggtagagtggaaagaacactggagtctggggccatgctttgcatcttgactctgtacctagacaaatcgcttcatctctgtgactctccacagctgtatcatgtatgtgcctcagtgccccgttcctagggttattgctgtgcatgtgtgtggacggggtgctggtggaaagaaggaagaaaggaaatcagcactttttttttcaattttgattttagcacatacacatacacagggcactgtgctcagccctggagatagtgtacacaaggcctacctctaggaactgggagttgcacgagggaaccagaaatgtgaataactaggtcccagactgttagggaggagtgagtacagaagacagtggggcatcaaagaaagggggcccgacagcagacagtctatcaggaaatgctccttatcaactcagagttgccaagttctaggcttctgaccacttggcttctttcctgctgaatttccaggcctgacagccacccagcctgctggtgttggcctcctgaactctcatttctatagcagagcggctaggcctttctaagcagtgattatggataaacaataagcacatctatggagcttcctggtcagcaacttgtacctgtatcatgctgtctagttttcaagttatctagttatctctacaaccatgagtaagttgctaagtctttctgagctccgcttccctcatttttaagaagacacaattcaggatcaccatctattagccatcattctgaaaccccaaaactctgagactaaatgtttaaccaaaactcatttagaggcaaaacctgacctgaactgacatgaggcttggagtcattttaaaatcccatgagtataagtattcatgtttcacggcagaaatagtgatgtgtttgattactgcaggagtgttaggagaaatacaaaatatgcactccattttcttttttaaatctgaacatttccaaattctaaagtgcttctgattccaagggtttcatttaaggaattttaacccaataaattaaataccaattttaaagggtctctctgtttagaatacccttcatccctcatctctctggaaaacatccacaaacatttaaaatgtcatcatgaatgaatgaataaaggaagaaatcaatttgtcttgccaacaggagttaggtacttaactttgctacatagctggtgtagtaagaatttatttaccaacgagggtcttttgctgcaagagagttgagagaagtggtgaacaacattgctgaaaactttacctaccccagtgttctacaccctcagaactaggtaaagaagcacatccaagtaactgcagttggcatgaaacaacaacaacaacaacaacaaaatcccaggctccacgaaattcatagtgaaagaagacaaaaatctcactggaccttcctttcaactgttagaaacaggcacaattttgctttctgatttcataaactgacttaaaaggaccttggttgacacccccagggactctgaataggttctcaattaagttgaattttttgttttaagaaaacacttttagaaggagcttacaaacatggcagtgtttcccatttagaaagaaaaataaacactcctccactggattggtagtcaaaacaaaataatcccagctgcttaagacctgagaaagtcaatgaaactgccaaacaacagtgatgctgaccagtgagaaatttgtaaggcaaggcagtaaggacccagtgctgaaaaaagaaaagacccatggacggcccagcatccaaagtttggctctgaggaagctgcaccaaagtttagtgcccggtcatctggtctgattcatctcatataacaggggcttcgtaaaggtttgtgaggtaaaaggaatccaacaacttggaattctcttaaaaccagcttttctttggtggaattcctcttatcttcttcaaactcctactaaggagaagacaaaagtaacaggatctgatatttgaaacaaaacaaaaaaaacaacagaaggaaaaaaaaatggggctctagagtcaaacaggcttgggcctgaatcttttccatgcccttatgaccaatgactaatgggcaagtcactgccccttattgagcttcagtttcctaaacagtgaaagggacataaattgagacacaaatacgataatgcatgttttatagaaagacttcgagcacatagaaagtccttattaaatgtcaattctcccacccacccactaccttacctaggctttgagaaactgacacatctctcagagctatttattccccgaccctcttaaatattaaccaccaagtttttaaagcccctttgctttagaatttagatgagaacaattcacgaaacatttaatatttattctgaaaagtttctatggggtagggacgaatacctacttaatcctaaccacttcctttgctttttcaactgtgactagttgatattttagtgaaatctttctttatatatatcagtgatttctggatgattacccttggggaaggattaggattttgataagagaaaaagctacttcccctgttttcttctccacagggacaatgagctgttctgtgataccccacggtcctctttgcactttacatggggattttagcagggcagctctgaggcctaccagatctgggatggcagctcaggctggagttgacacagctgtgggcagagggcctctggggtgatgctggagagtccagcgcaagctcccgggaaggctggctccaacagcctcagctcccaccataggaaactgtctcattttcaccctttaggagccaaagaggcattctttgtaatttaaaatataatctgaatgcagtcccagctggccctaaagcaactgctctgttgagggtggtctccaaggtctcaaattggtggaaggagatgggggtgtggagatagggaagagagatagaaaagttttatcagcttcaacttttttaaataccacaacaaccttggaaggttttctcccatttcacagatggagcaaccaatgctttcagaggttggaaacattgcctagagttgcacatctgggatccaatttcaggcttgtctctagagcaatggctatagctctctgctacactgtggtccttaagcattgcttgctcattggttcattcactcactcattcaatgagcactaaattaaaagtctctgaaaaaccatgcaccaaactgttaaacgtagttatatctcggaggaaggattataagagaacttaacattttacctttccatattatttgaatgttaacaagcattgctacttttataattggcagaaacaataaagataattccattaaaataatttcacattttttccatgaaaaaaatcaaattaaaaaccataaaagcatttattaggcctgctacatctacgtaccagggccctctaatcttcactcactagtgctgagtccacaccagtaccagcatgtcctttggctcatagaagatccctggttttgggtttcaggagagaggaaggcagtaggcagggtccagatggcagagactcattgagctctctcatgatcccaaccccagaggaacagaccagtaaggacccagactcttccttcaggcatgagacatgcttattaccaacttttagagtgacattcagagcaagggcctggggaagggatccaaagtgacaaggtcccctggggtgcaggagcatggaggagcagcaatgagcagacagctgcaggctaaagtcccccatctccttccctgcacatcaataatgcaataatgtcatcaatttgccttagaactcgcaacaaagtgattgctcttgttcactaatttgcaaaggaagagattaaggactttaatctcttgccttctcttctacgtgtaaggcttactcagaaatgaacaaagaacatcattacacatatacacacacacacatatatatatatttcccccctaccccataagcttaagaaggctactggcaggaataacttgtgacactcctaaaatcagggtaccttagaaattgctccatcactggcaaaatggggaaactgaggcttagaaagacagtgatttgccaaggataaatagccagtgagccacaaagctgggtctggaaccaggtctccttgctcccagcccagggttcctgtgtttctgtgcatcatttgaaacacaggcagctaaaaggcatagaggagtagggacattgaaccaccaagaaaacaagcccaccccagggagcactgagaaaaaaggaggaggtttgggtcttggtcatggagaatgcagggtgtaaaatcctgtcagaagagaatcatcaaggacaaagatctctctgatttccaaagacagtggaagcggggaggtcctagctagaaaaggagggtaggtaatgaccgcccttcattgtcatttggtgggggaactcaagccagttctcagaagagctcaggtgactttcaccacatggccttccatacccttccaaggttcacacctatttacagcccaggctctcaggtttaaaagagctggggcaggcttcccttgtccccacctcaagttctttgtccatgtgttccctctgcccagaacacccttggtaatctctgtctggcacacctcactaatttcttcaagtcctgtaagtgcctcctttaggaggcatttcctaattctcttaggcagagtagaggcttcttcctcagtcacagaacatactaggttcctaccgcctttgccaccttcggctataatgatgtactcccaagagaaaagatggcatctgacatttcttggagcatccccaagtgccaagcagtgtgctgggagctttcacagacaggctgtctgtaaatcccctagaggcaggtggaggggaccaggcaatgactaacagttaccacactccttctgtgttccaggcactgtgatgggtgctcatcatgaggtgggcactacaatggccacttgacccttgaagaaataagcctggagaggcaatgtgacttatctaatgtcccacagcaataaagcttgtatgtaattcaaagctgtttggttccagagcccatagactgtcttatccctctttgaacctctgcctcctttttcagaatctggcctggaatttagtaccacacaagcacttataaataaatgtttgccaaatcaacacaaaacctacagtgttatttgtggggaaacagtttcatttcctctcttctccaaacatcaggaaatcctggggctattaaggtgatcctaggttacctcatgtacatcctgccccacctcttagaggtttgaattccttcctgggtttccttgcaaagaagctgactggcctctgctggacagagagggcaagcaccttggctcaagtctaacagcacctgatcaggggatacaagctggtcaccctggagctcttctgccataccccacctcccaccttaagaacaccaggacagagctcagaataagagagcttgcagatccatgcttaaacccagtggctctctctgcagccggcatttagccctgcagctggctggggcttcagggccgcctgtctccaggctctgtgaaactggagaacttttaaagccagcgctgttttatgggtaatggggtaatccttctcagtttttccagtgaaaatggggacactaaaatactgagtctctgggcatggttgtgacagtgcctggcacagtccctggcacagagtaggtagttggttggtgttgcctatgtcttaaccttttttttttttttctgtctgtgtcaatctttgtctctacctttacctgtctgggccttcacctgatgtttccttctcgtgatgtctgtctgtgcatctttgtcggtacatctgcctgtccgatgtctctcatgggggttggggacagaagcagccctccaactcttgcacactccagcggcgccgcggggcaagagcggggctgcctgagcccgcggagccacgtcaggcccccagctcccccggatcccaccacgcaccaggcccctccgcccggcaagtggcccaagcaggcatccgcaacggaaggacaattttaaaaacaaaccctcaaaagtaggaagagagagggacttaccgttcgccgcgacccccaggctggcggagccacttttaactaagaatgaattagggacaaactcttcctcagagtctgagtccggggttggctgggccacaccgttgcctagcaaccgcctctggctctcattggccggaggggaggggggcggggagggggactgctcaataggggttgatgaagcaggatgaacaatgcaagggagcacctgcgaaccacaaagacaaacacagacagaaaaaataatgaaaattgattttgaggcacacggggagggggagggagcaaaataaaacactcatcaacgggaagggggggctcccaacacggggcgatctactgcacacgtgggccgggggcggggctgatgcctccacagagaaagttgctgcaaactccttctgaagagctggggcctcagtgcaggctggcaaagagggaatctcggaagcacacggaaagccttttctgttctgcctgttctttaagacatacctgaaaacccggggtctagtcctgacggggctaggtgatctatcaaacagctgcccctctctggcctcagtggcctcgctgataaaagcagcagtggggactgggtgatccctgagcccctataagctggccattctgtgatgtcaccgaactgatatgatgttcctattactgagattttattccgacctgcctggaacaggccctaggcctcgtaaaaaggtagagagagctggagagaatgattcaaggcttcacctttggcagtctaggatttcaacacagcaatgtttcatttttctaagaatctcacattttatgattcttaaattctgacattctctggaacctgcctaaaagcaagacccttaggaaattttgttcatgtctttatattcagaatctaacataatgcctggcacatagtaggcattgtagaagtatttgttgactagcttaattctagggggtctcacatactaggattcttaagttctgatgttcaaagattagaacatgctataattttaggacactcacattctgtgagttccaagatgttgtaaatcagtcagtctgaccccaagtttctatcatgccacggttctaaaaccccagctttctatagttctatgagcaaactcccaactcttcagaaggaggaggcgatggcttgggacaagaactttgagctcagacaatttgcagtcttatctgtggctgacctttcaacatgtgcagtacatcgtctataagagagctaacataagcacagacatataaaagtatacagtacaagacaatgcaaccacttacagcaagggctgctcattttctcccaccttgagtgacagaaggtttataacatagtcatatccatccagcttttcaaacagactgaaccttaggaaaaataatgcagacccagtgggccatcttaaggttcagcggggctctaagggggaggtggcacagagagcggctgattatttgcagggtagggtgggaagctttttgtggtctgtccacacaagagcagcccacttggttcacagtcaccaattcctataggatttggcaggttccatgacttttttttttttttttttgagacagagtctcactctgtcacccaggctggagtgcagtggcacaatcttggctcactgcaacctctgcctcccaggtccaagtgattctcctgcctcagcctcacaagtagctgggattacaggtgcctgccacctgcctattttttttttctttttttgtatttttagttgagatggggtttcactatgttggccaggctggtctcgaactcctgaccttgtgatccacccacctcagcctcccaaagtgctaggattacaggtgtgagccaccacacccagactttttttttttttttttttttcccctagatggagtcttgctctgtcgccaggctggagtgcagtggtgtgatcttggctcactgcgtcgtctgccttccaggttcaagcaattctcctgcctcagcctcctgagtagctgggactataggtgtgcactaccacacccagctaatttttgtatttttagtagagacagggtttcaccatgttggccaggatggtctcaatctcttgacctcgtgatctgcctgcctcgacctcccaaagtgctgggattacaggtgtgagccaccgtgcctggccccaggttccatgactcttaaggttaacccctgagcttaactttatgtgacaacattttacagagttgatgtgtgtgccacttggctggttgatattagaaattcagcaagaagaattgaagcagcagaaataaatgaccaaggtacaacctctgggtggcttcttcctctgtgttttggtttctttacctaaaaattcaggctatgattcaccgtacaatcttttaagccagcattcccgattcaccttgagagcctgccttccctgacaccactgaccacccagtactagagggctgaacattctgcattcctttctctgaattaaccttgtcttcagttctgatatatctgctctgctatatttctatttatctgtatctgtctcctacatgaaagtatatagtatattcttggggtacagtgcacttgtggaatgagctttggagttcaacagaattggggtttgtatcacagacttacctcctattagttttatgatattaggaaaaatacttccagctcctcatttgtaatttttaatttttttttgacagggtctctgtcacccagtctggagtgcagtagtgtgatcttggctcactgcaacctccatctcccgggttcaagagattctcctgcctcagcctccccagtagctgggatttcaggtgtgcactaccatgcctggctaatttttgtatttttagtagagacggggtttcaccattttggccaggctggtctcgaactcctgacctcaaaagatctgctcgcttaggcctcccaaagtgcagggattacaggggtgagccaccacgcccggcccctcatttgtaatttgtccacccaccacccctaccttttatatagctgctgtgaggactaaagataatgtatgtgagtacacaatatgcatgagcaggtggttagtgttcaccaaatatctattaaaggtaacaaaaccgccccaccaagaaccacattcatgactccccctacggttccagttttggaaaagttctgtctaccaggccacatgtattaagccaatatacgttgatttcctcatcttttattaaccaaagacacaatataatcttcaatcggagcttctaatgagcttgagataaccagtccatgctgagttgttagaatttcagacaaaaattaagaaacatgatatgttgtttcagggtgtttgttacagcctcttcctgagtaaatctgtcaagctttacgaaataaatagttccagaactaagtaaattgttccgtcataaacttcagaagccctggggtgagaacggcagaacggcactgagccctcccaggcctcgtccctgtctcttctttctcctacgcattccctggtctctcctctggcctctgggttgctctgaatattcatagctaacatacaggagcccgtaacaagttgccaggcccttagtaggtgtgcagagtttctgtgaagtacagttattattggaaacaagttaatttccttcctcttagtcattggcaactttgaatttaagtggtttccaaggtagggtacacagaactatttcctaagatgtaagaaaacattttaactcatctatttcaaatttctgtttagtatgttttttaacatatgtaatacacgagtgcttggaatatgtgtatgaaaatgcactgctgtaccaatccagcatgtaccggagcagggtagggtcacattgagagtatggctctggagccagattgcctacatttgaaatccggttccattacttgccagctcagtgactttgggtaaattactttgccctttgcacctccgtttctacacctttataaaggaaaattaaaaaaaaaaaaaaaaaagaaagaaaagagtgcctactaatttctgggttgctctgaggatgaaagaaattaaaattaaaataagtaacatgttgagaactgtgtgtggcagccagtaaatacctataataaatgttagatgttgctatgcataaatatgtacatgtaaagtgaggactagctgtcttcatgttttcttttttataaaacagtgtatgatcacgaaagtatggcaaatcctgtttcattccacaaacatttcctaaacactcagtgattgggctagaaggtgagggagatacaattaggaagcacagctgcaagggagctggaaggaggggagggagagtgcacaaggaggtctcagcagggcagaggtaggacctgtcagaacagaaccacagcccagtgcaaggagctggggggctcatttcaactggaggaactgagaaacgcttcactgagccttggaggatttcaatgagaaaagataggagcattagtatctgcggcagagggaggatactctggcctaaagccttcatccttcacctggtcttcagcaatctgtctccccacctgtccccttacctcccaagtctcattgttaccattagcttctccttaccaagtccactgagacttgctgagacacgctggcctgctctcatttccatggactcagtgctctctcttttgccaagtttgcagagctctagggcactttttgcattaaatctatctgaacggcaacccatggagcacaaccacaaaagttttgcctctgagcttttgcacaagcttgttcctcctccctggggcacttcctttcctcttccttcctcctcacaactaccaccctatatgtctcttagcttccactcatccttagggtttaatttcatgacctcctccctcaagaagctttcctgatgcttcaagcctgcatttggcaccccctctaggtgctcccacaactccctggactctccctcttgcaacatttctctccctgcagtatttacttgtctgtgtccacccactagcttgccttgccattaccatatgtgcctagtgcagtgtcttgcacatagaacgcagtagtaaatatttgttaggtgaataaaggatagaaggaaggtaggaaggaaggagagtaccttgattatggcacaaaagtctatctcaagagagcagtgagaaataagacaggaatgagaacactagaaaaaggaaatcagaccttaattggggagtcatggaaatttttaaagcaggaaagtgacaagaccggggctgtactgtagaaggatctgctctttaaacataaggctcctgctcagtcacctagatctcctttctaattggctcagctcgggcaggatggtgaaaatccagatgatctgagcctgctttttgggtggggctcagatgtatgttcacgtgggcaaataaggatgcctgattccatgggactggggtgtaggtgtgccttcccacatgtcctggttatcagctgaagggaacctggcattgcagatgcttctactgtgtttgtagtaaaaaagagtgggatgactgaaatgaaactcctcacacccgactccaacaaccaagaggaccagtgaaggtggaggggaaccatccaggtttctagagaggcagtctcaatgagcccagctctggcttataggagatgaagatggagaaagaaggaaacaaagtgagtgatacagtttggatacctgtcccctccaaatctcatgttggaatgtgatccgcagtgttggaggtggcacctggtgggaagtgttggatcacatgggtggatctttatgaatgacgtggtgccctccccctggaaatgaatcagttcttgctctgttagttcacttgagatctggttgttaaagagtctgggacctctctcctctctctggctctctatactcatgctctctgtcttgccaggtgacacacatgctctccctttgccttctgcgataagtaaaagcttcctggggcctcaccagaagcagagcagttgctggtgctgtgcttgtatagcctgtagcaccatgagccaaataaacctattttcttttgtttgagatggggtcttactctgtcacccaggctggagtgtcatggaacaatcttggctcactgcaacttccatctcctaggctcaagcgatcctcccaccttggccacctgagtagctgggagcacaggtgtgtgccaccatgcctagctaattttttgtattttggggacagacgaggtttcgccaggttgcccagactgctattttctttataaagaaactcagcctcaggagttcttttatagcaatgcaaaatgggctaacacagttagggagtgcagacacctgtatggtggagattggcagaggggtggggcatttacagagcctctcctggaggccaggaacgggcccagattcttcacaagattttttccttaaaacattctcactaggaaaattcatctccatttttcaggtgaagaaacagaggcttagagaagtgaagtaaattgtctatggtcgtaaggcccagatgacaacccataacttcaatgctgtttccaagtggtggtgagagtgaaattcatcagctctggtttggattttccaccaggcatagggaaagggagaggcctgtctatcagggaaacacagctaaagcagaaagaccatgaacttcctattgggcaaaccaaggatcaaagcccaatgtcgctgctggctgtgtgacctttgataagtcactttacttctcttagtgttaattttctccttagaaaaaaaggagtaatgatacccactgaaaacagttgctgaaggactggtgatcttatgctcaccacaagcccagcagtctgcttgctcactgtaaaggctcagccaatattgatttcgtctgccatctctccagctgtaggtctgtcatagagagaacatggtggttttgggaaagaagcaatgacagatttgcaagcctgccaattacacttttatcaatgtgttatttggtgatatcaaaaaaaggggcaatgtgttagggaaactgtcctaatacataaagagaacataggacaagggaatcctaagatctgcagaaacaatttctgttactcacatccttgtgtgaatcggtgatggtaactttctcttgcatttgaaatctaacctataaatagagcaagctagttgtccaagaagaacattcaaccattctggattcttagtgtatctttggaatataccacgagactaaaattatgagggctagctgatgaacaagtttattactctgtcaaaaagaaagaccattaacaaaatatactttttaacactttgctcagcagtcctgagaaatccatctaaatgcccaaatggaatcttattggtctatgataaaaccccatctagtctatggtaggaaaattcatgtgagcttacacaatggaaaagtgtgagtcctcaacagtaacatgagcactagctgtgggctgcagggaaggcacttttttccctggtaattccctggattatcggaagagcttcctaataaccttttaactggcagccctgtaatttagaggcttgtatgtaaaacacttagcccaacacacagccattactcaataaatgacacctagaaagaaaataaaacaaaatccttagacctaagcaggtacctcatctcagtggcacactgccctgatggattcaacctttccagaaacattttagtttcttcacttaaaaccaaatgcattctttttcttctcatgtgctagccatagggcattcagttgcttcactgaataagtgaaattatactcagttctgagcagaggatggggcactgaagaaaactgaagtttccttctgatagaaaggtctgcggctcgtggagggtcaggaattctaatgcagtggtatcatgccctgctttttattccagtgagttatgttcttgtctactgcttgaatagactatcctgccaaagagggaccacgtattgctcacctatgtgttctggtcttactcagagtctcagctcagcaaagagaggcagagctggtttccctagttatttgaaatggattggaatccacttttgaaagcatttcaaagagctggaaatctgaaaatctagagtgactattcgttcgggtttgtcagtgacagccccgatttacatctgttatcctgcatggattaataatagtttccccttactgtaaaaatgtattgatttggtcaattaattacatggccaccctcttttagggcagtaaagtacatattcagttccacatcagaggatgcagtctgtagcaatggaatagtggtccagatagctgggtgcaggtcaacaaagcagtccaagatcgtgggcaaagcagtccaagatcctttcctctctgttggatggatattctctaaggttcctttatggtccaacaaaagacagcagtagctgtagtctacacctcaagaggttgctctgagggttaaaggagactatggaaaaaatgtaggatataaatgacttaatttacaatggagagtcagattcctccaacatagcagatacttaaaaatagttatggaacaaataaatttgtataaatgtacaggaaaaaagattggttaaaaataaacaaaaaccacattaacaacggttatcactgttatgggcaatagaaaatttttaatatgcttttatatcttcaaaattttctataattagcatatatagttctttttattttatttatttatttaaaaaatttattttagagctgagatctctctgtgttgcccaggctagaatgtagtggctattcacaggcacaatcacagggtactgtggccttgaactcccgggttgaggtgatcctcccgactcagcctcccgagtagtcgggatcataggtgtgagccaagttctttttacacttttaaagatttttttaaaaacctcatgagaaaatgaaataataaatgtgaaaatatctggcatctagtaggtattcatagatgttgatttttaaataagatttttgtttgtttgtttgttttgtttttacagacggagtcttgctctgtcacccaggctggagtgcagtggcgcaatctcggctcactgcaacctctgcctcccaggttcaagtgtttctcctgcctcagtctcccaagtagctgggactataggcacgcgccaccatgcctagctaatttttgtatttttagtagagatggggtttcaccatgttggccaggatagtctcaatctcttgaccttatgatccacccacctcggcctcccaaagtgctgggattacaggcatgagccactgcacctggccccttaaataagattttttatacattaatattagtagtataatttagtataaactgatttttaaaatgtgaaagcttttcaattgagcaattccacttttaggaatttatccctaaaagtatgatgtctcagaagatttacactaaggatatttatcacaacatcatttgtaatagtaaaaagtaaaacattaaaaaaaatgttaaaaaggaaaaacatcctaaatgttaaaaattaaatgcttccttgtgtaatgaagggataatgctgatatcacacagatattgtaagataagtttataaagaatattaagtgacgtgggaaataggatataaaaagagcatgatgcaaaactgcgtaaaaagtaattctgacttttgttgaattacgtatgggtgcaatctgtataaaaatgttaagaccagtaatcttagggcagtaaattagaaataattgttttcctgattttttaaaatatattctaattttttcaagtaacacattgtgaatatgagattttttaaaaaaacaataaatgttatttttaacagaattagacacacatacagaaaagtcagccatgatgacagtttcttccttgggtccctaatgggaggagctcagcagacccacagcctcccaggtcttttccagcctattaaatcttgtgggtcttactcccctggtccggcagctcccactaagtcaactctcctcgacaatggttattttcaggagcgggtcccaggccatttgtctctgtgagttatgttggaaaaatggtctttaaaaaacaggacgcagtaaatttctcaggctcgtcatttgatctctagctttcctcctcacaggtttctcggggactttaaaaaaatttttttaaaaagtgtttgtcaggaacagacctctgtttcacccgcctgcctgggaagctggtctcctgaatatcaagaagagagccctttaggttcctctggttttcacacagggatggcctgccagctagtctgcttgtttgacacaggtatatttgatgaggactttcactgagtttttaaaaatatcagctttattgatgcataattcacacaccatacaggccactcaactaaagtgttcaatccaatgggttttagtatattcacagagtattgcaaccatcaccacaatccattttagaacatttcatcaccctaaagagaaactccacactcattagcagtcactccctattgtcctccaattccctgcagcctaggcaatcactcatctactttctgtctctatggatttgcctattctgagcatttcataaaaatgggatcatataatatgtgctcttttgtgacttcttgcacttagcaaaatattttctcaagggttcatccaaattgaagcaacgattaggatttcatttcatttcactgacaaataacattgcattgtatggatatgccacattttgttatccattatgaaacttgggttgattcaaactttggttgttttcactttttggctattatccataatgctgctgcaaacctttgtgtatacatttctgtgtgagagtatgtttttacctcttttgggtatacacctaggagtggaattgctgaattgtatgcttaaccttttaaggaactgccagattgtcttccaaagtggctatgtcattttaaatgcccactggcagtgtatgagggtgccaatttctccacatccttgtcaacacttgttattatctgacttttttattccagccactatagtgggtatgaagcagtatctcactgtggtttgatctgcatttcccctaatggcaaatgatgcttggcatattttcatgtccttatttgccatttgtacatcttctttggagaaatgtctattcagatccattgcccaatttttaacttgatttatctttttattactaaagtgtaagtactgctttttttccccaagaatttgttttgtgcttactctgtcaggcagtgttctaggcatcactgacaaagaagacaaagcccttgctctcagaagcttacattctagtgaaagaaaacatcaatgaacaagtaagcaaataactatatagaacaagatcaagtatgataaatattaggctggtgcaaaagtaattgtggtttttgccattaaatataatggcaaaaaccataattacttttgcaccaacttaatacaaagttgatggcatgggcgtgttattttaaatagcatggtcagggaagccctccctgaggaggtgacatttaagcagagatttgaagtaagtgagggagtgagccaagcagacacccaggggaagagcttttaggcagagggccccacaactgcaaagtccctgcagcaggaccaagttcatctaagggacagcaaggaagctaacaggactagagaagcataacaatgaggtaaatgctaggaaatcagccttgagacattgtcaggggccaggttaaagatgtgcaaatactgcaaactaaaggtcaggatgcctgggtgttcttgttggcaagttccctgagggtggggactggtttattcatatggccacaggccacatggtaattccacatatagtgggtactcactacatattacaaccgattttgacctaatgacctcctaataaaaacaacatttacatgtgagtagtatttattctacattttacacaggattttcacagccatgatctcatgtgatccttaccacatccaggagggtaatagccatcaccctcattttatagataaagaaactgaggctaggagaggtgatatgacttgtgcagggacacacaacttttaaggggccaagtggggctccaacccaggagacaggcagcaagtaagatctggatttaaaactgattattttgattttaggcaaattgtttgatcttttagagctggggagcctcaggatgtggtcctaccttacaggagtcctgtgcagagtaaatgcataaaagcatgcatgtctggggcctaccatgggcctgacatagagcaggtactcaaaaagtggaagtggtagctctcccacacctccctttctttctttttcttttctttctgtttttcttttcttttctttttttttttttttgagacagagtcccagactggagggcagtgacgtgagcgcctgggctcaagtgattcctgtgcctcagccacccaagtagctgggattataggcatgccaccatgcctggctaatttttatatttttagtagagactgggttttgccattttggccaggctagtctcgaactcctgaccttatataatctgcccaccttggcttcccaaagtgctgggattacagtggtgagcaaccacgcctggcctgcacctccctttcatcaccagccccagctacacatccaggcaacctctctgtgtgaagccctaagtgggcactagagacatagaactaagtctactccttgccctggagaggcatgcagcctcatgggtgaaggagacaagcaggaatggctcaagagggagaaaagctgtgagggaggtattggggtatgggggtagggtgggtggggcgacaactggaagactcactgagctccatgtgtcagctgcagctcctggtgtctcacagattgttctaaccttgcccacgcgctgcctccagaggggtgtgagatggttcattcacacctctggaggctgaaattgggctgatggaaaggccagtttccatgggatgtgggagagaggaaacgcacaaagcaagctggattatctctgactgtcaaaatctgctggccaacgtgaccaaggagtcactgaaatttatggcagaccttgaataatctgtggtcacagagtgctctcttcaacagggaggcttgggctctgcactttggtactgagatttgactaagaaagtccttccaaatagctgttttcaagtcatttattacttccttgggatacacacacccacacacacacacacacacatatatatatatatatgttttcctccctccattcaatttatacagtggcaaaattccaggcctcaagatggagtaagaccagaatctaatagtccagcctcctactcagatactggaggaatgatgggggtattaggtacaaaggaaaggggcaagagataggaagattctgagggaaaccagcaactgtgggagggtgggagggcagggatattaattgggtacctactatgtgtccagcactgtggaaggcccttgatgtaaattatcttaatcaaccctcatgccccttgaaagtgtgaagacttctccagctgacagatacagacttggaggctcaaacagaggcggcttaaggtcacccagccggtgggtaccagtctgggtgctgaatcttggtctgctgaaccctatgcccacatgcttccgactaaaataaccttaataaataatagtaataaacataataatgtacatttgtaaatttatgagtttacttccttgatctttcatcagccctgggaagaggacaataatgttcaaagtgaagccatttgctcaaagctacagacctagtgaggtgtggatctgggcttccagcctaggcctcctgagcctacagctaaagctccttccatagcatcttagagtgacagtcagggattcgtgtaaccaatgaaccaggcaaaaaaccaaccagtggggaagaaaacccaaagcatataaaataaaaccagagctgtgtatttatcatctgtggagtttctgaatatctgttatatttcaataaaaagtttaaaaaaaaaaccagaaagccatgtggtgtggatataagcatatactaagagatatttttctaaaacagcttttccccagtaaatgccctgattcgaaacagctttccatgaacttgatcactgcgccaaggcctcttgcttgcattagatttctataaagatttgtgaaacttttttggggaaagcacaaacataatgaggaccaagagttctagaaattcctctactgtcactccaagaaatcttgaaaatcgaggaaggcagctgggggagagtggacatgtagagaaatggctttccaaccttgctcctgagtgaccaggtctggttcttaaagcaggaacccttcaggcagctttaggtccaaattggaagaaaaacaaactttttttttgatcctaaattgcactctgtacagaaaggaacctttgagataagtgaagagaaaggaataagcatttgccaaataccttttgtgtctggcaccgcactaagcacttgccacgtgctttccaacatagctccgtaacaggaatcactctcgcactcagcaatattacttgacatttaatatgcaacagaaattcattgtctcatggttctggagggcagaagtctgaaataatgatatggacaagggccatgctctctctgaaccctgtagggggatgcttctttgcctcttcctagcgctagtgggttgctgtcatctctggcattccctggcttgcagctgcatcactccagtttctgcctttatcatcacatgtgtgctccctgcgtggcgctgccttcttctgagaacaccagtcatagtggagtaggttcccaccctcctctactatgacctcatctcaattaattacatctgcaacaacactgttttcacatatggtcactgtctgaggtactggagattaggacttcaatatacctttctgcagggctgggtggtgggtcaatagtgctcaacacataacactgtccttgtggaacttacactataaaagtccccttttacagatgaatacattgaggcacagagagcccaagtgatttgctcaggatctactggcagtaaactgcaaatccaggtctgactccagagcccattttctgtctactagactaccttgtctagcctacacaggttctcctcagcaggtggtcatttgtagaaaaggagctttactcatcattactggtcattagagaaatgcaaatcaaaaccacaatgaaataccatctcacgccagttagaatggcgatcattaaaaagtcaggaaacaacagatgctggagaggatgtggagaaagaggaaggcttttacactgttggtggaagcgtaaattagttcaacgattgtggaagacagaatggtgattcctcaaggatctagaaccagaaataccatttgacccaacaattccattactggatatatacccaaaggattataaatcattctactataaagacacatgcatacatatgtttattgcagcacggttcacaatagcaaagacttggagccaacccaaatgctcatcaatgatagactggataaagataatgtggcacatatacaccatggaatactatgcagccatgaaaaaggatgagttcatgtccttctcagggacatggatgaagctggaaatcgtctttctcagcaaactaacacaggaacagaaaaccaaacacccatattctcactcataagtgggggttgaacaatgagaacacatggacacagggaggggaaaaacatacactgcagcctgttggcggatggggggctaggggagggatagcattaggagaaatacctaatgtagatgacatgttgataagtgcagtaaaccaccatggcacatgcatacctatgtaacaaacctgcacgttctacacatgtaccccagaacttaaagtaagaaaagaaaagaaaagaaaagaaaagaaaagaaaagaaaagaaaagaaaaggagccttagcataaatgatccatttagtccttgcaacacttttacaaggtaggtattattgtttccattttactgatgaaatgagctccagacagactaaagttagttggttcataagaggagaagcaggaatgaaccaaagtgggcaggctctctacccatccttttttttcctgcaaccacaccaaacggactaatggcattgtcaaaggggaagtggacaccaggacggaacgagaaatcaactaataagaaggctggtcactctgaccaagggcactagattgggaaaaaaaattagaggtttgaatgtttttgtttcttgtaaccaaaaaagcttatctggagagaaaagagttcatactttggaggttaagggtattcaccattcaaagctcagaagttcagatcttgccctactctggagagcagagtctgactgctgctaacaaaacagggtttcttgctttctggagtggagggcactgagtgaagtttgtgtacaaagcttctcggtgtttcttgggcacatcgtgagaagcagcattcctgtgactttagtgctggtgcacatgggctgcatgtgccttggatttcatgggattggggaaatgacagaagagaaaggtgcctgtagggtaagaaatgcattcagaatgtttctgcaagccaaattctcagtgtccagtggtctgtgaggctgggaggggtggctggttctgtgtgatttgtcacaggtccctgagctagttggaggagggcagtgccagccacttgaggaagaaggccaagcatccctctggggtgtcctgccactgaaatcctgcctgcttagttctcagccctcccaagggagggactccaaccagcaccccaatttagtcatagaggggaagtcgattaggtccctcacctgcctttgggaagttcccagtttagtggctgagcaaacccggaatatgcaattcccctacaatgctgtgagaggcaaacacaaagatcaaggccttaattgatggagccttggggctcagtggccccttgctagagaaagggaaatttaaacagaagcctaaaggtgaaccaggagttggccaggttaagaaagcattgtgggcatgcatgtgtgctgtgcatgcacatatgtgttgtacatgcacatatgtgttgtacatgcatgtgtgtctacagcagtgggctggttagagtgtcccaggcagagagaacagcttatgccaaggctcacagggagagaagagcacgatacagctagggaactccaagtactaagagttgagtaagttgggagcagagatagggatggtggtaaacaaatgactgaggagacaggccatgttcacatcctataaaggcttctggtagaatccagggtctgtcccgactccctgggctctagatccatcatcagttatcaacttgtctgtaccacctgaattgagtcaccaaacttctctgggtctgaaatttagctgaaaattagcatggttacatgagttcccttctaagctcccttagagttccaataataaaactagcaagactgatttgtgctattccacttaatcctcatattaaactctctgagttaccatcacccccatttagtagatgagagaagataaatttaaagaaggttaagtgattatattctgtaagtctatgattttctgaaagaaactgccctcaagctttctggctgaataactgagtcctttgctgtcagaagaactttattcacagaagaggaagatgacttgctaataacaacaatgataataattgttgttactattgatcgagcactttctctttgccagacattgcattcatgctgtgtatagacatgcatccatttttaattgtcacagcaatcttaagaggtagggactttcattatccccgtttcagagataaggaaaacagtggtcaatcaacatggccaatgtcacatagccactggtaaggcgagagccaggaggtggccccaggtggatgattccactctgaactcctaatgacttctctgtgaggcttaaaaggagcaaagctctataagctcaagctgtggaactgcacatgaggaagttgaggcctggaaggtgacagaatgagcccaaggtcctataggaaggcagcagtggaaatggttttgtgccattaatatcaacaatagtaacagtagcgaagtctggcttagcagggtggtcagaacatgaactcatgtctgagtctgaatcctcgctccaccacttagtagctgtacaaccgtgggcaaagttttagttttctgagcctcagttactttacttatagaaaagggataatagtacctacctcacagggttgtacaggggcttaaagagttctatgagagctctactgaagtgtttgctgtcattgatttgctacctgctctgtgccaggtatggtgttgatatactttatctttaattcccacagaaacctttggaaagagattattattcctgttttctagatggagaaataagcttagagaaattaaataatgtatctaaagttacatggcatgaaaggtgtagaagctggattggaacctgtgactgatttccaaatctatgttatatcccacaataatctctcccccatgtatacggctttgcagagagcactgacatccataacctcattactatgaagtatctggcctatttttaaatgctgatgatttttatatctctatgacaggtgtgtgtatgcgaggaggggatgatgaacaagaaagcacaccacaagcaggatggatgactgcattcaagtgtcatctattattctataacagaaatataattattctataaggatagtaacaacccatcccatgtgcagaacactctatgattcagaaaatccttttacacccattatctcattgcatccccacgacagtcctgtggtgggggaagtagagctaattatattatcttccatttgtagcagccactcttggttgcatagcaatacctactgccctcctaacagaatcctgactttgctcagctagccacactgtggttatgtgtctcagttggaagatcctgactggcaagttacaaaagtccccttcctcatgagggaatctggaccaccggccaatctgatatgaggagaggtctgggggttccctggacggggaatcatccggacacaatgcctgggactgtagcagtggaagccaagaagctgaatctgagccttgatgaacatgcctggaattgccctatctctggacttcttgctaaatgagataataaatgttgaagctaacgataatcattgaagccggtttgagttgcggttttgcataaggcatcttaagatctcctacctcactgtagacagagtcttcataaaaacccactcccactgctttcgtttccacccttattgttgagccatgtcctttgctaagtaagactgtgctgctctcatggagttgccagcaacacccagctcagttttttggttccctctccaccaccatgcacatctcctgcatgccccgtgtctgtccccaggtcaggacttgccacagggtagccataaaggaatcacacctgcaagaagcctgatcagtttggttgcataatgattctgaggcttttgcttcttcaaccgataagtaggataataatatccgctttgcagactgcttgtggggcagggagagggtggcatcctcagtctccctccaaggaaatgccacttgccttaatcagtaataatccttgcatcttctggttggcaagtaccatgtgccaggcactgggacccagtggtgagtgagcagagccacccctgttcttgtgacactccttgtctaacaaggcagatacaatacatgcttggaggccttgtcccacattagctccaggtccactcgcggctgtggcctcctctgaaaaccagtaatcaggagttgtcctcttcctcagggatgaggccagagtccatggactcaccctgggctcctgtttcctgtctgcttaagtgattgacaactggctgacaccctgggcgcaagtctcagagggtcccctgcagtgagtccgggaatcacagcatctcaagtggtcatgctgggccctgcccctctggctctcctcacacccccaataggccctgtggcccagggatgcattcacactcactggaaagttgttcctcttcttgctgccaattttccacccagctgcaacatccaacaatccagccaggcctgtacttatgcacatccctcagaagggcttatacaaagcgcaacagatggctctccacgtcaaaaattatttcctgatgcccagctgagatgtcccagaccctgcagtgcccattagtgctaaatccctgtttctcctgccctttggaaacttgttattctctgagatgctctggcaaagtctctgagctcagcctttttaaagcagccctgagcattgtccttgctggtcccctgcaagggtctccagggcagctctcgcagttactgaccacacagtggcctgggtctgaggagttagctccctgtgacctttcccgaggcacttggcactttcctggcctctggcctttgcttgactatttctttgaccttcaatacccttgccggtatcttttcttgaaggctcagttcaaatgccacattcataggaggaggaaaaataattcacactttttgagcacctagtgtataaaatgttctcaaaatctcacagtctattcacatttgttagtcattcatgcattcactcactcattcaacaagtatttatagaaagccatgcttgtgtcaggccttgggtcaggaactggtgatagaccagtgatgctgccctcaggaaacttaccaaagagtgggttgcccactctatgtcaaacactcttagtgccttattttaaaacaaacctgttagatattttaatatctgtttgcagatgatgaaaactactgctattgtcacaagtcagctaaactgtgccctagtctgtgcttttgtttgtcatccattcgacgacacattcctgatgctcatggtgtcctgccttgggctctagggacacagatgcatgggtcatggctctatgggggttctgatgaaaaaccgactggcttttgcacagtgtggtacatactggagactagcggcttcctgaaggcagggagaggccttgcctggcatgtgccaagcctggcagtggggacacgctgcccccagggcatgcctaccaactgtggagaggaatcagaagacacggcagggcctgtcaccctcctctagaggcctttgaggccaagcctctctcctgagtgctgtcctatcctgtgggggtggggctgggtgggctcagtggggtggcagctcatgagagggaggcaggagccctggcttttggcctctgggtctcactttctttgtgaccttgagcaaatcactaacccaaacaggacttcattttctcagctataaaatggaggactcagggaatgttctagagaaaatggatggtcatctgtctgtcaagggtcatgtggagaggattccaggagtgaggaggagtgggaggcaggcaggaaaaagccctgggctcttcggactctggctttctctgggccaccagtttcttctctgaaaaatgagggaagcaggctagagactcaggaaggtttaagttcaaaccccatctctgcgtcttactttgtaatctgtaataggtgacttaatctctctgagccttagattcctccaaaagcaaaatggggatttacaacctctgccttgttacactcatgtaaggcttagagtatcctaaatgaagcctagtaaagtatttggcacagagcaaatatccagtaaatgttaattcccccttctctgaagggctagataccctcgagagttcttgaaaggaaaagttttggtgacatagtttcccctccgaggtgtcagtgagatgagtgtggattgcattcgccatttgggatcagagtcccactggtgaactaaactttgaaaatcggtaactctccaacctcttactgttatccgccctgttactctgcccaaatccagtgcctgaatcccatctacaatgtggttgctgctgacatgacaagggactcactactcactccagaggcaatctatttcagttgcattgagctctgattgccataatgttcttccttctaatgcaccaaaatactgtcattactgctgctgctgctacgctacctctactaccggtaaccacagccaatatggcatagtgattaagcacggattctagagctgtgctgtccaatatggtagcgattttaactataaattttaatatttaatattatttatttaaatatttaatattataagaacaagtctcagctcctcaggcataacagcaacatttcaagcgatcagtggttccacgcagctagtggctaccgtattggacagtacaagttctagaccatttctgttacagcagtgagttctactggagagtgctgctgtagtgctagcatgtcaagggcggaatcctggccctaccacttaaggtgtgatcttattcaagtcacttaacttctctgtacttcagtttcctcatctgtaaaatggggataaaaatggtatctgcctcacaaggctgtttgtgagaattaaatgagttaatacatgccaagtgcttaagactgtggtggctttacaatgctcacttattcataaaaaccaccaccagtttggtacctactccgtgccatgtcctatgtattatttgatgtacacatgccatacagatttttttttttgatcatactggaatgagtatctttgcaagctaaaagacaaattgctgggccaaaaaaattaatatttaaaaaatttaaaagataatgccaaattactttccaaaagagaatgtatagattttatactcttactaataatgtgtgcttctccacaacctaagcaaccctgggtagtcttaactttttaaatccttactgacctgataggcgtaaaatagtttaaagccattttgatattcattactttaactattactgagtttgagcatttttctatgtttaccagatattataatatttactcattcaagaattgccatacttatctttgtacattttttgtgttgtttattttatctatttattgattggtagggctttctgtacgttaaagaagttaacctatcttataaaatgcaaatattttccttgtttcctttgacatagctttgttttttgttctttttaaattttttttttattgccatgcagaaatgcttaacctgtctgtctcagtcattttctttacggctgctgggttcaatgaaggtcagccaagttaccgagctacttcctgccatcagctttgcccaggctccccctctgggtctacaggcagcacagaagctcagagacagaatagaggtgccactccatgccctcccgtgtgcattcaggaggccctatgcatctaatggagccttttcttcctttcaaatccctggtgtccctccaaggtgtatcaagagatgaagcacaatgtctttagaacattgattttcatttagaatatactaggagcaattccctttttttctactgggctcctcttactcctagaatggagaagcagggatgctggggtagataaaatgtgatacaaatttgcagtttccaaggaaattctaacttgggtgttggctgaaggagtgaagtgagatttctgaaagttctataactcaaagaaacatctctgaaattaagaatttttaatttggcagaaggaagaaaatggatattaatcaaacacatactgtattccagacactgagctaagtgattttatatcttattttcataaaatcttttccccttctgtggttttcagtacaatcctccccgctttcagatgagggaactgtagcttggggagattacatgggaacctgtcatattgtaagtggatgaggtggcttttgcccaggttctctgacccctggcatagtagttaaaggctgtaggagccaaatgggcaaattttatcttggttctttgggtgactgccagtttggtttttgttgttgtttgttttttgagacagagtctcgctctgtcgtccgcctagagcgcagtggtgtgatctcggctcactgcaacctccgcctccctccacctcccgagttcaagctattctcctgcctcagcctcctgagtagctgggaatacaggcatctgccatgatgcctgactaatttttgtatttttagtagagatggggttttgccatattggccaggctggtcttgaactcctgacctcaggtgatccatccaccttggcctcccaaagtgctgggattgcaggcgtgagtgaccccactcggctggtcattgtcattttcatcgtaagcaaatcacttaacctctgtgagtccagttccctcaactgtcaaatgaagataattatattcccttatacagattccatgagggttaaataggaaaaggaatatataaacacatagtctaatgtctggcccacaggaaaggcttaatacattttaggtataataataagaacagcagcagcaacaactattttattgcttcctccccatcatattatttctctatcaatcatagttttccagctgggtactttcgtattctcagtctacttggtggtgctgatgatataataacagtgatgttcatagcagctttattcataatagtctggaaactttccaaatgtctatcaacaggtgaactgatacataaattgtagtatattcatacaatgagaagcttcacagcaattaaaaaaaaactattgataaatgcaacagcatggatgcatctcacagattctttttcacagattcattcatgttgagtgaaagaagccagatgcaagagtccacaccacatgattctgtttctatacaacttaatttgaaaactaagcaatacttacagaagtgagaatagtagttgtctcagggtaggtgagtgcatgaaggaatcttatacgtttgctaaaaatgttttatatcttgatttgggctatggctgcagggaaggatacattgcaaaatatcattgtacatgtaagtgtactttacacactgtaatgcatgcatgttattccttgaaattcttaagggagggcaaataaaatgtaaatctaaaaaatgataaatgtgaaggtgctacattcaaataataaaaatagtagttaccattatagccactttctatcttgtaggcactgtggaggaccttatttattctatctcatctaatcttcattacaactcagagaagtaggtactactcttatttctatttgatagatgaagaaactgacggtaaggcaggttacgttttttcccccaggccattcacccacacagggccaggactcagggctggctctgtctaggctggtgctattacctcttgacaacacaagggactctcatgtaaggtgtagccaggttgaagatggatgctgctgagcttcactttctgatattcacgcccttgtataattcagctcagtagagcggacctgtgataccaataggatattgtggaaatagagagtttgacttccaaggctagcacatagaagatattgtggtttactccctaggtttgctcagataacttgctctggaagaaaccagctgccatgttgtgaggatactcaagtagctatggaggggtccatgtgtaagaaactgaggcctcctgccaacagccagtatcagtttgtcaactgtgtgagtgagctaccttagtgaccaatggtccagccctggtcaggtcttcagatggctgtaaccctggctgacacaaaaagtcagatcactgcctgtggctgcctgtggattcctgactctcagaaactgtgtaaaataataaatgttgttgtgctaagcagctacattttggggcaatttgttatgtagcaattgaaaactaatgcataaggcctatttgaattcaatggtaagcagctctcactgatgagcttatatcttaaagaagtcacacatacacacaaaaagaaatcacaagaccaataatctgtgccccacctcagagctcagatgcaggtagctgtttctcaatgtgtagcctgggttttaaattgttccttggttttcacaatccccccactccctttttgtaaagacaggatcttattctgtcctgtcacctaggctagactgcagtggcataatcacagctcactacagcctccaccttccaggctcaagcaatcctctcacctcagccccctgagtagctgggactacaggcatgtgccaccatacccggctaatttgttttacttttttgtggagacagggtcccactatgttgcctaggctggtctcacactcctgagctcaagtgatcctcctgccttggctttccaaagtgctaggattgctggcttgagccactgcatgaggccacgattccctttatatttttatttttgtgctctgtccacacagctaaggtccagacctcagccactgcacactttagctgggtcctcacaactctaatcctataggcctgaataatgtcaaatcttacagagaagaaataaaaatttgcaacttgtttattaataagttagtcctattgaaggccaaaaacagttcagctgtgtttgttatcaactctcctccttacacgttattattattatgttctattaacattaaccagaggttacgttttggtcagaacttagaaattaaagactgaaagagtcacaggatgtgggaaagcatctagaaatatttttggtccagtccttctgtctgaggcagatgttttaactatgttcaaatacaatccagagttagagagccacataatattttttggtggcaacttctgctgtttactttttgtttaatcccagtaatcaaataaatgtcttctccatttcacacaaatttctactgctttcatttcagttccttttcttctgcttcatcttctgagaacatgaagaacaagtgttaagaactctctttagagaaatccttcatagattcacagagattaattaaatcacagttcagccatctcatcttcaagttaaacagctctagttcctctgcgctaactcatgggggtttttccattcctttcgtcccaggtagagccgtccctggatgctccctctcttcggagcagcagtgcttaatgaatgcagcaatggcctagcgtggagtataaaaatgatggtttaggctgggcaccatggctcacgcctgtaatcctagcactttgggaggctgaggcaggcagatcacttgagcccaggagtttgagaccagcctggacaacataacgaaaccccatctctactaaaagaaaaaaaaatacaaaaaattagccgagtgtggtggcatataattgtagtcccagttactcaggaggctaaggtgggagagtcacctgagcccggggaagtcgaggctgctgtgagcatgattgcaccaccatactccagcctgggtgacaggagtgaggctttgtttaaaaaaaaaaaaaaagatgatttggcattttggcctcctttattgggtcccagggtcactttagaacttattttaagttttagactcacagatatgttagaggtacaggagtcactttgttctaacccataattttatagctgaagaagcatgggtcaaagaagacagctcaaggttactcagacagagtggctgagctgtatttggaacccaggtgttctgacttcgcatcatgagtctccagtctcttctgctcagcttggggtcgcctggctgtggcctcccacctgctctgaatgtctgtcctcaaattcccactgagaacaataggaccggagcaccctgccgctggcacagaggacaatctccatggcagcgctgtttgaaacagggaagacagaaaaccccggggcaccctatgccatggactattctgaagctgttaaaaagaatgaggatgatctaaatatactgcgagggagtaatccacgagatatactgttcagtggaaaaaaacaacttgcagagcagcaaataaagtatacgattccatgtgtgtttgaaaggagtacacaaacacacagataggagtctgtatagaaattcctagaaagatacatataaaactgtgaacgacaggatgggtgttgatgctaaagacctttacttttcattttacaccctttagcagcgcttgaatttttaaccatgtgattttattacttttataataaaaatcatataaatatttaaaatgttcatgccggggattttcagtttgttttacttgtcatgcttctctgttctttgactttttcaactaccatgtgttaacttgcataattagaaaaaggatattaaaaagaaatacacatgagcaataatgttctgcatctgaatacttgttttatagcagtgctgttaggacacagggcccagagagatgataaatgctgcataggtgagatcagactgtaacctggcagtgatttctcagatggcgcatggggtgtctgcgtgtgtgcctgtgtatgtggagctgtgtgcagcttgtttttggtagtcacaatgactaagatggctgctaccggcactgaatacactgaagctgagaatgctaagactgtcctgcccaaaatcccagggtagccctcctgagaaacactggtagaatatttaaaataaaagttttacaatgtctctatctagtcccttatttgaacttcacatcccttttgaggttaaaaaaaaaggattcattattgcctcttgttgataggaaggaaacatctgagaggtaggttactcgaaggtctcagaaagggagctttctctgagaaagaaaggcaggatggtagcaagattgtaccgagcaaccaagaggcaagagcacttgttgaatgcttgtgcatataaatactgtaccacaactgtgacatcccttaccacagttaatagggtggtattctccctattttacaggtgagtaaactgaagccttgtattagaccaccagccctagggcacttggctagtaagtggctcagctcaaacctgggtctgtaggaggtttctaaagcccttgctcgtcacatttccccatgtggcctctctcacagccatgcagggagaccaggtggcacctggaagcaatttctcccttggttttccccatggacccatgctactttggtagggaattcacagtaggaaattaacctctgtctgcaagggccaattatacagtctaggattaaaaaagaaatgtgggcccagacccaggcaaaacactggcttcctcaccctgtgctgctgctggtggaggtggctgggatgggaacaggaggggtggcaggaaaccccattctattttgagaaaatagttgtgtttgattatccaataataccaagctataaggctgggacaactatggattttccctaaatttgaaaaatagtgactcattaacttcccactctgaaggtagatctattcaaaagaaatttaattccctgtaacaagcactaaggaggagtcagagttactgcagaggcagacttctgttaggaaaaggagttcagacctgagagcacctgctggtgcacagcaaaggagaacgagcagcttctaagaggacttcctgccatcccactgaccttggcttctctcactgtgtcctctaatgcaggcacatggactttttgttgcatttgtattttatactttgtccagttctcatatccttaagactcatgtcaggcatgacctcttccgggaagtcctcactgagtagtctagttggctcagggactcccaaacccctagtattgccttctctcttgtactgatctcatttgaccaaggactctttctctgattacactgtgcattgctttaggttagaagacatagctcattcatctcaggattccatggcttaaaagagcacgggcactcagacttgccttctggatttgtggtggtatgtgaactcatttttcctgccgaagatagttttgatgtggatcttgagaaagaacgggacttcaccaggtgggtgagagaaaggcagaagaaatagcatggacaaaagaaagcgtagagccatgggaatatatgattaagaaataggttgtgagtaggaagtagagaaggtgttttgtccagcttttgaaatcaatcttgtggggataacctacaatctcacttactatctgcgtgaccggaggcaatttacttagctctttgccctttgcttttctcattataagactttaattaggtgtatataaatggcttaccacagcaccaggcattcagtgggcactcaataaattgtggttttaaatattattattctgaaaggggaggcataattctcttgtgggatgacctgggttccactgcttcttggtgttgtttgcttagaagtccaggatttaataaccaacctgtgctattacctttattcattcaggtacttaattcacccatttaattgattgttgaacagctactattggcaacatgttgtgatatgccgtgatagcctcaatgcaagatgaattcccagccattaaaaagctcaaaatctttcaaggggcatgaagcatagacccaaagctatgatcaagacagagtcaaaggggagttgaggaaaaggtgctaagggagcctggaggaagagggggcattactagaaggagaaattcatttatgaaaaaggggaatttatgtctttttctggttgctttttaagattttctctttataattgattttcagcaattttattacggttttgtgtttattcctgtgacttgttgagtttcctggatttgtgggcttaatttacatcaaatttgaaaaaatctcagctattatttttactgttttcatctctctcttctccttgtgggactctaattacatgttagaccacttgacattgtccctcaggtcactgaagttctgttcatttttttcagcctttattcttctctctttctgcttcagtttggatagtttttattgccctgtattcaaattcatgaaactttttattccacagtgtacaatctgctgttaaacccaacagtgaactttttatttcagatactacatttttcaattcaagaatttcaatttggttccatttctctatgaagatgttctgtttgctcactcattatattcatatttttctctaattccttgaacagatttatagtatctattttcaaagtccttatttgctaattccataattcctgtaatctatgtttctactgagtaatctttctcttggttatgagttccctatccttcttctatgcacacataattttttattgtatactgcacattatggatattaagatgtttggggtctggattttgttgtcttccctaaaaaaatgttgagtttttgcttaggtaggcagttaatttacttgcagattagtatgatcatttcaaggcttattttaatcaccattagattaggcctaaagtagccttgactctataactagattaaccctattcctaaagcatggcctttctccagtgtgtagtggaagcctaggaagttcaacaaggtccttcccttctgggtagttggaacggaaacatctctcagcctggtgtgaatgtcagcatgcagctgcttggtagttgttttatttcctggcagttgttttttccccagtagatgttctttgaccagccacatgaagtttttccttgcatatgtgaagcttggcatttaatcaaaggctcatgaggacctcaatgcagatttctgtagccttttctctctagtaccctatcctacaaattccagatttgtcaatggccctaaactagtaggatggttgtgttctatctgaactctactacttgggagttttataaagttcctctaagctgaaagctggaacgaccatgtaacttgtgtagttttctacctcttggaagccatagctttgtgctgccttttatctaaaatcagaaaatagtaatttcatacactgtgttcatttttacaatcgcttacggtaggatggctagtccaattccagttattctattatggccagagtggaagggtgggaaatggagaatcggaagagttgtttgaagactagggaagatacagacataaggcaataaatgaagagacacctctcagaaagagtatcaatctctgttttgtgttaggcacaggggattttgtggtgaataagacaaacagagacttgtcctaatggagtttatagcttgttctgatctgtgttcatttccaccattccccggatgcctattctgtgcaaaacactggggtgtgcaagaagttggtattacaaagaagaataaaacgcaattctggtcttcagggatttcatgtcttttgggagatatgaactaagagataaataaagagtttcaacataaagtagtgagtgaggtgacaaagttatgccaagagtgctatcgggtaagggagatggacttggaagtctagcctcctctatgatatatgcactatatttcctagaatgagtaagagttaaccaggagtggaaggaatagagtgaggccctctagaaaatagcaacaagataatcaaaagcacagagacacaccgtaccggctgaaaactgtaagcatctcagtgtgataggatgagataagactggagaggcagatcagctcttaaaggggtttgcatgccatgtcaagagtttagattttgtcctgagggcaatgggggagccatggaaagctttgaagcagaggagtgacgtcctgaaaactcctgtccttgacatctcccagctggcagggaaagtactgagtactcaaaaggggatttatgggactggagagggcttagaagtcaattaccttctaccaggaatttgaaggaccctttcataagagccatttggatttctaaaaaaatagtataagacacttacaaacaaatgctatgggtcaaaatcttgtcaacagagatacagaaaagtagcaaatgcagcaggaggagatgtgcttcttcaggtaagtggtgggtggaaaagaattataaaattttaaagttagaatgggccttgaacatcactgcttttttttttttttcttaatatatgacattggaggcaactaagattcagagagatgagatgcagagtgagggtggcaagaaaggctttggagttaggctgacctgagtttgaatcctggattgaccattttactagctgaaaccttgcatcgatcacttaagctctctgaattttaggttcttcacctgcacaatgggggataagaaaacctacctggctgaattgcagtaagactcataagagatcagtggagtggttcccattgagcctaaactgagatcgcttatgtaaggtcatcagctccttagctgctcctttgctcagctgatttacgtggagagaagaaagccgcaaggaggactgtttccttaggaacagcctcaaaaactagggggaatggcagtggattttaaagatggctgcaaattctttgtcactaacctcatcatgagctagggcttattttctttccccttgaatcctggctggccctgtgactactttaactaattgaatgcagcagatgctagctctgggcccacaccctaagagaactagtaacctatgcttcctccctattggaacactcttgagatccaactatcatgaaaagaagtctaagctagttaagtggaaaaaccacatggagagacagcggtgccagccttccaactgaccctgtgaaggcacagaacacatgagtaaagccatcttcgatgttttagccccagccaagagctccagccaccatgcgactaaagcctcataagagaccctgagcagaacttacagagctgcccagtcaacccacagaattatgaaaaataacacatggttgttattttaagcctttaagttttaggatagtttgttacacagcaaaggatacccagaagggataggaaggtttgctctcctgcctgggcccagggtcagctctgagccttattgggaagctgaagaagctattaaatagtggacccaagcagtgctgctttggggcctaggaatcaaggttagcatggagtcaaggtgaggctccttctcttcccttctctaggaaacagcatgtttatggtacactgtagacagtgcagtgattaagggtttgcagctttgggatgaccctggggcagaagaatggtggtcttgtggagggctccagctgtaagggccggggcatggttccaccttcccagtggcttgtagtcagagagaatattaacaaggggtgcgatgtgaaggtgccaaagaagagttcttctcaaacacatgggaggcctctggaggcttccagaaagccccaaggggggaccttcaagtaagctgtaggtcctgtgcaagttgttggggcgggggtagggtgggtgtaggaatacaggaaatttggattatttccatcaaagtgaccacaggctgctgaggcccaggaacattcatgttttgtgtataaagctcctaagatagtgtttggtacatggtaaatgctcaataagtgacagacttcatcattaggaaagtggccctaaaattcagagcagtccagcgtgttctctccatgagactgtgacctctgcaaagagctcacactattctctggagactcaggcaaatcccatcagtctccaaagtttacatatgtccttgttttggcacagaagataatactctgatttgagggtttatgactctgaatcttaaagcaaatgttacctttctttgctaaaccattcaacaaagaaagttggaaaaaataaaatgactgttacaactttaagactggttaaaatacgtgccatagttataattcaggagctacccacatgcaaagcacagtgcctctcagtaggatggctgcaggagaaaggacgtcccaccatcacctcttagcttaatggggaaaagaagaaaggccctgagcttcagcatccacagctggaatttatccattgtttctttccccctgaagtttggctttgatgaatatgaagacccagtgaaactctacaggcctcaagtcagcaagagaaagctaagttctggactggcgtctattatgggttgaatgtatgtgtccctttagaatttacatgttgaagccctacccatgatgtgatggcattggaaggtagagcctttttaggaggtaattaggtttagatgaagtaatgaaggtgggaccgtgatgacaggatcagtgcccttataagaggaggaaaagagaagtcttctctctctcttctctctttccttggtgtatatacaccgaggaaaggccatgtgaacacacagtgaaaaggctgctgtctattagccagaacgtatgccctcaccaaaaaccaaatctgctggcaccttgatcttggacttcccagcttcaagaaatgtgagacataactgtctgttgttcaagccactagtctatggtattttgttatagcaccccaagctgactaaggtagcttatttgctcagtggtcaatggaaccacacccaggcttcatggtacagtagaaaagcactgaaagacagaaatccaggctgaaaacctggctcagtcagtttcaagctggaggacactgggcaagtcacttagcctctctgagcttcactttctttatctttgaaatggcactaacaacattgctctgtcagtctcacctagacgttgttagaatcaaaagagatttaagaggactttagaaattataggggggattttggcctatggccaaatgaggaggttgacaaatcatctcttctcaaaaggaaatgtaaagtttgacaaaattgacaaaaataactattttaattttctggaaattgacaaaaggcatataatgatctccgaagtgattatgcttgaaaaactgctatattttaggtaagaacagtgggactcagtggtgttatcatcctgggcttgttctgtccaccacgccttggccagcacagttctgccagggtgaagttgctatgaggattggcaacttggcttacaaggtcagtgggagcagcagctgatgcccatggctggtggcattgtcgtaaaagtagtgactcttggcagcaggtaagtggggagggccaatggttctggtagcatgaggtcatagtggggcaagcatattcttggctgagatgtgaatgaatagtggagtccagagaggttccagaccattctcatacttctggccaaccctgaggatgcataaatgaaggcatgcatacatacaggagatgtaaaaggacccagtggaaatcaaaagccagacaggttttaaaaagacctaagctttgaatgtatttcccttcatctcacatctccattggcagaacatctggctcaaacacatggaagtgttttgagcacagtctctgtccatctgtccattggttgatcactaagctatgtagtcagaagctgaaaagtgacaagaaaaaaatcaagtgattagggacaccagtggtcacaccgcgggagagaaacatttcacagatttagcccagacatgttctaaacaaagataaacaatgggctgggcggggtggctcacgcccgtaatcctagcactttgggaggctgaggtgggtggatcacgaggtcaggagattgagaccatcctggctaacatggtgaaaccctgtctctactaaaaaatacaatagaaattagccaggcgtggtggtgtgcgcctgtagtcccagctactcgggaggctgaggcaggagaatggcatgaacccgggagacggagcttgtagtgagccgagatcacaccaccgcacttcagcctgggagacagagcgggactccatctcaaaaaacaaaacaaaacaaaacaaaaaaaccaccaaagataaacaataaataaaaagagaacagtaacaacaatcttcataagtgaaaattagaatccagagttgttacaatatagtaactgaagtgtccagttttcaacaacaaaatcaaaattacaagacatgcatacaaagaaacaggaaagtgtgacccatacttaggaaggaaagcagtcaatagaaactgactgagagtgggacaacattaagcccaacaacaaacatataataaaggctccaggagaggagaaagagagaaaccagagaaagagaagagagaggtgcagaggaaattatttgaagaaataattattaaacttccccttatttgatgaaaaacattaatctatatatccaagaagcaaaatgaacccctagcaagataaatgagaagagatccatacagagacacatcataaactgttgaaagccaaagacacagagaaaattttgaaaattggtaagagaaaaatgactgattgtttacaggaaagcatcaatacaattaatggctgactcctcatcttaaacaatggagggcatatcagagctgttagagaaataactgtcaatgaacaattttatatccagcaaaactatccttaaaaagtgaaggtaaaacaaagacattctcagataaacaaagactgagagaatttactgctaggagacctgcctcacatgtctaaatcaagtcttttaagctgaaagggaataatattgagatatactcaaatccacagaaagaagtgaaaagcatcagaaatggaaaatacacacattaataaaaataaacctatcaatataaattttctcatttcttctcttaatatctttaaaaaatataagattgagtgaaacaataattataacactgtatagttaggtttataatatgtatatatatatatgtgtgacaaaaaatagcaaaagaaagaagaaaggaatacagtcatcttggagcatagttttcaggttttagtgaaattggtagtgacaaaatagattgtgacaaattaaaatgcattttgtattccctagagcaaccactaaaaaaaatcctcaagatatagttaaaaaaatcaacaaaggtattacaatgctacataaaaactttatttaacatacaaaaggtagtaaaatagaaacagagaaataaaaaagacagggaagttatcaaaagcaaataggaagggccgggtgcagcggctcatgcctgtaatcccagcactttgggaggctgaggcaggtggatcacctgaggtcaggagttctagaccagcctggccaacatggtaaaaccttgtctctactaaaaatacaataattagccaggcctggtggcatatgcctgtagtcccagctacttgggaggctgaggcaggagaatcacttgaacccaggaggtggaggttgcagtgagctgagattgcaccactgcacttcagcctgggtgacaaattgagactccatctcaaaaaaaggaaagtagcaaatgtaaatccaatcatataaataatgacagtaaatatggcctaaatgacccaatcaaaaggctgatattgtgacagcagataaaaaagcaagatccaatgatatattgtctataggaaacatactttagattgtaagacacaaacagcttcaaagtaaaagaatggagccaggagaaatgtctgccactgagaggctgggacatcaggaagactgatacattctaagtggatcttcagagggaagacattgatagtggatgaagggaggatgcagatgctgggctgaaggcggggggaagctgggaaccctgcatggggctactgagcaccagcctggccctcagcaactcctggggaagggttgggttgaacaggcaaggaatggcatgctcttgccatgaacttccagaatcctggcagcaggagaccccccccaaatcccatgaacacttgagctgtcaaggagagatgcttatagaggttgtaggagcagggctccagcctgcgcagagcccaaagggtttggtgcaggaacatctgcagtagagcacggccagggatggccattctccatggcttactattctcctttaggagattttagccttgagggggactactgaagctggacagagcagggtggtcttacttgtgagatacagccagtctgaactaattgcccccctgtatgttggcctctcctgggacccgagtttggccatgcctacttgcaatgcagccttggatgcccaaccagggtgcatcctgggggctctcaccatagctcctttgtcagcaaaccatgcctgaccattggagagctccagcagaacatcccctgccaatgtgcaccaactcacctgtattcttcccccaatgcctgcagcctccctccactgttttgctgtcatgcatttgcccatagctccccatctcccctgcttttctggtgcatccagggtgcacctggcttccccacccccaccagcacatgtgtgcaagcataccccactgcactagctggcatgagcacaccctgccatccccacccccccactgatacatgggtacctggttgtgctgcccttgctggcatgaaagcacatacaaacactagtggccctgcacctccccttctgtaaacgtgtgcacagaagccagcagctttgtgcctgccagcacctcactcctgccagtgcaaatgcacacaggaatgttggggttcactcctgtgagtactctgccccagccaacacatgggtaccctgccatgctgctacagctactgacatgtgcaagtgaaatggatcctgctgccccttccctgatgaggtgctctggctggcaccacccattggagtgttgtggccagtgaactgggaacacctcagcccctccaatgcagcaggttcctaacctctagaacaaaggcaggggcccagtactagtttccaagagttacagcacacagcccaaaagtgccaagctgagtcttggccctctaaaatcttcaagaaacaaggctagttgagtgaatccaccttataccaaaatcaaacccccaagcgcatcaaacaagataaaatcaaaaaaacccattggaaggatagcaacttgaaagactgaaggaacatcagcccacacagatgagaaagaactagtgcaataactttgagatttcaaaaagccaaggggtcttctcatctccaattgactgcactagttccccagcaatgattcttaaccaggctgaaatgtccaaaactaaagaaacagaattcacaatatgcataggagcaaagatcatcaggattcagaagaaacctaatccaaggattctaaggaatacaacagaacaatacaggagatgaaagataaaatggccattttaagaaagaaccaaactgatctgatagagctgatctgatacagctgataaattcactttaagaatttcataatacaattgtaagtattaacagtagaattaaccaagctgagaaaacagagcttgaagaccagttccccaaaataactcagtcagacaaaaataaagaaaaaagaagaaagaagaatgaacaaagcctttaagaaatatggaattgtgtaaagaggccaaatctgtaagtcactggcatccctcaaagagaggaagagaaagcaagcaacttcatatttgaggatatcacccaggaaaatttccccaaccttgctagagaggccaacatttaaactcagaaaatgtagacaacccttgtgagatactgtacaagatggccatccccaagacacacagtcttcatattctccaaggtcaaaatgaaaaaaaaaaaagttaatggcagctaaagggaaggggaaggtctcctacaaaaataactccatcaggctaacagcagaactttcagcagaaatcccacaagcctgaaattgggggcctatattcagcattctttaagaaaacaaatttcaaccaagaatttcatatccagccaaactaagcttcataagcaaagaagaaataaaatacttttcagataagcaaatggtaagggaatttgctaccatgagacctgccttacaaaaggtctgcaagggagtgctaaatatggaaagacaagatggttactggtcttcagtaactgctagatattgtacaagatgaccatccccaaaggtctatgtacacacataagtatatagaccattgacactataaagtgacaacacaataaagtctgcataataaccagctaacaacataatgacaggatcaaatctgcacatatcaactcggataaagaagcaagacccaactgtatgttgtcttcaagagaccatctcacatgctatggcacccacaggcttaaaataaaggaatggagaaaaatctagcaagcagaaagcaaacagaaaaacacaggggttgctattctaatttcagaaaaaaaaaaaaacagactttaaaccaacaaagatcaaaaaagacaaagaagggcattacttaatggtaaagggttcaatccaacaagaagatctagctatcctaaatatgtattcatccaacaccggagaactcagattcataaagcaagttcttagagatctagaaagagagttgggtaaccagataataatagtgggagctgtcaatgtcccactgacggtaggagatagatcaccaaggtagaaaactagcaaagagattcaggatctgaattcaatgcttgaccaaatggacctaacagatatctacagaactctccaccccaaaccaacagaatataaattcttaccatctgcacaaggcacacactttaaatcgactacacaatcatcggcaaattaagagataccaaccacgctcttggaccacagcacaataaaaatagaaatcaatactgagaaaattgcacaaaaccatacaattacatggaattaaatggaaattaaacaaccttttgtgtaaagtatgaaactaaggcagaaatcaagaaattctttgaaattaatgagaacaaagatacaacatatcaggatctctaaagcattgttaagatgaaagactatagcgctaaacagtcacatcaaaaagttagaaagatctcaaattaacaaccgaacatcacacctacactaactagagaaacaagagcaaaccaactccaaagctagtagaagacaagaaataaccaacatcagagctgaatggaaggaaattgagatgcaaaaaaccataagaaagatcaatgaatccaggagttggttttttgatacaagtaagactgacaagctgctagctaggctaataaagaaaaaaagagagaagatacaaataaacacaatcagaaatgacaaaggtgacattattaatgatcccatagaaataccaaaaaaaaaaaaaaaaaaaacaactctgactactatgaatacctctatgtacacaaactagaaaactaagtaggaattgataaattcctcaaaacatacaatgtccccagattgaaccaggaagaaattgaatccctgaacgtaccaataatgaatcctgaaattgaatcagtaatgaaaagcctacccaccagagaaaaaccaggaccagatggattcacagctgaattctaccagatgtataaagaagagttgatccattcctactgaaactattccaaaaaatttaggaggaggtactcctccctaactcattctatgaggccagcattatcctgataccaaaacctggcagagaaaaagagaaaactttaggcaatatccttgatcaatatagttgcaaaaatcctcaacaacgtattagcaagtcaaatccaggagcacatcaaaaaggtaatccaccacgatcaattaggcttatccctggaatgcaaggtttgttcaatatacgcaagtcaataaatgtgattcatcacataaacaaaactcaaaacaaaaaccacatgatcatctcaaagaggcagaaaaggctttcaataaaattcaacattgcttcatgttaaaaaccctcaacaaactaggcattgaaggaatatatacctcaaaataataacagccatctatgacaaacccattacactgaatgggcaaaaacttgaagcatttcccctgagagcaagaaaaagaaaaggatgcccactctcaccactcctatccaacacagttcttgaagtcctagccaaagcaatcaagaaaaagaaataaataaaaggcatacaaagaggaagacagcaagtcaaactatccttgttttcagataatatgattctatacctagaaaactccacagtttctacccaaaagctcctagatctgataaataacttcagccgagtttcaggatacaaaatcagtgtacaaaaatcagtagcatttctatacactaacaatgcctaagctgagagctaagtcaagaaaaagtctgaaatcacacaaagtatttttttcaccacaacagaattatattagaaatcaccaacaaaaagaaatgtaggaactctacctgctttctggttcagcaaaacatggcctacagtagccaggtgatgggaagctatccctctcctgggaggggaatacttgctttttgaggcagtcataatgttttcctcaccacttctcttttcccctccctaatcagtacctccctttctaccccctactcagtacctccctttctaccttcagttagaaattgcaaccccaagaaaatgggtggcaccttacctattgggataccttcaagttggttgatggtcagtgtcagaaactataaagatggagtattcattttcatgaccccaaacacataataggatagctatgatatacgcagatctaaatgtgatgctctagcaatactaagaaggcaggaaagtacagggcaggctcatttactgagttcagaaccttggtcaggtatcacacaaggcattttaatatctgattcctgtgaatcttcaccaaaactctatgaggtgtagacgtgattctcttatttaacacactagataactgaggctcagataggttaagtcaatcaccacccaaagccacatagggtgcatcaggcctgggatatatatccaccaaatttagatatacaggcacaggccttaaggcctacattagaaactttgctatcttttgttacaaagaatagagttgcagaaaactctgaatgtgaaaaagcacatagaacattgaattttcttagaagcttaaaagatgagttcttgtgatggttaatttttatgtgtcaacttggctggaccacagagcacagatatttggtcaaacattattctggatgtttctgtgaaggtgtttttgaacaagaataacatttaaattggtggacttcgagcacagcagattgccctccttcatgtaggtggccttcattcactcagttgaaggcctgaataaaacagaagactgaacctcccccaaagaagaggaaaccctgcagcagatggcctttggacttggacggcaacgttggctcttcccaggtcacaagcttgccagcctaccctgcagattttgggctttcataatcatgtgagccaattctttaaaataagcctctttctatatatacagacatcctgttggtagtatttctccggagaaccctaatactgtgcctaaatgctatttgaatggttttacttgactggagtatggaaatattctgtgataatattttaataaaatgggtagaaagagtgggggctggagcggggagcagtagtaggggaagatgggagtttattatcctcactctccgaatgagaaaaccagagctgagagagagactatgtgagtgatttcccttgggtgacaaagctgactgggggctaagcagggtgtagaacacaggcctcttggagcccgtttagtgtggaaagcagtggctgtgtcaggcatccactggggcactgcaagcggtatgcaggcaatggactcctgacccatccttaggtctggtcgttgctaagaggctgcggagaccctttcctgagacaaggagtaaggcaggctccttccagagggctgtgggtgtccactagctggggcctcctccccacctgtctaggggcagacaggaaaagagcactccagccaaagtagctcctcctccaacacccttcacaacccctttttcttcttgaaggatagccatctttcctaaatcctctcccttgcttggccaaatccgtgtaccttcctgaaagaacagtgggaagttggctctttatcatgactatgcactgcacactcggcacaggcccatttcttcctttttttcccaccagttctgccctggatccctgtcttgacttgatgcctggagttctaccaggcatcacttagcaatgcgccaagccactgggtttaaaacagcaggggacttgagagtttcaaacccgcagctcttggtcagtgaatgggatttttatgaggccgctggaatcagtcttgcatgcagggtgctaaaaatttttatggctggctgggattcgttggaagcgccaagctggaacgtgatggagttacccattagagaatgtccccaggaaagtgggcttgcatggttccctggtactcagaggtgtcagagagctggttttatggaaagcaatttccttagcaaagaaaaaatatgctccagagacagagcgatttcagcacaagggctctgccaccccgggtttaacgggcttccttagcaggcggtccctggtgattgcaaagacaaatgggtcctactcgttctggctgccagcaaacttttacttcccttctttagaaacatgtattttaaacatagaataataaaaatttagaaaaaaaggaaaatgaactgtagtgacatcattcacacaacactattaacattttgttatatatacacatatttttgacatagttttgacatagctatgatacagttttataccttttgcttaacattttatgataaacactttgaagccatgaaagcctctttgtaggactcattttaagtaactttataatattacattagcttggtatgccataaagtggtagtactattttccatactgtgggatatggagctggtttctgatttttttttgtgattataaataatgacatcatgaacatctggtaacataaagctttggtcctatttcgaatgagatccttggaatagatttctagaaacacaataatggggccaagggatggacatattttaaagtgtcctgttatatattgccaagttgctttccataaaggtgatcagttcacatttccatccaccctccatgagagtgtctatatcaccacgcccttgccaacactgaaatctttaatataaacatatcttctatgtaatttgctaagtaaaaaatgccatctcttagtgttttagtttgcatttttggattaatagcaaaggtgaacattttgctcatttgtgtatcatctgtctgcatttcttctgttctattggagtcttagtgctttcctgtttactatacaaagggctgtctgccatatttgttacaaaaatatttttaccaatttgttattcctggaaaacttttcaagcccaacccgaacactaacccttaccctaaccaagctggacacacgtgggtttttagttactcatgtttagttgtacaatgcttaccccaaggttatctcaggtcccagcttttggaggtttggtgtttaacctttggttaggtatgtggggtacacagactgggcccaaattcagcttcagacactcaagcaagtattttattgttcttatgagcctcaccccatgtgcccagaacctggggatgtggagatgagaaaggcacagaccctttatgagcttgcagcctacctggaaataaaacaagtacacctgcgactagagtccaaggaatggggtaataaatgccatttgtgaggggtttggcccaacacctgagattcaggttctttaattctacagagcattatggacagtttttggatcctgggaccctgatttttaggccataggatcacttagtgttgttgagaggatcctagcaatcatttgctgaacatctccattttgcggatgaggaaactgaggctcagagagggcagggacttgaccaacgtcttggggaaagttagtggcagggctagtctggcatccaagcctcctgcttcccagtgtaagctttccccgaacacttcaatttctttatattccagtgatatggtttggctctgtgtccccacccaaatctcaccttgaattgtaatgatccccacatgtcatgggagggaccctgtgggaggtaattcagtcatgggggtgggtttttctcatgctgttcttgtgatagtgataagtctcatgagatctgacagttttatataggagagttcccctgcacatgccctcttgcctgctgccctgtaagacccgactttttcctcattcaccttcctccatgattgtgaggactccccagccatatggaactgtgagtcaattaaacctctttcctttataaattacccagttttgggtatgtctttattagcggtgtgagaacagactaatagacccagtctttcctgtccttctccttacctacctggctacctttacatgatacttttcatgtgccaagcactaggacatggaattaaaaatacggtttctgctgcaaaggaactcactgtttgcggggagaagggctgtgaagggggcagtgtaagtactctgaggaatacagagtaagtactttgggccactggggctcagaggagacttggggaggccagggaggccggaagtcttcactgggcttccattgctctgggggagttttccttagggtattagtctgttatcatgctgctaataaagacacacccaagactgggtaacttataaagaaaaagaggtttaatggactcacagttccacatggctggggaggcctcacaattatggtggaaagcaaggaggagcaagtcacatcttacatggatggtagcaggcaaagaagagctgtgcagggaaactcccccttattaaaccttcagatcttgtgagacttactatcacgggaacagcaggagaaagacctgcccccatgattcaattacctcccaccatgtccctccaacaacatgtgggaattcaagatgagatttgggtggggacacagccaaaccatgtcagggttctaggggacaggaaaccaagggaaggccagagcaaaggtcccagcagaaagcccctctttagcacctgtccacaatgtttaggagaaagaagacaggctttagagtcagactctgccccttactagctgtgggtcctggagcaagttactttattctctgggccttagttttctgatctttagaatgggccactgggttatatgtgagaaataaacaaaacacatagtagaatgtttgatgtgtagtaggtgtgttcccttctctagtcatccttattaagccctgttagaatattttctttttgaaacctaccctgaatgtatgctttagaaaaggaaaaacaaaaaaccttccgtgaatccagaacagatgggcccacgcatgggctctgccccaccctcccaagagggtgctcgctcagctttctgcttgctcccttattggctgggcactgttctgattctagctcccttttaagttgatgtctgggcctctgagttattctctgagtcagaatcacagcagggactgtgtcctttcaggtatctgcatttttccaaggctcttacatgggaattttggagtcccagttcccagacctgtcttggccttggtcctgtttctgggtgcgttttctagttgcctgcccaagactctcctaagcgagtattgccttgcttctgtaagaccctcttccaagactgacctccctgaggttcttggcttagatgcccaggttcctgagtgtgggatgtggggccagatcctctgcctacactcttcctcctctccaggaactggctgctggttggaaccccaacaggggtctgcacccccgctggcttggcagcccctatccagcttcatggagttggcttatgcctgctgccatcttttccccactgccccacctgctgggagaaacttatggcctgaaataatgtaatttagaggaatattacaactggaatcactagcacagtcatcaagcataaagaagagtgtgaaatttcctcattaggggagcctgcccatctcttcttacttttcaaaaatccaatgactctgtcattctgattcagactaaataccgatacagttccttctcagttcctttctttagatgaaacccccttttccctggatgtagcccccagcctatttcccacctccacgcatctttatgtaaaagttggtgggcagcagccaagtggcctgctagaacccttgggacaaactgcaatccacgttgccagccctgggaggatcaaggaggaacaaatgcccaaagcacatgtctccagaaaaatgagaccggctcctctgtcctgggggacgcaaagttgaatttgatcagcacaatttccagatatttgagttagaaagactcagaaaagtcaccatgagagtggcctctatttttaagccgtgtgtatttggcttttccccgacggcctcatgtctgcaattagattcttcgccttgtggtagggcaaggttttccaaagccaaggtcctgaagaaaacaggaggttgccagaccatcctatctgctcttaggatcttgcctggaaaagcttgaaagatgggaagatgggtgttggtgcttactgagtacctaccatgtgccaggcagttccctcatttgatctttgtaataaccctgagcccaggagagtacccttgtttccaaaggagaaaattgaggcagttttctcactgtctgacacaaagtgggtgcttaataaatgctcaatctgaacttatctccaagttcttgagaaatgataaagttttctgaaaacatgaaggattataattcttattatcaaggtagtttgctgtgctgaacgagatataggaggaggtacaggatgatgtttactgagtttacagcatattcaccaggggtaggtgctcactggccaccacaggtatgctcttccctccagacactgacctggggctgaaagtggctgctcagcgaggacgacctttcccagctcccctggcagctccatggcaccagtgcactccatctcacagaactaccagaaggtgtgattgttctcatccaagatggctaaaaagtagccttcacccttgatccctcttttgcagatgacactgaggctccaggggatggaagaccaaagagaggagtccaggtttttcagtgatccccaacataaagaaatgtctgctatcaggaacactacaccagactgatacacgaacaagatttatgcagtccttggaaatggctttcctactaataactggcattatcctaatatactcaatgtggctgatattatggtgcctctttcagacattcgggaaatggcaacattcagggggcacgagagctggttaagtgcttcctggtatttcctgacttagatccttcaccaacaccagccaccagactatcctccacccatttccacctcccgcattccttgcaacgtcttctcaggctcttccttgttaatatcttacctatctttccagataccctccaatttgccccctctgggaagctctgtgtgcccctctcccaggcagaattaatccccttaagtctttctatgctgcttatcagacttgtcctgttgttatattttgaagctccttcccccaacccccttcactgtgttctctgggcaggcaccaggcccactgcctttccatctgcctcatgggtgcaggcctggcgcagcccagcagcccaatcatggggtggggaagtgactggaatctcacacttcctctggagcgccaacagggagggactggtagagctcctggaaggctggatgaacaagattccaaggccaaatcaggctcatgggaaagatggttatgatcacccaagggtgcaggagaaagcagcagctccttgcctgccatgagtcagccattccagatccaacacatactaaaattacagaccaggaagtcctagaggaagtataacaactcctctgctgggcaccctccaaaggctcttcaactgcatcccagccagagcccaggcccccgcagtggccctcaaggccctcagagatccagctgagtcacttttctaaccactctttaaaattgcaccctccctccctgctcactccccatcttatattcccgatttgcccctcttcttacttaattttttctctatagtcactttttgactacctaacaaagtctatgacattcttattgatttgttttctctgggcaggaactcttgttatctgtatcctcagagcccggcacagtctgtggcacacagtaggcagtccacaaatattcattaaaagaatagataacaaaagaagtgagtgagcctgggactcatgtcctgtgccatttcgactataacaaaaagctgcccttttcctcagcatctaacttagatgttgtcatcatgatgcttgagccaagagaaccttaggaaccatggcccaggcacagccagttccctcttcctccccacacctccctggtgatagagaggaagcctctttcttaatgctaatgctggcacaggggtaggagaggccaccggaactttggaatccatttatctattaatttattatctaattaaggctcacaatgacagtgctatttgttccaaaatgccctcagacgaaaccaatacagcatatgcacattctaatcaattaaaatggttctccttaatgtctgccttcagcagccagtaactgttgcactcctgggtccagagcacaaaatacctttgcacttcattaggccccaaatggtcttcatgcacagaggccaccagggctcttctgcttagagaggaggcagctgttccaggatcctgggtgatgcatgaacaggattcttttcagggagaactgcctttcacttgccgtttgcaaatcaagttataaccacagagaaagccggttctgggagacaagaagatgggcaaaagtgggcaagagtgccttaatctaccacacctgtagccttggccaggggcggtgacttttataaccaggaaggctaagtgaagtggatttgcagataggtctccatgggattaatgctctcctgcctggacatgcctctgcccctgcactaacttcattgtttcactctacacagttgtaaagtgttcctaagaatttgggagcccctttaggatccactcatccctgtatctccaggccctggcagaggggcacaggaagtgttagttgaactaaactgaaacataaatatctcattaggccattgggaaaaaaagtctctgtaagaagtgcagcacagtaatgatgctagtgatcactaaggacttactgcctgccaggccctgtgtgttaacacatggaatcctcacaacaaccatagaaggtgggcattgctttttatcaactcattgtagggatgaagaattgaatcagagctgggattggaacccaggcagtctggctccaagttcatggtctaagccactgcaatctcaaacacctttgctgcactgagtgacgcaggaattattctccaatgatgctctactgcctccttaggtacgaggaatgctagaggccacctctttccatttcatactgtggatcactaacctatagagaaaaactacactgctgatttcatgagaaaaaaagtcatttagtgtgtgtgtgtgtgtgtgtgtgtgtgtgtgtatgtattctaagaaacatttttattgttcaactctcccacagtgcaaaacctattcaattaaaacaacaggtaataaaaattatattgcagctttctagtaaagcctattacatggaagaaccagagaaaggcgaaaaactaattccacagtacttgagagtctgctgcactatgtgtctggcactacgcttactgctggaggtaccacaatgcatgaaaaagacatggtttctgctctgatggagcttctagtttggtgaagagatagacaataaacacaaacaaaacaaccaaaaaggaatggtcataagtgctctgtcaggtataaataagtaggacgccttgagagaggataccaaggcatgaattctgataaggtggtcagaaaaggcccctcaggagagtgagttagattggacctaaagatgtcaaaagtgggtggaagagcattccaggaaggggaagagcatatgtgtaaaagccaaaggcaagggcgagcctgatgagaccaaggtactgagagtgtggctggggcatggtgagtagaagggtaggaagtgagctagagtggatcccagacaagggagtattgtaggcatggtcaaagctctggattttattttaggaataaaaagaaggttttaagtggaacacaatgatgctctcaaagatctattgtatagggggcaagagtggcaacaaggagaaatgtaaactgggtatcccagcagctcagaggggagatgctggggacttgacttaaggttatgagtagagagaaaagtgaacctgggagacatttttggaggtggaaccaacaggacttgttggtgatttagacacagaagatgaagaaaaggcgagaatcaaagatgacactagtttctaacttgggcgagtgggtagatcactccatttactgagatggggaagactttggaaagataatggatttggggtcatgattatgagttttgttttagttatgttacgtttgagaggctacactttcaagcagagatatcaacaaatggttggaaacagaagtttataatttggaggaggagtctaggctaaagatacacattcggttgatatttaaagcatggaaacgagattatcttgaaagtcaaggtggaaactcttaaataacataacaggtaataaaagaaacagcattcatcatgcccaagaaaaactacccaaatgaaagttcatagttaatagcatgtgtgtgaggaagtctttgggggaagcattcagctttcagtcccattatttggttcatcaaaagaccccaaagagattgagaggggaggtgagactgtggtcttgttaagagcatggtttggagttagacaaaccttggtttgaatcctttcaacacttacttgctgggtgactttttgtatgttactttacctctctgaccttgagatgcctcatctgtaaaggagggactataagacctatctcccagagttgtcatgaggctcaatgtgatgtttatagatacatagcatggttcctggcacagagtcaatttccagtggaactataattatcattaagtgggctgcattgaggtcaggtgacgagaatgatggaggagatcaatttttttctgctgtgagcagagcagcccacctttggtgggtcaattggccagctctgggcctcacacattcagaaagttgcaaacaggatcagtttagacatcacactctgtgaggaatggctgaaggaatagtctagataaaagaggcggaggctggaggaagtggggtaggtgggagtttagtctctgcttttacatttctgcagggcttttccagggaagaaatggccttgttccaaaggtggtgagaagagtgggtggctactgtcctggataccaggaagcaagttctgatgcagggcacagaagacctgtttagtatgcaacctctgaattttaaaaaagggaaaaaggcaaaaatatagacttctatttgcagaaagaaaccctgagaggatacacaaaaaaacaaaaagtggttatctatgggaaggggataagggatgttgggaatggtggggggagaagtggaactaatactttgtaactacatagcactttatgttgtttaacttttaagccaagtgagcatattacacattcaagatattaaattaaaaatataattgaggcaaacctgcaagcaagcaggcagaaggcaggcaggaaggaaagtacattctgagtctgtgctcttgaaatgcggcacaggctgcttagggagcaggtccagcctcatgggcacaggccctgtgtacagggctcaggctcagaagggcctcatccttgattctaatgctctactgtcactgtcttgaaattcttaagtctttgaatgtggagtcctgcattttcattttacactgggttccacaaatgatgttaacaggtcctgctggagaggaaaggtggtcctcccacttggggatgtaagctggggctggaaaaccatttggctgcctgctgtgggatagtctcaagctggggaggagggctgggggatgagggctgggggatgaagccacttctccatctgaaataaaatcttgttgcccaactgaatgcaaggacctcttaatcctagatgtttgttaccctggaaccctgaggctgggatgaccacatgttccagttggcccaggatgatactggtttgtgcctgttcttccagtgtaattattagcagcgatcccattcattctgagccatgtcctggtttgaacaacatattatctggctaccctaacctgaggttctcttgccagcagctggctccttggtctgataggccaggggtaatctcatttctctgggctgcttaaggatcaaggttgcttcctggctcctgtccactatctccagaacctccactctcacacacatgcacacacacacacacatccccccacacacatccctaccccacatgcctggcctagctcaccagtaagctgattatttataatgtggcagaagatagttttaagataaagaaatggaacttgggcctgattgaaacaatgtgtgcttatctctgtctcggtaggaaagagtggtcagagagagattactcagaagaggtttacttacttcccggagacctctcccccacgcttattttcagaatgggtttaatatgtgcattgtgatttgagccaggcagggagggagaaatggaagtgattcactctggccatgctgatctacatgttattcactgacatttttttagccagacttttaaatgagcagtcttagaatgatagggctggcaaagattattaagattattttagagatgagctagtacaacttattcatttcacagaggggaaagctgaggaccagagaggagaggaggcttgctccacagtcttacagcttggagccttggctcccagcccctccacccaccctccatctcttgggtttcttctgggggactccctattccatggtagtggtttgaatgtccactcatggggaagcgaagcaaagactctacaaaaaatacccagaggcacttctggacaactaacttctcctccacacttccatgcctctgtgaaagccactccttcacatgaaatgacattgcctgtttgtactgaagacagttaattcctccagggcctggacctattactagtttcctggagcctggaccagatctaggtagaggacggcagcaaggcagaagaaaagatggaagttagtgcagcagcatggtcactaacctgagcatcccactagaccttcattctcttacttctttgggaatgggggaaggaaaaatggctacagtggaggtcacagagtagaagagcccatcctctccaaagcccaactcttctacctctataaccacccagggtgccatttcccctcaactagccataatagctgactctgctgaaaaggcagaatcattgtccctatctttcaggtttctatttgaatgtcatatcttccagaaagccctctaaaagctagttcttcctttactttgctctctaagtacttttcccacattctaatttattatttcagtgaatatttattcatcacccactatgcactgtgttctataccatgtacaggctctgtgctagaagttgaggctacaaaggcaaataagatgccatcattatcttcaagtttgcagtcttgtgagaggggggttgaggaagtggagacacagacactatgacattagacagtgaaattagaaggcagcattgggagttaagggaacatcccctccaagcaagattcctaggagaaacaagacttgaattgcatcttgaaaggtaagcctggagcctgggggtggggaataaaggtgaaagtgaaagacaggtgccaaggccttcaggcacctgagtacctggtattctgttgctattacttttctcaatatcccaccaccctgccagcctgttagctttgtggagactgccacggctcattcattttcttatccccacaatcccttgccctttcccaaaactcatcacttctttgttaaatagaacagatcaacaatggctctcgctcagggtaaaacaaagcttcttgtcttctggcacagatgatgttagtgtgtgttactgatccagagaaatcaagagagcccccttgctggagagcagggcagctgggaccagccttagccatcaattaacactactgcaagatcaacaccgaacactaattttgcagacacaaaaagcactattagaaatttatttccaaatgttgagctcatgtcgctaattctgttttaatattaactatctcatttggcaattctatttcaataatgaaaaggttatctctactgtaagataaataatgaggaagactcactggctttgacttgatcattcaaatttatgtgtcattggagctgtattctctattatgacccaacaaactgattaaatatcagccaagcatgaacaatagcttgcagctctaattcctccttcccatcccacctctgaaagcctttaaaccctggaatgtaaatgcaattttttttttcctggcattaaaaaaaacatgaaaaaattgtatttttgactctgttgtctactgttgctgacaatgttcaaaccacttgggccttatttcttgtctgagatcagtgatctatggggaaaggtgtttcctagttgggcaaaggaatcatggggtcagaggcttcttcctcttcccctgaactgctcagttcaattcaaccaacatcgctgagcacctactctatgtcaagcccagacctagacctaaggccctaaagagaattccatagggaaagaaaaacaactgttgctgaacacatgccttactctttggagtccccacagtaccctctgcagctgcacacctaatagaatgcacagtgttgaaatgccctttcctgagtgcttcagggatagaggatgtgccttattcatctttgcatccctgctgggccagctcagagcctagcatacaatagacactcaacaaatgtttggtggattttaacgaattgcctgaaattttatataccttactgagtcctcacagccaaccagaaagtgactctttattctacccagccctcatcacaactaaacttgagggtttctaagtctcttctcaagaatataagcatctgaaagcaggagccatttaccattcattcacgggttctcaggaaacttttgttggatgaatggccatgtctttttcagtggttcctcttctatctaggactagtttcctactgtttgggttccctcaggagctaaccctaaaaaaaggattcaaatgcaagtagcatctgagagtaaactacttataggcaaaggagtggggatgtgagatagggaagggaaggcccctaagaatgggtgtgttgcagaattgtgccatcagatggtgggcgggggagctggggtatttatatgcctgcccatcagttatttgttgggggctgcttccagggggtgttcataccttttcacttctgatctgctccatgtatgggcaaagctgcctttagaggccagaaagagcttcaggagaagaaagtagacttggaagttgggctggctgtactgaaatggtcatagggtataaatggggtgcccactgccacagctgcaggtgagtaattgtgatcacatgatgatgtgggatgcctccagaacattcaaagggaaagtgagacactcataggtctggaggttagataagaggacatcagagattccttacagtactaacattctagaatgccatgacttcagcatactggcttttaaagtacaaatcaccttcagaagaaaatccctttgtctttgggttgagcaagtaaaagacccagggagaggtgtgtgtgtggcatgagggtggcagaggatacgcagacaatttggctcaatcgtgctgtctctagagaaaccaagggacattgatggtgagataacccatagtcatggagagatggatggcttaagtcctaacataagcgttagggaggtccaatcaccttgctggcctccaccaaataatctgatgctttaccgaccacctatttcacatcaggcactgtgtttcactcttcacatatatgaatttgtattatttaatcttcacagcaaccttggaagatgttataaagataccattttgcagatgatgaaactgaggttcagagaggcccaatagtcgacacaaaaccaaggtgggaatgtgaatctgtttttcattccgtgaccctgtggtgcccttctctacagctgttcatccacagaccttcaaaggatgtgccaccagtctcagctatgcagtaaacagtcccggcaaaggatctttgtgcagatttgtgattaaaggcaaacaagataatgagtcccaggaccaggggagagcagtccgcactctcatgcattcctcaattcacatggccctggaaacctttcagtgtggcagtggctgtggcaatcactctgccaactgcagaataaagggtcctgtctggaaatgcaattatttccaaataaaaggtttttaaaagacacacacgatagcatttttggttttcagaaactgatataccaaataaggacaaaaattaactttgtaaaaaatgaagatgatgaagacaatgaagagatggtgatgatgatgatggatgaagattgtggtgataagcatgatgaatatattgagaaggtgaagatgatgaagatgaagatggtgatgatgatggtagcagcaaccaccattttctgagcacataaatgtgccactcactatgttggctactctatagacattatctctaattattacaataaccctgtaagacaaagtttagcacctccatttaacacatgagaaactgaagctcagagaagtgaagtaacctgcctgaggtcacaaccttaggcatgaaaaaggattgacagagattactgcttgaattattactccaaatcctgtgcctctaaccactaacataaccacttcatttgtttactccttcatttatttaaaaaatttattcatctattgaatgaatgtttacttggtctcagatatacctatgatacctgctagaccttcctaatccccatttgtcaagaaaatgccaccaccctcacattagggataaatgaaaatgagggtgaattatattcaaatcaaggtttatcagcctggcgtggtggctcatgcctgtaatcccagcactttgggaggctgaggtgggaggatcacctgaggtcaggagttcaagaccagcctggccatcatggcaaaaccccgtctctactaaaaaaatacaaaaattagccgggcgcagtggtgtgcacctgtaatcccaactactcaggaggctgaggcaggagaatcgcttgaacctgggaggtggaggttgtggtgagccaagatcatgccactgcactccagcctgggtgacagagaaaggctctgtctcaaaaaaaaaaaaaaaatcatgatgactctttctacaactagtgtgaaaagagctatcaattatttttcagctcctataagctaatgacaattatctgcttcactgttaattaatgtggcagtaaaaagctacatagtaattggttgataaagagaagcgtgtgctctaggcagagggcccagtggaccagggtgggtggataccaggaagagctcctgaaggctcttagtgctgggccaatactggggaacaaacatggctggacagttgggcagtactcactacctggctattccctgatgtggcttgataggcaggggtgggcctcattctttggcatttactaagtgccactaccagatacgatggcacctaccacgaaagaaacattaagcattgctagaactatttcacagttcagagaagttaaataacttctttaaggtcattcagttagaaagtaggggaattaagattcaacctgatctatgaggtttgtaagttttcccttagagttgccataaatagagatatccttcccatcccctgtgtagtgggaaggacgaagacaatgaacgacttggagaaagtttggaaaaggtctggtggccagggtacctggcccagttccaccactgacttagaatgtccacctgcctgtaacacctctgttggctgtgcctcaggatctttacctagaatgaaaagtgattggcctgtggtctgtctcagttccattccagcctccctagacttccaagaccctggtttacagtttgctcaactattctttaacacatctgatcatgagaactactctagcagagagggggggcagcatgggttgtttatgtactttacatggaaggacttatgatattctaaagctattcacatccaagaaaacacatctctggagtaagcatgtaactcaatggaaaagtcagatttaatatatagaaaattggtttacaccataaaatcagatatatggccttgtactctctcattccctgcctagatcatctgtgtacatttttttctcctcaataagaaggtgagtggattgagagtattgcttcttttgcatcctccatagactctagcatacccctgggcatggaaagggattgacacacattgttgcttgaattattacaaagagtaatgtttcagctcgtgtgtatggtgcctttatgtattactgcagagttcaccttgagcaatactgagaatactatcctcattttctacagaaggaaatgagggctcagaggagccaaacagtttggccaagggccacacaccagaaagcaatgggtctaggcctcttgattcttacccggggctcttgtcaccagcatcttagagagagaccaattcctccctcagaagaagggggaagatgttaggatatgcctctcttgaagacagcaacatcccttgaaaaacctgccggaggcagcattttgagaattggcatgctcctttgggaacccctggaggatgccaggggaggaaggaaagggatggggagactcttccagttcaaagaacccccacttcttgccataagatttggctaagtacccctctgtctctcacactagcctgagaattccctgagacagggtaggggtcatattcatgtctatttcccctacccctatcacatccaggaagacttggcataacactggaatgaatgaatgaatgaatgaatgaatgaatgaatgagtgattcagtctgccagaaggggacatctagaggctttcacataggtgtggcctaacaggccctaaggacggttctgcgctttttaataataattaataataatagacatccccctagctccgtgaagttttgtaaacacttctgtaggacaaggattatcatctcagtttgggagatttgcccaaggccatggagacagcataagtagctatcatttaatgagcttcctggtaatagctcatttagcctttggcaaggatagatactctgtggtaggtattattattatctctattctctggatgaggaaactgaggttgcagaaagtagcctgtgtaaggtcccatgggcagtcattttatgtaaagccaaaaggatctggctccccagtgtgggcatttgctctttacggctaatctgcctgaatcaacattcctgaagcttggagtgggatgtcctaatgaggtgctgtcaggctgacaactctctgctgaatggaggctaattgggaattttacaggaacaacaggaacaaacccgatctctctcgattacaatgaatgtgaatctgtgtgtgtgctacggggctggctccgggacacatgcactctgcttgtgagtgtatgtgggggagtgttgtgtatgcatgtctacttgtcttccctgaggaaaaaaatacaacagacccatccagttctcttttcttaaatatttctagatgctgtaagccttcgattctctgtgctccaacgagggcaacgatgtcagtgatcacagcatgtgtgagcaggattcagggcagtgcctggccaggtgtgaacacgagggcaaatgtcccagttctgaaaggaattacaggtggtacagtcgattttgttatgtataacattcattaagggtattctaccagtcctacatgaccctgggtgtgaggccagaaatagttaaaaatgtaacagtgattacagtaaaaccaacttgaaagggttgttcaaccaggcactgttatctcagggagaaacaaaagcaaacgtgtgcagatggaattcaaggcagagctctttctgacagtgatcaggtagcagggaactaacaattgcccaaggaagcgagtggaaggaaggcttaacaagagcgccatggacacagtgcataggactattttctaccaaaggcatctggtaggaaaaggaattgagcagggaggacatcttccagcccttcaaagtcaaactttggagagatcagacgtcctagaacctaatcagtggtgttagaagtagtacttttagtgcttttttgaatatctactttgggtcaggcactgttgggtcctttctatgaattacttcagctacttctcacagcaaccaagaaagggtattattagtccagcttcgcagagaagggattcaatcactccttgttaggttgaatgaagtactgggtggtctgatccccaaaccttacagagtggcttccttcacaaaatgaattaatcaagatgatcacgcagcagaaaagccagcttcttggactctggtaaaagggcaaaacaaataaatttcctgggatccttccatccaaacaaccctgtgcaaagctggccactctatatagattctaacagagagagagagagagttcatgtgagtaagtgagtgggctagggaggcagtgagatctgtgaatcagtatcctgggtgttctaatacttcctactgagttcctacacactcccatgtgtaatttaaggggttaagtgctgagcgtggaggcagagaagaagtaaatgtgggttgaacaagagacttaaacttggaattatccagacttaaaagttctaaaaaggaatgctgtaaaatttaggggaagaggatagggcagaaaatgcttctaacagtaggtttgtggtttgtggcttcccttctgaaaccacagagggctagcacttcaacccaaattagagcccaaagattcacgcagtcaccaagtttctgacctggtagagtcttagagatcctaagtcctgattcccatctatatttctaaatgaggctgaaattggggaatgtggactttccctggatcacacaactcttctgtggcagagccaggataagatgctctttgagtcaaagtctagtagtttttggctgagagcgatgtaggttaggtggccacagggcctagaccctagcagaccatcctttgtcactgtgccagaaactggcattctcagctgcatccttagtttcctgccttcccaaaagctctgagcagctgagatttgtgcattggtgcaaatgattttttcctttgctcagtcttgttcaacacagtcacctcctctcgaatccatatctctcatttccttggacatttcttctctggccttctgtgaacaccagccagcttagggctttccataggagacatatttcattcaggcattccctgaaaagtgttcaccagagacctgtcaagactccacaatagctagacctatctgttcagctggtgcctgttgggctacaggcatgtgttagattcttaacaccgactgagcctcaattcagccccctaacacgcttgcaatgtaggtactatgaagcccattttacaggttaggaaactgaagctcagttgggttcactcacaggaaggtcataaagctagcacatggaagaacctcaaataaaccctgagaagccatagattgtagtggttaaaggtctgttaggccagacagtatggatttgaaacccaactctgccactgtgtgactatgtgacccttggcaagttgcttaagtttcctgtacctcagtttcctcacttgtgaagtggggataagtaacagagcagttgtaaagatttagggagaagataaatataaagcactgaaaacactgtaagagcccaataaatatgagttgccattattattatattatctcaagactatgtattttccactgtttaatgctgctcaaacccatctgaagtatgcttgtcctaggtcagcttccctgggaaataaactctgaaatggagatttgctggcaggaggcttcttgctctcatgagcaacccctgtaagggagggagaaaagcagaactgggcagagggagaacttgagctacaatgcggctgcaacacaggcctcagccaatcttttcaagagctctggagctgggctggcctttcagagttgtctcaaattgggtcaagaaggttgggtctttgtaatcctcactcctactcccacctttcacatggaggactcactggtgacaagctgcctccagggatgggtcttaaccttgggctgggcaaggcagctcctttcaggggaagacaattctcagagaatgaagtagctgtgggctgtgaactgctggtcttgggtagaatctgggtgatacaccacagcatccactataatcctgaatagcagaagggtaggtattacccgctctccaaggcaaggttggtgttagtatagttgcaaagatattgtgtggggcactagttaacatgcaattttttgagttcaattttagaagtattgttagtcataatctctgggtagaaggctcaggactctgagtttaacaagcacactaagtggtatgtgtacaccattaagattgagaaccagtgccctaaagagtcttgagaaattggccataagtggtcatttcaataaattctcatcttaagaatttactcacattttgcatcctttcaaaatatattttttaatacaaaaatatttttcccctcgcatcttcagaaatacaggccatcgttacctctctgtcaatctctgcacaggccagagaatactctcatcgcagtttgagaaggctggctgcctctttttgactatctttactatctgctggggatgcaaacaaagtaagatccagcctctgctcttaaggagctcaaagtctagcggagagctaatacacaaggcatcttccagaactgcaatctttcccctggcctcctccgcctgctagattcacctgctttcaaatttgttttctgggagccgaataaccaatgctcttatggagttagcaaatttgtttttcccaggactgccacctccccaccctcaatcaatttctttgtgtctgagggcagtgtatggctggtttagtttctcctgtgtccatgttctctactttctgaatcattaaatcattctcgtccaaatacagcaatctatttcatcttagaagcttggctgtcttggaaacccaagagcccctgggggagtggaaggcccaagagaactgagtgatttagaactcctcaaaaccaggcctcaacatttctcagtctcattcccagaggggccttcgcagttggaatcttaattcagaaagtgccttccaagttggaaggcaaaagaaacacggggagggcataaaacgggacaagagtgacttggtatttgtgacaagtagctttctctatccaggtgggctcttctccaggaagccctattaataacatattcacttcggtaacagcttttattttgagaaatccccgggtcctttatggggagaaatcatatcacctgacaatgaacttgatctgctgaacagggtaagttaacagctgttaaacagctgcattgctctagcccagggaaagggaggtttagggccttgaaaggatctagggaaaggtaataggcagaaccccacccagttcaatgggaggcaatcggaatccgccctggattaaaagcaagattcctgtctacttttcattcggcaatcaggcatgtaatcagaggaagagactaggaagctgagaggaacttggggccagagctggtgttgactgagcttttcatgtaccaggtactgtgctaagccacttacatggattatttgattcctcacactgatgggaggatgtagctttgatattatcctcatatatataaagggaaattgagcctcgaagaagtgaagggaccagctcaggtttacctggtgggtaaggggagcccaggttgggttcccaagtcctcacttgaaatcaggaagtttcagaagccctctctcactgccttggctgagatgctaggttgggagccaccctagcttgattctatgggaaggctgtgctgctatcaaaaagctagagtcatttcggctggacataccaccaatgaaactcggcagcaggcagggaggagagacagctccccactggatatctggcagcctgtccttctcagggtgtcagtcctctccaattttagaaatttcctcgagctgcatgccaagcagagtgaagccgtgtgctgctcaggcaggactcttggtggatgatttatgggccccgtatccttccacaatccccaggaaggagtgatccttcttacttactgcccagcccagccgactcctgtcaaacagcctcggcagacctccttaaacgacagtaattctcctaccaggaggaagccagggtgacagatttctgaccaagatccagcgcccctgagaagcctctcagcaggcccccgccaaggccctgctggatatagatggggcgtaggatggaaagcaccagagagacccaggagacagaggcaaaaagaggagcgagacagagagaaagtggggggaaggcagagaaggacagagaaaggagacacgaaggtggataaagggacatatatgtgggtgatcgattatttgacgaaagcctgtccctcccactgcattgtagggaccacgtcttgttttgcttaatcttgtatccgtagcacccagcacagtgcctgacatggaggaggggctcagaagtacttagcaaatgatgtcacagataaagagatgtaaggatacagacagcacaaatcctggcacattagaggagctcagcaaaggctcgctgactgacaaaatgcctacatacagataatgtatttggggcaggggagatacccaattttcaggacaggagcccaagtagattcaatagggaaaagaagtaatgagagatgaaggctcataggcaacagctgcacccaacagatggtccaggctagggtctgaacctgggaatttaaagccagggtggggagtcagcagggaaaggagctttctcataggcaccaggaagccagaagcacaccttcaacctcaggatcagagaaggagaagggcaatcagtggtagggtagagagctcaccgctgctgtctcagaatccagcaccgatccaggcatgcaacaggcatgcagcagaagtttgcttaattagtgaatgagtacagaattgtgggataagaaggtcaaggtgaggggtttaggactgtacctgtggaaggacagtgggacttgtgaggcgggcacagaggcttaaaggggcatgctgggttggacatgccctcccttaagacttggtgcctctgggcaaacgtgagtgaacgttgcttctactttcatgctagggcattggttcttaacatgagcaattttgctatccagggggtcatagagcaatgtttggagacattttggactgccacaacttggggaaagggttactggcatctaatgggccagagccagggatgccactaaacatcctacaatgcacaagacagactccacaacaaagcgttgtctggctccaaatgtgagggttgaaaagcccttttctgtagcctatgggagtaccactgctcccttgatcctgaatctcaggcctcacttagatgtattttagtcaccataattaagattactaccatcagtaaagatttattgagtactgacacatataagcagataactaccatcttgtacttttgttccttaaaactgatgacaggggtttgggattcagagaaggccaatgggaacacaatccattgtacagtccagctggagatgtgagatcacagcagtaatcaccctgaggcggggggcaccaggccggggacttccctttagccttctggaatttgtaaccctggatgtagacctcgaagggtccataggagcctcttgtccccctgctttatcttacaggtgaagcagctgaagtctgagaagaaaatggctgtccagggtcacagggcaagtacaggcctggaagcacagatctccggactgccagcctagtgctttttctatgagaaagagcctctggtgatataagtttctaaaaggcgcctcctgcagtgagaagtgtgtgataggcatgaatgacgtgaaagcctttcaaatgtccaggtaatcaggcgccgttccccttagactgaccactgcttagggagccagagcctactagaaggttctggtgggagtctgtggctcattcaccttcaacagaaagataattgcttgaagatactgtatttaagcattcatgggggatccccctaagatccaaagaacaacatgactttaaaagagttagaatacttctcccctaatgtcccaaggaaaggcgatactaataaatgaaaagatgagcaccacaaatagggactgatatttttttccccattcctcaggcccctgagaattattttcacgacaaaaagttgttattcacttgtccagggagaacatgctggtgactggcttatttggagtggaaattaaagaccacaggctcagccagagaagtggggtcatctaacaagtcacagagcagtaaaattccctctgctcctcaacctccctccacctggagactgttcctgcagcatctaccctctaaggcatttttatccccactcctcagggaagaactaaatctgtaccacttgatgacctactagatatctatgcaaagaccccaatatgtaatgaatttgtttattgggtcacccttcttctcctctagactgcgagatccatccctagtgcttggcacagggacagccatacagcaggtgcccaataagtatttgttgatttgtcaaaaccaggttcctggaggtcaagttcctaggggaaaatgtgcacaccagaggagaaatggggtatgtgtgctgggaaggaagaattaagttctgttttcctgtcctgcttgtacccaagaaggaaggatactaatatttcctgatctcctactctgcacaaggcacttacactcacagggttagtcctcccaacaatgcggtgaacaaagtattatggtccctggttcactgataatgaaatggctactagagagctgggattacatggtgccaaagcacaagttttcctggtccatccaccaagctgtgtcttgcaccataaacagtctctttccagtgggtcaataaaacctgatgatgcctacttggacaggtgggaatttgtcccataagagcttcagtccatggatgttctcatatttaacatggacactagtaaaagtagctggttttgctatcagagcactagaaatctattttctaagcaaatataaataaataaatagacttgatttgatttgtgaacttaaaatttatgaagtgatttatttggagggtcctaaaaagatacaaataaactacattttgctaagcacttaatgaactgactttcgtgtttaaattccctgaaatcagctctatttcaaaaaatctagggcttaccacaatcattaatcataggaggcatttagcgtaatggaaacaatacaggatggagcgtgaaaagagcagggttgggtcaccatgctgccttttaggagctgattctcagtttccttatctgtaaaatgggagtaataacatgcagctcactcaggtctattttgaggacatggaggtgaaagcatttttgcaaactgcagagcgacatacaagcatttttacagttgtagaaatttcagcattttatgcccacttatgaaggctcaatttcaaagaagctttcatcatgtatatggaaaaagttaaaaactaccaccctgaagtgtgtacagtggttggaccacttctgcatgtcagtttctgagttcactgtctttcctttcccactgcatgctggggctgagagggccttgtaatttgtagcatccttaactagtgtaaccacaaatgctattctgctgccttatgaaggcgcaatccttattaacctccagcactcagaggcacacgctggagatcctgctcttgttgtgaggataattacagacatttttagctttctaggaattttttttaaagaacaaaatgttctgaagaaatctgaaaccaccatgtagaaaatattgtggaagtttaattaaaaaaaatttttttttaaattaggtatctatggggcctaaaaagcatctcaaaactgtcttttggaacactctatctgtaagatgctaacgggtgctccatagaaagctgtctgtggtcagacgggcctggaaaatgcctggataacaaggtgagcacatggctgtgggactggcatacgtggaccatgatgatatgcacggacctctaagagcagacatggtgagcgaagggtctcaaacttacctggaaacctttattcctcaggacatctggggaactagttttcatagaactttcagaacctctgctcaaaactggctttcacactgtgctcaacaggatcccagaggctactggagggggtctgaggagctacagagggctggggctaaggtcccctcatcccttgcagagcacatcccctaaacacttgaaaaagtactgctctagaacatgcaaggacatgaggcctttgagttggcctaaaccttattgttaatcttcagaccataatattgcctctgctgttctgagccaagcagtgcagaggacagtcacaagatgaggtctgaatccgggttcactcctcccttaaccttgggcaagttccttgacctccccagcctctgctgctcggctgtgcaatggccatggtgctcatcttgcagaatccacaggggacacggctggcactcagcagaggctcaagaaataacaccccctgtatcccaaacattaccttgttgcttttattttttattttattttaaaattctcagctcaccatcagtgaagccatttgcaccctacagctctgtgtcactctgctgtgcctgtggtaacttatgtctcttcatcctgcctttgtcattcctccttaaaacagttttggtctatttttctcatcacacaagggatatacattccttgtagaagatttaaaaaaattcagacaagaaaaaaaaaaaagaaggaaaacaaagcaagacaaaatcgcccataattccaccacttggagctatcttgttaacacaaaaacatattccttttcaatttaagctcatctcagaaatgcctgtgaagcttcctgggtttattctatgctgtgttgttaaacttacatttacccaaatctcccattcttcttctttacttttatctttcctactttttggttcaaaaataattctagcatattcacatttgaattccaacaatacagaacaagctgaacacaaatataaatcctccttccctccttccacctcacccatcccactcatctcccaaggaaaccactgttaaatgttgtatttacagacattttcctatttattttcatattatagtcagtcttgatgcttaaaaacataaaagatgatcttagatctactgttttatttcccaagcctcttgaatcatctttttagtgtgtctggccttaaaactaaacctagtattttccctgagataactttcttcaaagtctagggcatcgctgctcgacttcaggatgtatgaggtgcttggagaacttgttaaaaagcagaatctgagtcagtggggtctggagtggggctgagattctgcatttctcatcagcttatgctgtaggttccctggagcactttgaggagcaaggctccaggacactcgtccacccaaggcaggcatccttctcctttgcttatataaactccacgatgagtgttgttcctgtgtatcgcaggcacctgcatcaccagctatctttgattggccagacttaagcccaatgcacaagtctccctcaagatttgggatagctggtggtatggggatccctggagttctggattcccaaataaaagggaactcggtgttcaggcatcttctgcatggggcaaacatccagaggagcagcagacatcatgaccagtgtaccacactcctgagagtgtggcatggtactggaccaaaagacagccaagggagcagtagtgaggggctttagccctaagtggggaaaaaagcccaaagaagcacagcaagatgcagacacccaagtttagccaaagtggtcaagtacttgttggcaactgagttgatgttgtaggtggagcctgagaagtggagatgggtgagtcagagaaagaatatacactcggccaggcgcagtggctcacgcctgtagtcccagcactttgggaggccaaggcaggaggatcacaaggtcaggagatcaagaccatcctggctaacgtggtgaaaccctgtctctactaaaaatacaaaaaattagctgggcatggtggcggtcacctgtattcccagctactcaggaggctgaggcaggagaatggcgtgaacctggaaggcagagcttgcagtgagcggagattgcattgtgccactgcactccagcctgggcaacagaacaagactccatctcaaaaaaaaaaaaaaaaaaaaaaaaaaaaaagaaaaaaaagaaaatacactcaagatgtattctgacaaaggacatctggggtgaggatgagggcaggtaggaaaggggcgattgtattacaacatcatccaggacaggagggacagcgtggagtggtgctatgcacatgggccagctgcctgctcctctaacctcaaatgtggtccctttaggaggctctcttgctgtcagctgctgcacctatgaggcagccctcaactacatggcaagtttcatccagcacagttcttaaaccacagccctttggcacttcatagtgaccctggccttgggttgaggtgctgggggcagagccttaggagttaatccgatggccagatttcttatgcatctggagggtctaatgagaatctccttctactgctatattccgagaatgaaagagccaggatttctgattggttagtgatcaaataatgagagcctagaaaacaaattccttacaattttcacagttaagcacatcatatttcatttggcttcatttttttaagctgttggttactagagcttaagtccatacactttgggagaaatccttccctaatcaaccaccatgtctcaaattttctttgctgatgtgtaagagacttttctccatgatttgtctattaataccttttctcccaaataactgaaacctgcccaagaaagccagtggacacttatttgcacagttttcattcaaatccatcaggatatccatagctaagaatgtaacggtcaagggaactaaatatatgtatttctaataaactttcatgaatttgacctgcatgagaatcatcataaagactccttccctaatcaaatcagaatcaagtactagaaaatgattcctattgtggaacagagagaagggcttgcactcagaaccaatgcttgacagtcagcctctgctctaagatgccttctttttatgaaacatctccagggaaagcataatagggacatttggccagaccatcctacccagaggtcctgcaaagtcaaagctggacaaaggaagccggagacaaccatcgcctgagacatctgttttgttcatcattgtattcccaatatccagcatagggcctgcctagagtaggtactgtacacatttcccttgcctgggtgaatgaatggatacatggatgagagaacaatcacctctaaatcaatatctccaggacctcttattcagctccaggtgtctggtaatcatgtctacttagatgcctcccaggtgcttcaaactcatcacatctgaaattctaactcatcaagtgccacctgctgtccctgcaaactcctcctctgggactctggaatttcaatgccatctttaactgtctgtacttctccttcttaccttcttcatctaccaaactcccagtacaaatgttaccttttccccaatgccttccttggccacatcttgcctgcccctcttcactggccttctttcttatttaaaaatagatttgagtttgaggtgatgactttgactttttgtgaacagggaagggaggctgagcaacacacaggcagttgagctctctctgaagggcagaaactcctttttttctcttccgtttcatttctctctgttgcttttctagctgcaataggacagaaccctatttgggggaaacagagaaagccaagacctctgggcactaactgcagaagttcaaatcctggcttgggaaaaaaccatcttaaaactatgcaagagtttaacttggcaggtaggttgcaagaagcctagcctcatagaagagaaagagccagggaagggaaagagctttcatactgatggttctgctttcaggtgtcacaatggaaaagtaaggtttgaaacttctgatgaagtccactgactgcccaaagaccaccaggattacatctagagtgataaataaatgtatttagcatgctgaagcaagggagaatgtaccccaggggggcctcaggcacttggtggtggtaggggcttgtgttggagcattctaaagagaatgcagaaagttctcttggaacttggggccccattcttccagcttaaatagctgttacctgctttttaagccctgtcccctttgcccaattttctagctaggtgaagaaacaacccttaagccctatccagagcaaaaatgattttgtgatttgcagcatctgtgcctggtgctctgctgagtcatgcccacttgccttacagcctcaaagggtttttggtgttgtggtgatggcaaagtgaatgccaccaacagaggacaaatcccagccccacacttgctgtacgtcagcacagctgtcagcctggctcacatttcaggatctttcaggaagctgtgagacgcagaaagaagccagttttaggctctgtgggcaagaagataccttttgacttataaactgcagatcctcagatgtggatgttgtcataggactgagtgtgttggtcctgcacatggtccccagtagaactcctctacagaaaagaacccttttatcagcagatgggcaggaacccctcagagggagaggtagacactcaagccttcacttaagacatctataataaggggagggagagcattaggacaaatacctaatacatgtggggcttaaaacctagatgatgggttgaaaggtgcagcaaatcaccatggcacgtgtatacctatgtaacaaacctgcacgttcagcacatgtatctcagaacttaaagtaaaataaaataaatcaacaaacaaacaaaatagtacctcctataaactgtgaaagaatgaaatgagatggaaacgtatctaaagcattcaacacagtgtcagacatgtactcagtgcttgctaatgctagcttatattattctgatgaatcatattagcaaatgaaaattcacctattcactgaatcttttggggaccactactatattctcggctaaataaaagaggcaaaatgattaaaaaaaaaaaaaagacttctataaaaagccaccagccagctagagcaaccagaacagaacctcttcgtgtctctattcccttttttctccctcctaaccctggaagtctttcctgaggactgagtgcagacccggtgcaaggatgttgggaagtaactttgtctctgagcttcagtttctttttttgtaacatgggagtcataacattgacctaaaagagttgtgtgcaattgaagagacaaagaatgcaaaacatagtctgtgaacctacaaaaggtgctcgctcagctcagtttcaaccactattcccctctccttcttcctcactgactgcctttgtccagcctccaggagcagccagcctccaggagcagccagcctccggcctcctgcctcctttctgtgccagcccagcaacctgagtcacactctggattcagtcccagtctgcttggctgaagtctggtgtttgctgcacttactattccaggcaccctgtgatttacttttctagtgagttaattgcaaaatccatatggagtggagagaaaacatcaacccaagcttgccatgaaaagcaggggaacagaggaagttttccatcttggccagcacagcctggagaggaggcaaagagggaggatgatgctgctgccccacttgccaagctcaaggcaagtcacatggtgttcaggcctctttactccccctttgtttattctctcatctaattagacaaaaatttaagttttagaaacccactgtgggtataaactataggtgatcaaatctcaatgtgcataagaagcacctgggaagtttatttaaaatgcagattcccaagcttctccctccagagtttcatccaataagtccaggcacaaccccagaacttgcatcctgcttgtgcccaatgcaggtaatccacagaccaagggttaagaaatgaaaatacaaagggaagggcagtgcagtaactcgggagttagaagaatttaagattggttcttggacaaatcatttgccattctcctcttttttttttttgagacagagtctcactctgtcaccttggctggcgtgcagtggcacaatcttagctcaatgcaacctccgcctcccgggttcaagtgattctcctgccttagcctcctgagtagctgggactacaggcatctgccactgcacctggctaatttttgtatttttagtagagatggggtttcgctatgttggccaggctggtcttgaattcctgacctcagatgatccgccagcctcagccttccaaagtgctgggattataggcatgagccatcatgcccggcctcatttgtctcttgaagccccagatttcttatctctatagcaggaatgagaatacctacctcacaggaccattgagagaataacagatattgaaatcccttaacacaactcttggcacattggaggcactcaaaaaaaaaaaaaatcgaagaaacaatttacttttctttcctggagaagattctttttaaaactggcccaaggcatctttgctcatgaatgtgaatacatttttgtatctgtttacaatttacaacatccaaagagtggcctttggggaagcaggctcttgttttgaaatcactttgaagatgaaaaggtgtcaaatcctccagtcttggttggtggaagttaaaacaaatatttaatttggtgagttataatttattaaagccttttggaaaatgaaagtactatttatgttgtcacaagggacccaacagttttgaatagtttgtagttaattcactcattttgtttaagaaacatttactgaacacctgggtgccagccctcgcagggctcagggtctgaacaatgatagtaacttggttctgaccacaacgggggctacagaagcccagggagcagtgacttcccttagccggagggtctgggccttaggaaggtgatcagcaggaaatgactccattttgaaagcacccagatttatacacaatagacctggtaccaatagatgcgtaacttaaaatccctggaggaaagaactactttccccagaggttacccctacacctttaatttcttagacacttgggaagggtaggctgactctcttctaagctttcaggccctaatatccaagtgctttaagacacctggatttagaggttccacaggtatacagactcaacaatgtctagcactcagcttattacttctctctacaatcatgctccagcatttccttgctgcatccacacagttaccctgctatggtctgaatttctgtgtcccccacaaattcatatgctaatacctaaaccccaaatgtgatggtattaaggaggtggggcctttgggagatgattaggccaagagggctcttcccttatgaatgggattagtgaccttataaaagaggcttaagggagcttgtttgctccttctaccacgggaggacacagaaagcaccatctgagaagcagagggcaagccctcaccagaaactgaatctgttggtgccttgatcttggacttcccagcctccagaactgtgagcaataaatttctgtggcttgtaatttacccagtctaggatattttgttatagcagcctgaagggattaagacatgccccagtcaaaattcaggccacagacctgtccatttcctttcccccaacccacatctatttagttaccaaattttaatcacttctttctgctaagtacctcttgaatctgtctgcatgattactattcagattccgggggccacaatctgtctctatctctcctctgtcaggtagaaccagggtgatcttcctaaaatatataggatcatatcctttcctagaaagctttttagtagctttccctacctacagaataaggttccaacacctacatgtggtgcccaagcacgtcttgccacaaaagccacctgcgctgagctccctcagtcatacagtacatgcatgtatgagcatgccatgacatttcctggctagactgccagcaatcccaccccactctgggatattccagtaaatggctccctcctctcagagctaacagcacaattcctcttccccctctccaacacattgttggattccctcagctgttacttaagtctgttcacttgtctcttctgctagatggaaacacctcagaggataatgttctattgtgttcatacctcagatctttttattctatgttgtgtagagactttgggtactcattgtgtctggttctcttctgcttctggtgcatggaaggtgcacgtttccctgctcctttgtagttaagtggggccatatgagtaattcaggcctatgggctgtgagaagcagccaaaaaggctatttgctccagagtgggtagctccacaagatggtggagcttctgtcaccctgggtccatgagagactgtgtggaacaaagtctccccccagccccaaagcatgttgggtacataacatgagaaataaactctgttaagccactcatatattagggttgtttgtcactgcaccataaattaaccctctgttgttaatttagctgttaacctatgctgacaaatacagaaaccttatttttgtctataatcactaaaacaggacatggaaatatcaggttctctataaacatctgatgaatgaatgaatggctgaatgaacaaataagcctagaaaaatgaacatgagatccggagtcaaaagaaaatagcttataataaccacccccatctcttgccccacagtgctattcttatctccatttggcctcagaggcaggatttaacctgttgattctgctctctgaagtatctctgtactgatgccaacccaaactgcatgcagaccatggcttatggctcactgtctagaggaggtgaactggtgacatattttgccggttttgcactaagccataatcccactgactttgaacttcatgcttccagggttacatctggactcggtcccaaggatggggattcctgagctccctgaaccaaaggctgctaattctaacagctctcccaaccccatcagattaaagaatggcctcattagaccaaatatatgtttacatgtggggaaaatattcaataattatccttaaatctttcaacacgtttcagttaaacacaaaagcagggctgtgaattttggatgaattctacatattttcaaaaacaaacacaaacataaagaatgtcattccaaagtcacaggtttgtgaaattactgcttggcaagaaggtcagggcactaataaaaacatctagcaggccaaatctagctaatcaggtcagagggatccctgtgcagcagtgctgacaagggaatagggtggggcgcataggaggcggcaggactgggtagggaagatggtagagccttcagccaaaggatgcagaggaactgtccttagccaaggtctgttttgctaatatgtcagtaatacatggtttctgcaacctctagctgtgctatgcttcagttagcttgtgagtgctgggcctgaaactattatggaggaaacacatcgtactaaacgcagggtgggttcatatcctattacattccttaagagctgtgtggctttggataagtctcctgtttttgtgatttttaggtttcccatgtataaagtaggggtgaatataacaacatctcagtgatttgaggattacgcagactacttgggttaaaacggaaaacacatttcagcagcatattagtctgcatcccctaaccccaaacacatttgtatccccggggcctgatcctacggatgcactcaataaatggatgctgaagtgaataaagcgaataaggtgccctgggttgtttttttaaagtatgtttattatagaaaagtatacataaaactcatcattttaaccatttaaaagcatgtaattcagtggcatttagtatacatccaatgttgtgcaaccctcgtgactacctggttctagaacattttcttcactccccagagaaacccccatacccattaagcagttattctctttccacatccccaagtctatgacgattttagctaaaatcaatactttaaaacatggctggaggatattgcgttggtgagaaagttggcaggagctggtcaggcaagaattgatttcctgagtgtccactgcgtgctcctctctgtgggaggcacaggtagatgcacggtcacagctccactgggcatgtgcaacactatgaaggaggttgtgttccaggaatgtgaagaagcacagtggagttggaagctgaattaagggagagtggtgagagacggggtcagtggggtcagaaggggttggatcaggaaggggcttggtgcagtaagattgggatttaagtccatgagtcgatgactagaggctcagccctttcctctcctacctagtgtggtttgaggatgcttttaggaggagagagacaaagagacatgcaccccacccccttactgacaggtctgcagtggagggccctggcctggctgctactggagctcaggctgcagaggagcccggcttggaggcaggcagccacggacagttaatgagtgatttattggtgctgctgcagaagcagcttctctgggacctgttcctaattaacaaccactaactggatgacgccttttttttttttttaaattagaaaaagcccccaaagccctttttccttatcttagtgggaagaaagacttcacctttgcctgctggttaattctaaaatacaacaggtatttggcagaaatccccacccactccttcactcctgtgcagacacgcaaaacacaccctcatgtggagtcaaacccacacattcttgctcacgtgttccccagtcacacatttgttcctgtgctaatgtaactgcactgacattgtcacacactcccactcatatggtgtcgagagcatctgcactttgcacttgcagtcactcttacacgtgcattcccacacagccacatctcctgctgttctaggcaaggccacaggtacacacatggtctcaggcaggaatcttccctgtggcatcatgcctccggtgaaggggctgactcacttagaaggggcttaagattgtgtgtcctggcccagcctggtcagctgtgagatgctgtgagccagggagatggggagggagttgcagccaggcctcaggggcccagcatggagagtggcaactgctccattgttcagaacaaaacggtttcttctgttacagttcatggagcaccaaaaagctgcaaatttaagacccaggcttctgaggggtggggagttaaaagagcctgtcatagtgcctggcaactaatggggtgtgcttggcatctgttatgggatgaactctcccccccaaaaaaacgacaagttgaagtgctgacccctagaacttccagatgtgaccttatttggaaatagagttgttgcagatgtaattagttaagatgaggtcatagccgagtagggtgggaacctactccaatatgacttgtattcttataagacagcagccatgtgaaggcagcaccatgcagggagaatgaaaccgtgtcacaatccaggcagagactggagtgatgcagctgcaagccagggaataccagagatggtggcaacccactggagctaggaagaggcagagaaagattcacctacagggttcagagagagcatggccctgtctataccacccagaaccacgagacaatgaatttcagttgttttgaggcacttggtttgtggtacttcgtgacagcaccctaggaaatgaatacaacacccaataaatatgagttctattcccttgtttcttctttctgggcctccatctagcattcagaaacataggcttgatgattcatcaagacgcgatgagaacccattctaatctatacatatttatggaattttatgtgccaggccctgattacacagagatagataaaccatggctttgccaagattgacacagatctgtgaaaaggtttcacggcattaccttgaaataatacttaattaaaagtaacggcaaaacccgcaattactttgcgccaacctaatgtaaagtggaccactgaagaaaaataatacctctgaccaagagacagacttaaaaaggactttgaattccccctccctccacaaaacaatgctggacctctgacagggatgacgaggtcacccatcagatctacttaaaaggtttcaccccagcttttgagctctagatattgagtttcatgaagacactgttgtggtggaatacaaagctaatcaatagtgggcagctctttttcatattaattagccagctgtgcaggaataaaaaatacatcaagctcactcgtgctctctggggatgctcactttgctggtgcaatgacagcagctcccgggaaccaccacactctgccagggactgggcttctgcgggctgtcacagtctgtggtcctggaagtgctctgtctgtgaacacacttcggatttgtctcagagctcttaggctccttggactaagaccagtctcagctaacagctcggcagcacttctccttcagtgcccatgtgtcaagggggcctagggtagtgggaggatgcaggttcggagtcaggcgggtatctgtgtttgaattcagccttattaggcaggtggcctgacagctggcacttaatttgtttgagcccctatttctgtagctgcaaaaaaagaaaataccaattttatagcgattttaagaggagaatgaaatgagatagtgtatttgaataggcttatgtaatatctgacctgtaataagtactaaatgataattattaaataaataattattgaagagcacttaattaatataataacacctattaagttattttcattattatttttcccagacacagatttatcatggccacaggtcactgaaggctcttgaagccctgtcatacctggtacaatttttcttttcatttgtcttttgatttgggataaaaaaggaaaaattagtccctgacagccaggagctggcctggcactcacagtgaggtgacggcattcacctgttgaatatcaacagtttcacataccaacctcagacaaggcaactctgactgtaatggatcaagacaaaaataaggtcactctacagtcatgtctgaactcagacaaaaaacacaagaacattgttcaagccacacaatgaccaaacactccctatcctgcctaacatgagtgactgccaccttttttccagtgaccacttcaacttcacaccattcttcctgccttctacataagatttatgaagataccccggcagaagattgcccattccctgacagtaggcagtctagagcaaagccctgatcctggaccccacccccaaatcatgtgacacaagggccaatcctgcacatcctttctaacaccctctaccgagaccctaatggctctgcatggtgtggtgcttctgtgctgcaaagagtctgtgatcgtgtcttggttcaaccaactgtatgtgagtttctggtagtctttggccagattgtattaacagaggtttcagtgttaccctgacctagcaggaagactgattcggggtagcaacacctctgggccttttctgtacccggataccaggtaaagctttctccctagcctactttctctatcaaacggggatcctgactccacaacctttaagttgcctcttttgccactggaactcctgaaaaccatgttacaggatgggcaggggccattctggtgggcattcttctgtctgtggtcccatcccagatctcccttggtcggtgcttagaacctcaggggaccttaggcatcattttatccagttgctcaagcagagctggatttcttctgcggattctctggctgatggttacccagaagagtcctcagcactgatgtatgcctacgtaggtgtctgtcttctgtataccatgagcccctgaggtagagaccacgtcaggtccagttagccttcctgcagccaggcagcactagcaccttgcctggcacagattgctgaatgggagcagcacacagacagtcactgggcagcacaattccctcccccagtccccagttcatcaatacaactatggaccaagtagcactggcccactgtgagagtcatttggacacggctcttcccccctactcaggacgcatcatttcatttttctctccactttcattatcagcactagcagtgcgctctaacagaatttctcacaaagtttataatcactctctaagagttattgcatgaaggaggatgactagagaaagaactacaaggccgtcctgagaagtatacactagggggatctgctagggccgctcactaatcaaacaggagggcagtccaagaggcagggggcagaaaggagttaacatagcaggccgaagcctgcatccttagaaagctctgcttgcaaagctggccttgggctggtgcctgagaacctggctggtaaacagttgcctaggtcctaaatgataggaggggctatctgtgcctagattgtattatgcctagattgtaccaataatgagtgtatgttaaacaccttatttccttccgggagattggaatttggtgcatgctaggcagagggcacctatgtgactagcacctgatcaacacttggggccctgagtcttgagcttccatggtaaacagcactttgtaggtgtcatcacagctcctggctgtaggaacagagcacttcccgcatgactctgctgagagaaaaactcttggaagcttttgcccggcttcctccgaactttgtcccatgaaccttttccctttgctgatttgcttttttttcccttttgctgtaacaaatattgtgagccccactccatgttgtgtcctgtaaatgcttttagtgacttattgaaccttgggcacatccggacccaggctccaaggccaaagggccactgtcagcatttaaagccagggtatgggctcaggtgccctggactggggagatgatgtcatgacttatgaaatgtcaggtattaaagggcattgtgagctattatgcactccctaaatgtgaataataatggccaggctgccagagcagactcttgaagagcttttgaaatctggggaaaaaagtgacacgatcttttttcaaaataaaatccatcttttagcactagctctagtgctggggttataaattattgaaggctgtggatgcaggtagagagaagggcaaatcctttgggcttaagcggtttccctctttttgctaccaggtgaggccgcatgtagagtgagagagagacgcctggaggcacctcacttctaattgctgtctaacttctgacttagcccatttggttcccatttgaagcaccttcttttgcactttcatagcccacttcacacccatgagggctcttctctcctccctcttgcatctttacaagcagctggaattgcaaacaatttccctttgtttataccatgctttgaacctggtttgttccatacacttatttcctttttggaggcacattcaggaaagcaatttgttttgtagtttaggtactacacaaactaagtacagcaaactcatttagaagccaggctgctgagcaatggcagaaagaaaatccctcttcggtgtttgggaccaaaaggatttggctatttatttgagggagagtttcttccagaagaaggatccttctcacagagcaaactgggagaaagtggcctgaagaaaatcaggctgactggagccttttcacacttggtcctggtacctagggaatcatctctggcagttagagccaggctgaccagctgccagagagagttatgaacagctgtgcatgcgtgtggagtcagatagacctggggttgaatcccatctcctccatgggccagctgcatgatctcaagagcacttccaaatgagaatgaggccgatatctacctcaaagcttgtcacaaatgttaaacaaaatatgaaaacactttgtaaatcacgaagtgcaatgcatttaacaacatacacttaaatagcacttcctgtgtgccagacacgattctaagtgctttaactttcttacctcatttaatccttacaaccacactgtgagagagataccagaattatccccattttacgggtgagaagaccgaggcatggagagatgaagagacctgccttgtttaacacaaggtaacacagctaataagtggaagtgctagggttccaacccaggcagcctggctccagagtatgtgcttataagttggagtcaccaagtgtgtgtttgcaggggctagtctgatacatcaacacctttttaacctgtaaaattactggcagtcattcactcaagtagttctatattcctgtctccatcaggtaatatgactagggtaagagctttggatttggatagccctgggttagctatcagctttttaactggctagctggcaagttacttatgctttcgaggcttgaatttcatcagctctaaaatgggaataacaacccctgtttttcttcttcaacttttaagttcaggggtatatgtgccagatgtgcaggtttgtcacataaataaacgtgtgtcatggttagctattcttcctgatgctctccctccccattgcaccaacctccaacagaccccagtatgtgttgttgcccacaatgtgtccatgtgttctcagcattcagctcccacttataagtgagaacatgcagtgtctgattttccatttctgcgttagtttgctaaggatgatggcttccagctccatccatgtccctgcaaaggacatgatcttgttcctttttatggctgcacagtattccatggtgtatatgtaccacattttctttatccagtctaacattgatggacatttaggttgattccatgtttttgctattgtaaatagtactgcaatgaacataggtgtgcatgtatctttataacagagtgatttatattcctttgggtatatacccagtaatgggattgctgggtcaaatgatatttctgcctctaggtctttgaggaattgccacgctgtcttccaaaatggttcaactaatttacacttccaccaacagtgcaaaagcattcctttttctctgtaaacttgccagcatctgttgttttttgactttttagtaatagccattctgactggtgagagatgatatctcattgtggttttgatttgcatttctctgatgatcagtgatggtgagctttctttcgtatgtttgttggccgcatgtatatcttcttttgagaagtatctgttcatgtcctttgcccacttttaaatggggaacaacccttgttttatgggctgatcatggtaatgaaatgaagtaatgcatgtgcactatctggttcactgtaagtatataataaatagtgagcattactcctgtaattattgacaggtagagtttatgagtaaaaagaaataaagaaaggagcaggggggatgtggcgagggagggagggaggaagaagcagttaacagcagcatccatcacagcttatgcaccctttcagtctcttggggtcgccatctgctggcctctcagccaatggcagcacttcagctgccactgtggccagtcggtccattgaattctgctgcctagcacccattaactgcttgtcttgccttcctcccacagactattctggagagtagactgctatgtacagcctgcctgagagccttctcaggaggcattcctgcttagagaccagatatgtctccttgcagcttgttgtgaggcactggcaagcatggtaacacatcaccgttctttgcttctcatctttctttgtttcatgttcctgagttgacttctcctaaataaagcatcagcttttaatctttgcctcagctctgctttctaggaaactcagactaaatcaggtttattaagacaagaagatagtaattatatatacaaacaaactctttataaacaaaatctgataaccagttgggcaccctctaaaggattcttaaagtcaaaatttggcagaggcgggacttgaggttcttgacaagttcatggttagttagttattcagggcaaatgcattatgaatgtgggttccagcctgacctgcagctttatttatttaaactgctagtaattcaaagctaaaggcaattgtagtcttctcaagaacaagatcactctagatgtcatgtctgttcttacctgaatcagagaaggcatttgtcacctttaacttctccctgcttaaaatttccctgtggttcctatcaccttcaggacaaaggctgaacccttgagccagcaattcagaaccatctcctgctatgatgcaacccagctctcctctctggcctcatcttttcttaatctcacaggctttagccataatagatctttgctgtttcctaaatagtctccaccagccagaagtcagacccatgttctctgtctgcagtccaatgccccttttcctgattgctgctgcttcccaccatcagaggaagccaggcttgtcactttggggagagttttgggaaggtctggtcatccctaagggctcttcctgaaagagatattttgtggggtatgggtaattgctgcctcctgggcttcatgtatcaaacccatataaactcctggagtccctcttcatcctttgcttcctatgctcccttccagactgaagtcaaaggaaagcaaccaattactatacagtgctctgtccatctgcctgggttgattagtgtgaaattaaatttgtggtaaggatctatgggttggaagaagccagatttctcttgacatgctagtttcatgttgtgcccattgctatctgctctgggttcctctccagttgcctttgtgctcagtggagagatccaggtgggtgcgtgaacccagcttatgcctcatctagcccctgtatcttcctaagtcagctctccctgttcggggatgcttttcctgctgtccccacagcccatagttactctacggcttattaatcatcccaatgaccatttacataggagggaactgggagaggagagaggagagatgtacaggttctacaaattagggattccagctttatcactgtacaagctgtgtgaccttgattaagcctctgatcccggagtcaatcttctttcagctgaatcatgagcccctgcccagatacttagtcattctcagaaaggggatcctagaaatactaggccaacagtttttgaccaagacttttacatcatgaatcatggagtttttgagctaaggggtccttgaaggaagggaattaacattcacaaggtccaggcatattccaggtaccatcttttttttttttttgagacagggtcttgttctgctgcccaggctagagttcagtggtgtaatcatagctcactgcagcctcgatcacccaggcccctacctcagtcttctgagtatctgggatttcagaagcacaccatcatccttggctattttttgttgttgttatttttagttcaagcgatcctcccgccttggcctcccaaagtgctgagattacaggcatgagtcatggtgcttggcccccagttaccatcttttaagcttgtttttactaaaacctataataataaatatattttacatgacagttgactgcatgtattgtgtgtaaagtgtaactgactggctgggtgcagtgactcatgcctctaacaccagcactttgggaggctgaggtgggtggatcatctgaggtcaggagttcaagaccagcctggccaatctggtgaaagctcatctctactaaacaaacaattagccaggcgtggtggcagaacctgtaatcccaggtacttgggaggctgaggcaggagaattgcttgaacccaggatgcagaggttgcagtgagccaagatcgcgccactgcactccagcctggaaaacaagagtgaaactccatctcaaaaaaaaaaaaaacctgtaactggaataaaaagtttacaaaataatacttatcttctatgtgccatacactttattctgcttctctctattctatctattatattattattattactaatttatttattttgagatgcagtctcactctgttgtctaggctggtgtgcggtggcatgatcttggctcacagcaacttctgccttccagattcaagtgatcctcccacctcagcttcctgagtagctgggactacaggcacacaccaccacacccagctaatttttgtatttttagtagagtaggggtttcaccatgttggccaggctggtcttgaactcctgacctcaagtgatctgcctgtctcggcctcccaaagtgctgggattatgggcgtgagccactgtgcccagactatttattattattttaaatgatgttgctgagctataaaatttatttcatgattggttgacccatagttttgaaaacactgtcctgctctttcacatgcatgatcaccttccatccttattacaactttaggaggtagacagttattcattcccaggttgcagatgaagaaactgagtttctccgtttcttcatctcagtgagatctagtaattcgcacaaagtcactcaattcctaagtagctgagttgggattccaagtttgactccaaagcctatcctccttccaagttatctcactgtctgagattccactgacctttttcggctgatggggaaactatgataatgctcagagagaagtgactaggtcaaagtcacactaggactagtgacacagcctaaaattgaaaccagattcatccctggactccacacatctggcactggaactaggctcccataggcaggaagctcctttcccaatgttggttatactctttcttccttgaagtcatcctgggtcagatgaagttcaagcagcctcagaaaccactcttcttggacaaagctgagcttactgacagggaaaaatgcttctgaaacatctttcggtaggaagtttgtcatcatgcatgttgttgcctccactggaattgaaaatcgtgttgtctcaaattaaaaacaaaactctcatttgctgtacctctctgcacactcagcaggtctcaacccagtttcgggaatgcaatctgtcttaatttaccatggctctgagccttccttttcctccctttccctttcagaagcaaggtgctgttgtgttagtatgtgctgccaccagggagagtcacagagcttgccagcaggaagcggttatggggtgcatttaatctgggccaggacttcttaaagggactcctaagaacaacaaagctagtagccgtcagtgttggctcccagatcacaggcaattccagccaatttcgtgctatgcggaggaggccccaggtcaaacttcactaaggcagcttgaggcaaccaagcagaaggaaaggctaaaattatggcttaaagggaagctgagattgtatcaaaaaatgatggttccaagagtctcatgtggaagataaggcaaggctgggtgagggagtcaggcaccaaggtcagaaaccaagatgatctgcagcaggatggagcgtggtgggaggagtgggcaagggatatggctcatcaccaaagctgtggactaagaacaagaaagcacagggtatggcatgggacaggccatggctaaaggacccggaactgggccaaggtagctgtgaggctgggagaaggatcaggggcaagccccccgtccttacagtactggcaagccattttggtcacagaatttaagagtcttgaagtcatcctcaatgctaacaagatggtggggaggagcagggaagagaaagttctatccccatccacaggtacaggtactaccctcactgccacacctcagtgaactacaacccttgcccattcctcacctatggctcactctgacctgagcacctgttgtctctctcctggatgactgcaatagctgcctacttcagcctttgcctgttagtctactctcaacacagcttccagaatcatcctgttcaagtattagtcagacctcatcacttctccactcagaaccctccgtggctcccctgcactggcctgcacacacccctactccctcccctctttggcctcctctaccatctagccactctggcctccttgctgcttttcaaactagccacacacacactcctgccttaaggccctagcacctgcccttccctctcccaagattgttttacttccagacatcctcacagcctgctccctcacctaccgcaaggctatgttcaaatgtcaccttctctgtgaagccttctctggctaccatctttacaactgcacctccccatgacactgcccagactcaccctggggacttactgtccccctttccataacaactattatagagaaacatcctatgttatttattttttaccttgttcatcatcaattttcccactagaatgtatctccatgagagggggcagttttgtctgctttggtcattgctggaaccccagtatttaaaacagtgcctggtacatagtaggtgctcaacaaatagttgtggaatgacagacaatccagctaacttgcaaaccttacctcctagtacactctgccaccctattcccagttgcacgcgcttatgtcctagcctcatatgacaaaccttctcttggtttacccccaagctttgcccacatagaatgtcccctcttacccctctttgcctgttacagtcctttccagccctcaaaacctaggggccagcacttcttccataaagctttctcagataccttctgatgggatatttctcttaatcctctaaaacatgtacttcaaatgtcatttttctagcatgtcataatttgagagtggcccagtatgatctctgggtcctgatcatttctaataggttatgggttcaatttcttttctggaagtttctaatattgacaaagaagtttatattctggatatagctagaagcatctctagcatctatattttttgggttgagctaacatgaacgtgtctctataaaacaaaaaagactgtagaacacggtggtcaagaaggataatgggccaggtgcggtggctcacgcctgtaatcccagcactttgggaggctgagacgggcagatcataaggtcaggagatcgagaccatcctggctaacacagtgaaaccctgtctctactaaaaatacaaaaaaaattagccaggtgtggtggtgggcgcctgtagtcccagctactggggaggctgaggcaggagaatggcatgaaccctggaggcggagttgcagtgagctgagatcgtgccactgcactccagcctggacgacagagtgagactccatctcaaaaaaaaaaaaacaaaaaaaaggataatggacactgtagtaggatggatctggattcacaccctggctctgacatttactagctatgcacccttcaatgagataacctaactgctccaaatctctgtgtccttggctagaaaatgagggaaggttaagagttggtgggcttgttgtctccaaggttctttctagctcacagattccgagaggctcagaggctctggctctaccaggctctcctcagtcctcttgggagcctgggggcaagcagcagagtaatcaaatgtggggcccaatccctaccctagtggatgggacctaacttcccattctagaagatggtgtcccattgtacaatgagttgggttgctgcagtattttgaccactttgggacttaatgatagatattcttatagatttttaaaaccaagtctcttgggtatggggccaaggagagcagaggataaatggagttaattggtaatgagttcctttctcactgtgctttggagatgctcacctaatctactgactctgaatgagcaatttggctgcctaattaggttaaccaataatttcccttttgacaccaggctgcttgacaatttggggcaggggtaactgtgattctgtttcattgtttcctttcaaagtaggtttcttaatttgcctctgggattaaatcatgtacattcttactgttccccagacccatcatgcttctgcgtgcctccaagccttgggtcatgcaattgtctctattgggaatgcctctctcagatccctcacactcagtgaaatcctactaggctttcaagccccatgcataacatgagtggaatgaaggaatgagcctctgcaccctcagggcaaaatgaactgctcctttattgtcatcatccagcttcttaaaaaattaatattaatagctcccgtgaattaaggcccaacacagacctgacgcttcacaaatgctgtagtacaggctcacggcaacacttcaaggaaggaagatggcatgctgtttttgtaattttttatcatgtgaaaaatacataacagttaatctttttaatcattttgaggaatagagctcagtggcattagtgtagtcacatggttgtgcatccattactcttatctctgaactttttcattatcccaaactgaaaatctgtacccattaaacaataactccccaacagcctcttcttagttcctgctaaccactgatgtgctctttttaaaatgacaaaactgtggctccaagaggtgaaatgccttgcccaagatctcagagcttagactggggcaaccaggacttgaggccaggtctccacattggactctgaaactagcattctttttccactctgcaacactgcctgctgcacctctattaaagagctgcaaggtggtcacagccctgcctccctcaccggtcatctagagtccacatcctagaatcatgctgcacactgaaggagctcagcatagctgtgggacaaattacagaatgaacccacaaaagacactgtgtcagcttgacccagtgcttgggagcgaagcttgaattgcaacctctgctttctaaaaaacatctattgcatgccgactgttcctgacaggccagcttctcactgcctcccgacccccagcctgttggcctctcacggcaggggaggagaggcctgagggctggctctgcctgaaggccccgagtaggaagatttgtgtttacattacccagtcaattctgtatttattttagatattaagcagtgacataaaagctgctgacattaaccttcaggggcagaaattgtctttaatggaccccataaaagttattattgatggcagctgcatgcagcatcagtgtgacctctgcaaaagcctctaccgctatcaatactgttgacaattactattgactaatgcaaggcagggtgtggaggcagagtaaatgttcctgtggctggaggttgctgggggttatgcttcacattttacatttatctggtaaggatctctgagaacttggttgcacatttttggtggcctcaactgagagctgaggacgcctgcagactcaaatggaggcaggcaaaggactcagagaaaccagacttcaaatataagctctgccaacttgctgactcgcaggctattgtgtctcagtttggagcctcaggtttcccatttggcaaatgggaatgccactgagttgccagggagattaaaggcaattgcacatgtacagtggtaggcccatagcatgaggttgctgcctttgctctacccctgagaagtgaccacactgtgatgtgttcactgacaggtccagtggaactgagccctgttctgatggtgagatccgagttctcatcacaagaaaaggagaggtctggctggggcccaggggtttgttgaggtcagtgggaactagagaaagatgggagaaggggaaggtaaaagaaaagggagagacagggtaaaaggaaccaagacttttgtcatagagcctggctccagctcaactagatatgtggccctgtgcacagcctttaatctctctgtgcctcagtttcctccgctataagttggggagataatagtgtaagaggaacctgaacctaatcagtgaataaaagggagccattcccatgattgctgtcattatttagatctgagtaccgcataacgaagctgttaatgtaacttcctaaccaggagcaagtagacagcctttgggcacctatggggagtctaggtttagggagtccagtcttggaagggatgtgggaaacagaagccctttattagattcatctgcctacctcctctgcccacccgtctaccctgagtacagtgaggctttgagttctgtggccagtggggaaatggacgatcacaaagaaatgacaacatggccaggggagcaggcagccatttctctgtcccactatcaaaggctgaaactcttcaggcttgattaatatgtcattatcacccaacagaggcttaattcagctgtaattcagctctcagggaatatacaataatgtgcgcaagtgtgcacctctttctgtcatgactttatgttaagtgatcatttgtcaccatggcaagaagccttcaaaagaacaaataacccaagtattttgctacagagggaactcactgtaactagggctgtaagagtaaagattttagagtcatgtaggcttgagttccaatctcattttgcttgctgtgtgacctatgcagatttcttaacttctctgggctgcggtttccttactgtgtgcaatggggataataaaaccttctttaaagggttgtagggggagtaaatgagataatatagctaaagcagttagcactgtgcttaggttgagataatcggtggcaactattttttttttttttttgacagagtctagctctgttgcccaggctggagtgcagtggtgcaatcttggctcatggcaacctctgcctctggggttccagtgattctcctgcctcagcctcctgagtagctgggattacaagtgtgcaccaccatgcctggctaatttttgtatttttaatagagatggggttttgccatgttgcccaggctggtcttggactctggcctcaagcaatccatccaccccagcctctgaaagtgctaggattacaggcctgaaccaccatgcccagccatacaactattaagtattaatgctgttattattatcattttcctcttgcacaccttcatcttgtgcatgcaattaggatccaagaattctacatctggaagggcctacaggtcatttcatttagctcagctagacccaaaaagcgtttattagaatactggtcccaccagatgctctgagaataaaagagttctgtggtcaaattgatttggggaatgctgcatacatcctcccttggtaatttatccattagcatgcacattaacatcttaaaaactctaagaagccctgcagtaaagaaagtggtttaagtttgtttgattcagtgtttcctacattatttgaccacagaacagccccttaccccatctaagaactaacattctcagatcaggggatgctaatttcatttaaactatttattttatagatgaggaaactgaggtcccaagaaaggatgcaatttaccccatgccacaccctagaccagtaatagaactgaggctccctgcctgctgtggtgtgatggcacagaccctattctctttgtgccaggccctgcactgcccttcaatttaatgctcaagttcagtgcgtggtcggggtggggagaagcagggttgctggctgggtatggccttgggaaggtgggtgagggagtgtgggtggtttcccaccagagagagggaaactcctctggtactgaggtcatcggccccttcacagggctggctggggaccaacggagagtgacagtgctaagccactacccagtacccaagcaattgccaccctcccacccctagacaagtacacaggctccctaggcgaacatgttagtcctctgggaggggtggcaggatgcacctttggaactctgccacatgggactctggaccctaaggggatacatttcccccacctgaccctgaccgtgcgtggtctcctgcccatccccaatctggggatcaatcttggttttgcaccactcagttggagcctcctcttcagagactaacccctctaagcctcatctctgacctggtccctgccctgatccaggggaatcccgggcaggaatcacgaggatctacatttgaagctagaagccagcagggggcactggcaccaggctaggtgcttcctattctattaataattcagactgccctccccttacccttttgctggctgtcgtgcggaagcaccagcaggcctcctcttcactgggcttcccagaaacagccctccaggtgctggggctgttcctgggctctgccactctttcctttgctgccagaacccagcaggacccacctcggtgctgacctggctcagcaaagctgcccaagggctggtagggcatgaaatatatagaaggggagattccccccaggcaatagtctccacgcaggaccacgttcgactcagagcccctcagaattctgccagcaaggtcccaagggagaaagaggaagacgctgaaactgggccccctttcctccaccatgaaaaggaggtgtgtgaaccaggtgtcatcttttcctcccacagcctctctcaggccttgggaacgagcctcagggaggagagtggaataatgagtgtgcagctggcacgtcctgggatcagggggaagctgcagcaaagcctcaagttttaatcattaaagtttatttttttttgtctttttactttctttttatttttaatagacagataataattgtatatatttatagggcacaatatgatgttttgatacctaaataccctgtggaacgattaaatcaagttaattaacatatctctcatctcacatacttatttttttgtggtgagaatatttaaaaatctactcttttagcaactctgaaatatataatgtattattattaactatagtcaccatgctgtgcaatggatttcaaaaacttactcctcctaactgaaacgctgtaccctttgacaacatcttccctaaacctcaagttatccccaaatgacagtttttgtttggaagccatcctctgaacaacataagatgctgatgtgggacagcgttcctagaggttgcccaggacagctgagcacctggagctagagatggcatgagcaggattcaggcaggaccaggccttgctgatttgatggaggataaactatggggaatctgttaccactgccccatgccctctctgctcccctgcacacaggcaccttatgagcaatgacccagagacttaggcgcctccctaatccggaagcaaagagcagcgacccaatctctggcatgtcactcatgggtgggcatttcacgtgactctccaagagactctgacatttgacccctgagagtaaagcaatttttcaccaacttcaccagagccccggcagtggagcaggaaatcaatattataaataaaaccccagccccaccacccaggcacccggcacagaccaaaccagccactcaccagtctcagtgttttcatgctcggtgtcggtgagtgtgagattggaattggcccggctggacaggcaggagctgcgccctgaccgtgtgctccggccccacagacgcacggggtgctcaggggacagcaccgtgtcagcctccatgtcggcatcagagccagcccccatggagtagccgcagtgggggaggccaatgtctgtccggtacagggtcccgtgagggggcgttacttcttccagccccagctcccgcagggtgaagttggcacctgggaggaaacacaggtgaacttggttagggcactgagatgaggtctgcgtctgcctctgcctgaagcctggccttcttaccccagggctcactgtcgttctttgaacttgctgtggcattctatgcccatgcctttgttcaagtgattgcctctgcctggagggctttttctgccccctcttcatcagcctgaaccctccatttcccttaagcctcaactcaaatggcacctgctctgtgaagtctaccccaataccaacacctgtgcagaattcattttcactttctccaagctccttccagagtccttgggcctggtcatactgcacagtagagttgtttaagggtctacccctctgctggaggtgacctcagcaagggcaggcaccatgttttgcttatgcttattcttaaatctctttccctagaacaaaaatgcagtactcagaaggggctcaataaatgcttgttaaaatgaattgagggcttcaggtctccttttccagggaggacttttcagcaagtcctgagcagggcagaagcccagtcgatgagatctaaatgtctcccttggggccagaagttcctttctggccaggtcaagaaagcctgaagcttgagagtgaagaagatggggactggcagagaaaagtcagcctcacaccaggaaaaaggctctgcctgctgcttccttatcccaagtgggtctgtgatggggaactggcagagacaggtctcttgagggcttgggcaggcctggcaatgcctaggacagaggctgggtaagagaaggtcacctaggagtagtacctgagtgacaaagagaatgctgacttcatggaaaactagcctccctgtcactcctgcatgtgaattcaatgtctattcagggacagcttctcctgtacttctagtattcccaggaatgtgttgcagggaaaaggaagagggagtatacaaagtcagtaagggtcagatcccacttaacgtgacgatctggagaactggagttataatcaggcagaacccacatttaaaccaattcatgccggccctgggcctgtactgagatacagcagtgaataggatacagtgcccaactttacagaactctctggcgggtaggagagacacaaccaaacacatgattaagtgtgcaagttcaaaatggggagatccacagagtgctctgggagcgcaggagcagaaggtgggatattggggtgaggagcttagaggagaggtttgcgatgagagtgaatgtggagaatgacaagttagaaggcagaagaggtggatggccaagctttaaaggcctcctcggccaggactgaataggacaagcctgcaaaggaaagcaagaaagaactgccggaggggtaggaggcgagccagcagagacgccatcttattataatggtgtgtctcactcttacagataaacttgtgctcccctggtgtgtcctaattatctgaatccaacacctatcacacctgctgcagagtaggtgccctgtaaaagttaggtaaccacacacatgcagacacacacagacgtgcacgcgcacacacacatgcacacaagcacacacgcgcgtgcacacacacgtgcgcacacacatgaacacacaagtgcacacacacgtgcaaacatgcacatgcacacacacgcacgcatgcacactcgagcacacacacgcatgcacactcgagcacacacgcgcacgcacatgcacacacgcacgcacaagcacgcacacacacacaagcacatactctggcagtactctggacaacagataaggggacaaggaagcggggaggagagaccagctggggtgctgctgaaatgcaagctgctatgctaggctgtggtggtgggtggaggtgtatctcaggcctcctactcagctggctcaggctgggacagccttgatgccaggttacagtcatgaagtacttccacacagcttggtaaataacttgtgccaagccacctcagtgcctccttccacacccagtgcctttcagcctctgctctggctgttccagccccttcccaatacccccaatctcctcatgatccagttactaaacaaagggttaatgtccgcggaccaggcataaaagaagcccgtgggctctgctcagtggccaggcagacattctgattggttagaggctgggccaaccagatgttaagtattttgcataccactcctccgtgccctactccaatctgccctccgattttgctctccttcaaagaaaaagaaaatgccaaattagagcctaaattcctcagtcggcttcctgctctccctgcgtatcacactccctggccgctctctgatctacactcctctctcctgtcctgctctcgccccctgtccccatccacagttctatctgtgctctgttcggccggccctctcaaagagaagccactcacgtgttatgaagaatgactcttacattaagtgaaaaatcaaatttatttgcaacaaacagcctgggctgcattgatttccatctggcttgtcctgcatgcccttttaagcagccagactcagcatcaatacaagtgagttaagacatctcgggactaggatgtcttaggaacttaactcctaggaaaatgcaaggtaagggctcactctaagggttccatgatcctgttgagccagtcagctcctctgatgtgtgagtttggaagatttacttcatccaatttaagaagtcctcatggtttacttgctttatgtcctttttggcctcttttctgaggcccggggcatgagttgacatcccatctcactcaacatctagctgtgcaatcttgggcttgtgatcacctgagcttcaatgttcttgtctttaaaatgggatgataatctatgacctgctaccttcaaaggatttttgaggatccagggtgataatttgaaggagagtattttgtaaactgctacgcacatgcctgcctatgagatgagaatgcttatttgttatttacaaagacaaggagccgccccttccctgagcctcatgtgctaggtccaagccaaccggggctcactgagctctgtcacttacggacaggacggagcaaaagaaaagctttcagagaccattttgtctcttctcttcagtgagatccagagatgacaatgaataacaggcagcatttctgaagcatctgttctgtgccaggtactggtgtcaagtgtttcatttatagttctcatcaatcctcaccacctattaggtactgtttatccctttgcacaggtaaagtagctgagaatactaaaaatggcagagccacagttcaaatctaggtctgtttgatgccagagttggagccttaaccataagctgggaaagggactgctcatttttcaagcctcacaggcagaacaggtcagctttcacatggatacaggcctgtgggagagaatggaaatgaagaggtcataggtgtgctctgtgtgtgtgtgtggccagctcctcttacctctgtgatcttgggcaaatgattcaccctggggttgttatgagaattaaataacactgtcaaaatgcatatacattacatagcacagtgctcagctgaccctgtctgtgaagggggagaagggcagagcaaatcagggtgggctgcacaaattgtcaggcattggtcatgacccaacaggcatcaaagagggctcaagcctctgcaggcagaaaaacaggaatcaccgaggcaccagggtaggaaagaaatatcatggcaggtctggaaacttgagcagttcagcagggctggcccatgagtggtggagtgtggagagttaggggacaaaaaaagtctagaaaaacagaaacagatttggggaaagagttctatgctagggggagctcagtttaagggcaacagggagtcacccccaagcttcatctggctgcagtacagagaatggctagaggcgggcagctctgggtgaaggggggtggttgtggttaatcctccaagaaaaatgataatggtttgcactgggaagtatcagagggaatggctaagaagaatggatttgaatactggggcaggatggataggctttggggactactgtaggtagaaagtgcaggagagggagccaggcaccagaatatcctacaaattactaagttttcatgtctaaccatctcgggaaggtcttcctctcaaggtcacacagggcttgacacaaagaaactgctaaatatgtttgttgaatgaacagcaaaactaggaactaacatttattcagcgcttacttggtattatcaggcttaccacttaaaggccatctcattaagtcctcaggacaattcagtgcactagggaggcttctcacggccatgtaacagttgaggactgaggcttagaggggagcctaactcaactctaggcaggtagacaaacactggagcccagctcctaaccacctcactatgccagggaagtgggtgagcgagaaaataaatgaactaagaatgaactacagggcaggctttttaccaggtccaagtgcccaaatggcagaaacttgctgttgatatggcaccccaactggtgttccagctcacctgtgccacgcccacctgcgccacgcccacccgagcccatgcctacctgagccaagctcacctgcgcctgaggcccgccccctcggccttgtccttacctgtgcggcagaattcctcggcctcctgcggcacaatgtccttgacgcggctgccataggctaggcgggcgtcctggtcgtaggccttcagggtctcgctggagctgtacgatttctgcggggctttgccctcctcgctgtccgcggacgagctggtgtagcggcgctcggcgtcgcggcgccgggtcagcgagcggtaaggcttcctctccttcacgtccatggcctccggcccgcgctcctccacatccacaaacagggtcctcgccgcactcagggccgagtggtctagagccagggaaaccaaagatagggcgtgagaggcagagaacattcccgggttcatcctggtcctggattcacccttgcagccctgtggacagagaaccccaggcagtggaggagagggtaccgctccaccactacgcagcccataagtggcaaaggaaagtcgcacccaggacctctaattacaaatcctggccctttttgctacttagcctattcaccttgaggaggcctcctccagtgatgggcaccgaggaagctgacagcaaaggccaaagggcactggtggttagtaatattcctaggtaggaaccaagcctgtttggttcccatcacatcccacatggagcagggcctgacccagctctggcccagggctccttaaaaatctgtgagatgaatgattgcatgcaaacactggggtaagcactttgcatatattatcttagtaaatcttgatatcttctgagatgttattactctctccaacctcttttggaaacgagctaaggtataaacaaccaacccacacttaccactaccagatgattatataattatttgctttttgcccatctccttctgctagtctgtaagctctatgagagcagaaactttacctgtactgctcactcctggtctctagcacctcgaacaagggctggtacacagtaggcgcataataaagatgtgtttaattaaccagctaaccatccccatctgacagatgagaaaactgagactcggaacccccttcaaggtcacttaggtgtcaagtaaaaaagccaggattggaactctgatctgtttggctctaaagcctgcatttttcctattccattctgcctccctgagacgtctccctcctactcttagtacacaaaagtgcccttccagttactcagagaatgtccctcacctccagacttgcccatctcctcagtgccaccgtcagcactgggcagcacagtgtctgccccatccatctgggtgttgctagaaggtctgactggtgggaagctcctaatagccctttctcctcttttccccatcttgacccttctgccctacactgacacccctggatttttgagttgtgatagcaccctctttctccctccaaatgtcttctttgagctctggggtagcaaacacaaccatacagggccaggagctcaatacagaaggaaagcagaatatcctccgcagagacatagggcatcacttagtttttatgaaacacaacctgctcagttctggctttctgttgctccatctttcagagcagcatgggtacacaagacattcccctgcttcactatccaattagagagacaacagagcaagagctgtgataaatgctgccaacatcagatctcagtgtccagggtggggccttgacagctgggagggtgggtctgtccaagtgcttgcctgtgctgcaaagtgggagtgtgggtgggagtgtctggggggtgggggtgtcttgtgaatttttaagacaagctggaaatttggagttagatataaaagctatgactttaaaatgttgatccattattattatttaattttaatactttgcaggccaaacaaaagagacttctgagttgaatttgctctgaggctcgtagtttccaaattctgcctttgaccatggacatcagaggtagctctttggcccgtttttccaagagtgcaaacatttgtgattttattggtgcctcacaataactgtgaagtagagattacaattattttcatccccatattatagatgaagctacagtgacccagggccatatagtctcctgcctaaggccacatggtgagttagttgcaaagctggcactaactacatagactgcaatgcctcgggattatacctagatccaattaagatgaatagttgacactgttttggttcccgattctcaaaatatccctggaaattaatgctggggcaaggggtgtaactcgagacacacagaaatcaaattatattactgaggctcaaacccagagctctgagctctgccatcctgatgctcagtgttcccaatagctggcaagatgatagtcctctgagtgtctgagaagcaggaccacaagggaagatcagtgatagtaccttctactccagggttttaaaaactttcttgactgcagtccataattagaaaaacatattatggccaggcatggggtggctcacatctgtcatcccagcattttaggaggcgaagtggaaggatcactacaggccaggagtccgagaccagcctgggcacagcaaggccctgtttctacagacaaacaaacaaaaatttagccaggcatggtggcacatgcctatagtctcagctactcaggaggctgaaacgggaggatagcttgggcccaggaggtcaaggctatagtgagctgtgatggtaccactgtactccccgctgggcaagagtgagaccctgtctcaaaaaaaaaaaaaaaattacaatatcttacataatgacccactacacacattgatgtatgcgaatgtgtgtgtttacatgtataaaagagaaacaaaagattcacaaaagttattgcatgatgagaaatgcactctgatatgttctatctcattctctttcatttttaaaaaatgactgattataactctaaattgatatcacaacccaatactggctttcaacgcaaagcactattctggtataatttgaatgaggatttatggcaactgctgcctctgcctgtttacttctaacccctgagtgacaataatgatgatgataataataagcataagtactccataatgttagccattattaatatgactcactaataactcatattaataactcataatattaataatggtttgaacaatatagctaatagactcttagtagctaatatttaattattgcttgcttttactatgattatatataacatctttaatcctcaccccaaccctgtgatataggtattatgattctctgcaaactgcagatgagaaattgtgaggttaagtatgctgcccaaggttacatggccctggcatggtggagaaaaaattgtgatcctgaggttgaactcagcaaatgggtataactgctgtatgggctgtgccaggggaatttttgaggcccaggtcatgctattgtcctgcttatgccctctagcagccctgctgagcctttggggtcaattctggcttcctggtcaaaatgaaggctcttgtcagtctggctcacctcgcttccatcttgctgagccactcacactttcctggatgtgaattctgtggcctctctgactttgtgcatgatgtttcatcactgcacatgcagcccactagatgatctttttttcatgtctgcctctccccttgactacggttccttgagggtaggtaggcttggtatccggtgctcacaaaatgcctgttaagtgcatgcatgaatgaaactacttggcagctacttcatgtcttcttattaagcctcaataacataaaatattagtagttcactaccaattaagtaaagtattacgtaaatctaaggctgaattagaggcgttgctcacatgtattctttttttaaatttcaaaggtagcccaggcttgcggtatgcatcccccactgaccggctgaatgaccttgggcaagttatttaacctctctgtgcttcagctttctcatctgtaaaacctcttagggttgttttgaggattaaatgagttaagatgtgcccctagcatatacagcccctgatacacaatgagtgctcatagatgttagctattattatcatcagaaaaaacaaacacattttctgtttaaaaggcataatgtagaaagctacgggtaagtgtcagttataactggggaaggggcatcccctcagaagcatatgtaaataaggctgagaaacgttttaggctgttaaattggtgggtgactatttcctcttatcagtgtgtgcctgttgactgaagacattggcatcaaggcaaaggctcagtaatcacaaattattaagaacatacacacctaacgcacagcttccctgtcacaaagctgaggcagggagaacattcgcctggttctcatttccttaaaatttttttttcacattttaggcttaatatagtaattcagcaaatatttactgtttttgaacagatgggaggtcagttatggttcacactcaaattggcatttaacagagcgagaaagaagaggttggggtgaaagaggagtgacagtggagaaatgctccctctggagcaagggacttcagtacagtgacctggagccccccggcagaaggacagaaggaatgctggggaaggggcccacctcagaccctgcaacccccagccacaggttcagggacagaagcacatggcacatatccatgcctaaacgtgttcgctccctccttacccaccaacctctgggttccccataaaacccatgagcgtgacatccaaggcttctggagatctgaactttccttgtctctctctgcttcctctggctgccacagagcaacctgtctctcgcagactcatatgctccatttcagtcatgcagaactgcctgccatttgccagacatcccatactctttaacattgctgagcctctacaagtggtgttgggtggactcacctaagggcggcaccaggaggagatgggggcagggtcacattaggtgagaggccagagtgtgtcttccctgcccccactagctctctagtcctctgtccatgccttctctgacaggtagcccctcctccaggcctccgcttcatactgggctctgctaacatcttcccctaccctcatctgtgcaggaccagggatgtgccagtttcttgctgttgctacagcccaggcgtctcaccatcagggctggctctcagaccctgctgcacctccgtctcttcattaaagtctgctcctctaagccatctagagtgaactgtttcctgttaggatcctgaccaatgatacagcttcaccccttactttctgttggctttcagcaatcatcatcgtcattgaactaataataacaccagccaccacttactcagggtttgccataggccaggcaccggtcaagtgcttgagatgatttcatttagttctcatcatttctacctctgtgaatcggtcccattttattgatgaagagcctgcggcttagagaagtaaaataactggcttgcagtcacacaggaagagactcaagagctggaagtgtccaactgcaaaccttctttccagaaccctctatcctgacagtgatagaatgagctccaggctaggagtaaggcctgtcctggccacctcctagctgtgtggccctgggcacaggacatttaacttactccaagaggctgagtttgttagatgttttgtaaactgtaatgtactaaattggtataagggattggaaaatcattactgtcaatgccatcatcattattgtgttgttatttctaaacaacaaattatgtaactactttaaacctagaccaaattaggcaggtgagaatgttttgggaagctcaagtagcaaatatataactaaggaccaaactagtagctcagtcattgtaggcctcaggctaaacaaagaggctccaatcaagacgaagagcatgtggcccccaggtgagcacattgccactgacgccatctgtgagatgtgtaagaccctggcagggactcggcctgtcagtctgctccagacatggcgcagtgttctgaaactcttctccaagcaaaacctgagtaccacaaaggtgccttagagaagaattcattttcacaaactgttgcagaccagtctagtgctgggcactggaggttccagagaggagcgggtcacaagccctccagtgacagctcaccatctctctggggtgtcagccctagggaccatcaccatcagtgacaaatgctttgataaagtataaactgcagttttataagcttgttcttatgctaacgtgggtcttggttttggtgtgtctgtggagaaggagagtaggcccagaggagaggagggaagaagacatatgtgttgagcacagtgcttttcacatacccccatgaaagccataattatttctcgtttttgaggccaggctaaaagatccagttatctgatcaagttcacacagccagtaaaggacagggctgagacctgaacccagaccttctgaatttaaaatccatgtttgggtggttgtatgagtttgttttcacgctactgataaagacatacctgagactgggtactttatacaggaaaagggatttaatggacttacagttccacgtggctggggaggcctcacagtcatggcagaaggtgaaaggcacatctcacatggtggcagacaacagaagagagagcttgtgcagggaaactcccccttatagaaccatcagatcttgtgagacttattcattaccacgagaacagcatgggaaaaaccggcccccatgattcaattacctcccacaacacgtgggaattcaagatgagatatgggtggggacacagccaaaccatatcagtattttttttgtttttgtctttttcctttatgtgaagctgggcttggatggatctggaaggtttcaatagggacgtgaatgtggggaggcctgggagccccctggtggtgatggtgatcaggggatcactgaagacaggaaaagaaagggctagtaatggtaagataactactgttaattgaacacctcctcatgtgcttggtactgtgtaaattatttcaaatccctataataacttggtaagttaggtattattcttttattctttattttctcttatttactcttattttatcaatgagataacaagcccagagattaactggcttgctctagatcacgtggcttccaagtgtcagggtctagatttgaaactgaagaaaatgtttgaacctcaagaaaaggatcaaaaacctagttccataggctcattcatttggtaatcattgctaagtcccttttctgtcctaagtgctgcaaaagatccaaggaggcgtcataggagactcccttcttctctcctccccgaactcccagttcctaccctcctgtgccaagccttgttggaggcatcagaggacaagacagatgtgcttctgactcctagatgcttctatacactgggcaagtcagacagagggagaggcagggaaggacaccacaggggcctgccccacacccaggccaaggtgggtcaaaggtggagagaccatcagggaccactccccagaaacagtgacatctaaatgaaaaccaaagaatgtcaagtaaaagacggttttgaggtaaggagagaaaaaagtttagatctgtggctttcaaatttctcttgcctacagtaaaaatacgcttatattgcaatccaggatacacacatctacaatttttttaactaaaacaaaaatttcatgaaaagatgctgaaccttactgcaagggtgaaatctgatattttattctctacttaactagaattatgaatgagatgccaatctacagtctgaaaaacactgtcctagatcacagcatggaaaaatgaacctggcacagacaaaggcccagttatattccgagagttcagactctggggagggaaagaggttggagagaaagcttgagaagtgaggagggagcagcctggtagaagaaataaagtaacatccctacatggtaaatgtaagtggacagtaaaatgcaaaatgcatgtggcagagagagcctgccctcggaggacctggtagggagcgtgccctgcagctagttttcagaggccctgctgccttgggaggctggagctggtctggaagaatggcaagagtgtggggcccgggagaaggggagatatgggaaataaagcttttggtgtttgaggagaaattcaagaaacaaacctggccccttcacatgggttccagcaatatttatgaaggggcaggagcctggagcattcgcagagagacttccacagacagtacagtgctcgaaaaaacctctgcccctgccaaaacccgcagggaaatgggggctgttatcaccccgggttacctcgcagcctcagatacagccagaaacgagccaggaaattgactgaattcctactggactaaagttttataagttttccttaacataagcacagggtgatatttttagttctttgtgtgtcaaaaagggcccataaatatttcagagctaaaatgtgttccacaaaatataagtcctgggtagcatctgtgtgtgtgtgtgtatgtgtaaaatcgtgaattttacttttcttattccttcaaagtgtggtctttgagtcctttattttaaagtgggggtggggaggatggcttgtggtggtacctgttcttgtaccaagtattgtgttgggctttgtgcaaaccagagaaggaggcactcctatccccactttactgatttagaaactgagagtagcaaagtgatgctcaagttcacacaacacaccaggactggaatccgggagctctgcttctgaggtctgtactctctgttgtagcacccagagcatatttctctggcactgtcactttggggaatccctggcctttttcaacagtgagacagtgattataataatggtggctaaaagcaaggtctttatatgcattacctcactgagttctcaccactcccaaaaccatccccattttatcgacaaagaaaccaggatttagggaggttaagtatcctgcctggaaggccacaacaaaaaagtgacagagctaggattcaaacctgtgtctgtctgaccccaaggttcaagcttttaatcataacctacactgcttcctgcatacgtcattctatattctaattggcttaaatgttctatttgttctttcaccttttttaaaaaacattattaattcttctgttgaactgagtcagcacctggcctggactcctgggagaagcgcttttacagctgctgcttgatacgtgccctgtacagaaagagaactgtcgggacagagacagggctttcctgggagcgtggtggagtgtggctgtgtgcccagcctggctacagggacatccctaatcagcggctggcaggcaggtgacagatggtgccgctgtctacagaagccatcttgcccttctgttagagagcttgtcagaggccaggtatcaaagggcagacagctgctgtatgggcactgcttctctgatcctgagctgcggagctgggagggctccccccagagctgcctgaccccctagagggctgggcatgtgcagggcctaggacacaacaggccttccatcaacagatggtattatggtagctgtgtcttccagattcctttggtctacatccttcctgcccccaaagtcacgtaggagccaatgattccctttgacaaatggtggcatcttagagtcagaaaatgtgttaggctgggcacggtggctcacgcctgtaatcccagcactttgggaggccaaggagggcagatcacttgaggccgggagtttgtgaccagcctggccaatgtggtgaaacccatctctacgaaatatacaagaattagctgggtgtggtggtccacacctgtagtcccagttactcaggaggctgaggcatgagaattgcttgaatctgagagttggaggaggttgcagtgagctgacatcgagccgctgcactccagtctgagcaacacagtgacactttgtttcaaaaaaaaaaaaaaaaaagaagaaagaaaatgtgttcggattgaaaacaacatcaaaggtcagctgattcaagccccatcaggtgcccaaaccctcctcagtcccatccctactgagtggtcacaccagctccagagctggggactttactacctcagggggctgaaacctgcctccttttagcttccttccacaggcctcagctctactccttggggtctcaggaaataagcctaatgcctttgcctcagcaatagctcttccagactgaagaccgggctggtctgggtgtctgcatcctctcttcagatttaacatatctcccacagttttcaagccctcacctttctggtgaccttttccttgggtttgtccaacctcgttccctctttcccatccaacaaggctttatgagatcctagggtagacccggggacaaggggttggagcggatgcagtcttgatcctcgaagagcccacaggaatgtcagaaggacaaacacgtctacaggtgattccagcacaaaggatgcaaaagagcaactgacacagacacccggggtaggggggcactgcatcaggtggggtgggcagcagaggctgcctgaaggaggaatccctgggccgggtctgaaaagccgagcaggggttaacagggcagggagaggaagatgatcccgtttgctggcctgcctctcccattgtgttgactggaatccactggaagcctcttggtgcagcctgaatgtcccccctgcacccctttctcctgtatctgacacatgttgccttggggcactcagtcccatgtggctttcttggaagccagacccactggggccccaagtacagctggctgttaggactctgagtttccttgtaagcagcactttgggaaattgccagtctcttctgtacttcaggccccagggaaaaatacttccttccttctccctagaaaaacccttttcctagaaaaccccttcaagggtcaggcctgaaacccagtttattggattgccaattctctgtaaaaacatttttttcctgactttctctgggcttattctgggaccacactaggaagcagagggaagagggagagaggctgattaatcacacgtcccctactgcgtccaatcttaacctgtaattacctgggtgccctattaggcctccactctgtgaggtgagagaggagagagacagaagggaaaccaacatcccagaaaggcaggcatcagttgaaggattctggaaatggtgaaacttagttttaacacaaaggcctcctcagcctgaaggaagttcttggttgaacacaacagctggaggaaggggttagtccctcttttcctctgtcttctcagccagacgctgggcctgagttcatacagctttgggtctgtggctaagggaggatttagagacatcctttctgctctttaggcccagagaagatgctctgttgagcagggaaggaatatcacaatggcttctccgggtgccatcaagataccttgtgtgcacaatagcttcttgtcttataaaactccaggtccagacacatgtagtctatgccctgggcatacctgacactgatgctaagctgaaaggatagaaatctagaggtcaccatcagcctctgatcacagctgggaggacagcagggattacccaggctgtccttcctgtcagaggtggtgtgtgtgtgtgtgtgtgtgtgtgtgcatgcacacatgcttaatggctgctggcccactgctgtgattgttcagaaaccaaaggctctattgtaactctgttcaccaggccttttgctattgagccctggggatggaactggatcaagctcagaactgctgcccaatggatgtgggctcggagtgctcgtggctgacacaggtttcaattttgctggtggggcaggggcagggcgggcctagaggaagaaaatttctgtttttatccccccagcccttatatttcctcctcagttactatgactcaggccgtccctcaactcgtgatgactgaagcccacacaatagcggtttgaaagtgacctcggaacagtccttccctccctcagctggtgctcacatgggctcttagagcaggtgggttgtccttgggaaagtccctgcattgctctgtgcctcaatttcatcatctgttaggaaaatgcccacacacctggatcattaacttcattggtacttataacatctcgattcttccccaatgctaagaacagcttagaggtgcatccagggtttgctgggttgaaccaaagtgaataaaaatatacaactctccatatgccacctccatggtccttctaggtgcaaagctctctgactttctctttgcctaatgaaagccccaaagctggaaacctttgcgagccaaccctctcccttggcatcctctaagtggctctttttcggtagcacaaatccactccctcggccccacacaagctccccaggtttgtgaagggggcaactgattgtgccctcctgatgctgcttgaaattttgtttttagagaggcgggagctaaggcttggggggttgtgactggcagtcagccgcatcccagcaagtgaaaagccagaagctgtcagctccatcctgcttccttccacggcctcagttttctcttctgcaaaatgggttggtgtggggtgtcacatttaatctatgcctgagaactgccctgataccccagaaaaatgcacatatgtgtgcacccatgtgtgcacacacacacacaggaatttaaaatgctccatctagggctccaagttctgtgagatgcagtgattgcaaaggcccttggggaggtgtgactatgggtcctcacagcaggaaaggtggattagtaaaggcatcttggaaaggaagctatgtagaaagcaagggagagatgtagctttggcagaatttcactgacatctctgggtatccaagcctcaaaggggtggaggaaaaggcccataatgataggaaaaccctaactgcctgaagctgcctccatctctaataattaaaggcagacttaatagatattaaggccctctttccagcagctgggtggccaggcaacttttatttcaataattagccgctgtaagtcacacagaactggagacagataaaggcagggccagtctctcatggagctaattgtgcccagagttctacacgcctaatcaagccttgtgctgctcccattcctttcatccaaggcctcaaaggactttgccgttggtaattaagtcttataagtgccgtaaagaaagggattctccagggcagtctgaatggagaagaggctgctggggtggaggtggggcaggcagtgtgcagctgcctccaagatggggacagggatccaggaataggccccagcctcacagcctgtgccatcgcaagccttcggcctccgtgcattctgtccctagacaagataatggcagactgggtggcttcagctggccacctcctcttgagactggttcggttttgtcatccaaagcctttatacgtttctcaacccgggggatatatttgttaaaaactcccattcaggcagggctaattcaaaaaccacactcccaaattcttagttaaaagggaacatgagggatacagttgcccaagccccatctgatgcttgaattccttctgtgagtccacgtggatagcagccagcccttgtttgagctcccgtgacagggagcttactcctaacacatttcattctctaaacttggccttggacaattcattctgatagtgagctgaaacttacctcctgtgagagccttcctggcggccctaactccatatgccttagaacctcacaagcaagccaaagacctcctcccaaaccaagacctctcttctccaggctctgggaagcagtggagcaccatggttaaaaacacaggctttacatcaaaggcatgatcaaaaaaggaaaatttgataaatggaacctaaccaaaattgaaaacttgtgctctgaaaatacccttaaaaggaggaaaaggcaagctacaggtaggagaaaatttttgcaaaccacatactaacaaaggaaggcctagtatctagaatatatatatatgtgtgtgtgtgtgtatacacatatatatatgaaactttcaaaatgcaacagtgagaaacaaacaatccaattagaaaatggccagaagacgtgatccaatatttcaccaaaaaggatatatacacatggcaaataagcacatgaaaagatattcaccatcgttagccatcagagaaattcaaattaaaccacagtgagctatcaccatacacctatcagaatgactgaaataaaaaatagtgacaacattaaatgctggcaaggatgcagagaaactggattacccatacattgctggtaggaatataaaagtgtacagcccctctggaaagcaggttggcagtttcttagaacactaaatatgcaattactgtacaacctagcgcttgtattcttgggcatttatccctcagaaataaaagcttatgttcatgcaaaaagccgtacaatgatgttcataaaagctttattcataatagccgagaaatggaaacaacccagatatccttcaacaggtaagcagttaaatcaatgacagaatgccatggaatatgactccgtgataaaaaacaatgaactaatgctaccaataaatcaccagggaattatgctgagtcaacacatagccaatcgccaaagctttcatcctacattattccatttatataacatgtttaaaagaaaaatgataaaactttagcaatggagaacagattggtggtagttagggggttagggatggggtaggggtgggagggaggtgggtgtggctataaaagaggactgcgaaggaaacttatggtgatggaaatgttcgttgtcttgactgcatatactcacctacacatgtgataaaatagtatagaagtaaacacgcacatgcatgcacacacactcattcagataaatgcaagtaaaatggggaatctgaataagatgagtggattgtatcaacgtcaacatcctgcttgtgttatctgttcttttgctatagttttgtaaaatgttactattaggagagactgagtaaagggtacacaggctatctcttgttatttcttataattgcatgtgaactataatgttcccaaaaatttcaatgtagagaaaagggttttttttggccgggtgtagtggctcatgcctgtaatcccagcactttgggaggccaaggcgggtggatcacgaggtcaggagatcgagaccatcctggctaacatggtgaaaccccctctttactaaaaatacaaaaaaaaaaattagcggggtgtggtggcgggcacctgtagttccagctactcaggaggctgaggcaggagaatggcgtgaacccgggaggcggagcttgcagtaagctgagatcgcgccactgcactccagcctgggcgaaagagcgagactctgtctcaaaaaaaaaaaaggggggttttttttttgggtcaggcttttttgagtcaggcagaccttgatttgaaccctgaatctcttacatacttctcgtacaactttggatgataaactctctaagcctcaatttccttatctgtaaaatggggatagtatataccaccttacagggttgtcttgaggctcaaatgaggtgatgcatagaaaggctcaatcctatgcttggcacttaataaagactcagtcaataggtgtaaatgttgccttgttatccaggagaagtatttatttgccttcccctgattcagtcctcactcacgttgtctccatcctggccattcttctctgaaaaagtttcttttggctaatgtaaaacaccaaggttgaaaattgaagtcagatgcagtcttattacctgaaactgctctgcatatacccataaccccacactttacatgctgttttggccaattgcttgccacttatttcctgtgtaatgtcacttttccttaataaggtagcaagctgctcagattcatattgaccgaccaattcttaaacatctactatgtacagtcaccaatattcatacaaacaccacaagcacagcatcctgtatttattactaagtcaccagaacgactctggaagtgaggcatgatggtagactgccatactaatggctcccaaggaatcatacctccctgtttccaaactcttgtgtagtcccccacactaactctggggttggccacatgacttgcattggccagtgggccaagcggatattagcaaacttgaatcagaggcatgaaaaacacttgagcctttgggattgccttctccccctgcttttggaaaacagctgtcatataaagaggcccaggctagcctacttgttgctggagccacagggctgagccaaccaacacccggtagattatagccacacaggtgaacccaggggagactagctgaaccacctagctttgcccagcccaaataactgactcttggaaacaggaaccaacatgcagtcattttaagccactgcattttagggtgatatgttatatagcaaaggctggctgacataggtatttttataattcccatattactggggaggaaactgaggatcagatcattaaggtattttaaaaataagaggaactgggtcaggtctggtggctcatgcctgtaatcccagcactttgggaggctgaggcgggcagatcacttgaggtcaggagtttaagaccagcctggccaacatggtgaaacctcatctctactaaaaatagaaaaattagctgggtgtggtggcttatgcctgtagtcccagctgcttgggaagctgaggcagtgggatcgcttgaacctgaaaggcggaggttgcagtgagccaggatcattccattgcactccagcctgggtgacagagcaagactctgtctcgcaaaaaaaaaaaaaaaaaaggaaatattacgagggtaataaggataatgctgcctagtgtttaaatagtactttagaacttatacatttctaacacattttaatgtgatttaatctaccattctgtacctttttttgataacttaccaaaattatatttaagtagttgcttaattatatgctctaagctctacagagttgggaactgtgtctctcttgttcggcataaaacccaagcttctgtccttgcaaatgtaggcacttaataaataatggctaattgaacaaatgaacaaatgtttctgagtagctatgatcctgtattaaataaagaactgaagcttagagaggcaaagtgccttgtttccaagtcacacagctagcaaaaagcaggaaccaggactcagataaagcccaattcttttgactctgagtgcagaggtatgtccttaaattttccatgcattccgagggtgagacagacaaggaaatgattaactaccccccagttagaagggaatgtcgttggatgaattccatatgtttgaggaatgccagtccccatgctgagaggattctgatcaaaccaagctccccgctggagcagaaacatgctgcatgggaatcctattgcttgggatcagagatcgctgttagcacaagtcctgcatgaacttgtaccatccagcctcaaatccctacaaggcttccaaatcaaacaaaaaaccatctaacaaacacagaagcgctgaaaagatctgtcctcggccctgggcccagtcgcatgttccttagtgagggatcgagggatgttagctctgagctctgcattctcctgtttcagatgcccccttccctttacaaggtccttcctgcagctcactgtacagaggtgacattctcagaatgtccttaatcactctgcactgggggtgaaggaggggcccctgactctagctgaggaggccctgtttgccttcctagcagtcaccagggtatacaggacaaatgctgtgctcctctacagcctccaggctgcacacgcactacagtgggctcttgtgggctgagcagagcctccctcagcaactgtggctgcctctctaccttccaggagggccccaggctgttctttccgtggggaagctctggcccttggccccgcagctggctaatgttacacctgggtcactggagtctggcttcccagggcccgatcctcactttgttctcttgattgtagttctaaatttgttttcattaagacactctgcctgtcactccatcggttctgcttttatgggtctttaatctcagttgtgaaatgtaccagtcttggaggctcctccagctggagtggggctgcttgctctctccagggctgaaacccagagggtgatggtatctagggcccagcctggcctctgctggccggcaatggtccagattgtctagtatggtgtttctaatggaaagctccttcacatctcatgtcactgagaccctgtattgcggggagacagggagggtgaaggtcatcaccatctgaacctcacagaggaagacattcctgttagaaagaaaggggtgcatagcagcccagacattggctctgcagtcaggaagccaaggttcgactcccagctctgtgcgccccagctgtgtgccaggcacaattcacttaacctctttattcctctatatcatctttgaagtggagataattgacctacccaatagggttgttggggggactgagtgagttagaaggagcttagaacaggcttcgcacttggctgtttattatgactactattgctaagtattatcaagtatttaatacttcactccggcccagatgcagttctggatttctccggcccattcacactattgcattaagacgaatgttcctgttcagcattatttgtttattcagtcatcactgaacaaatatgtactagaaacctactataggccccatctgtgctgggattgaaggtgacaagggtttggttcttgtcctagaaagacagagcaggcaccagttttgagcaggtatgttgcagtttgaatctcagccctgcatagccatcccaggcctcactttcctcatctgtaagatggtcagttgtttatatccctgccatcctgcctctcctgcagacccacatggtcatctgggggtctggagcgggaaaatgtgatggagccttcccagacaaagccctggtcttcctccagctctggccagcagggaggagaggagagcaatccttgaaacaattaccttgggtcactgtgcaggcctgtgctctctgggaaacctgaaccaccttcaaagggagggttttaattggcttagactctgtgcctgctccaagggagcatcacaaaggggattagcccccaagagggccaggccccacaacaggctagatggctggaaactggccctttttgcctcgaccttcccaagttgtgcctgctttggcctgctagcttccttctcctcccattccacgagcgcaaggaaagggtgttcaagtcagagcctggtgctaaacaggaaacaggaagggcccagagaatgatttttagcataatctaaaagaaagagtctgggcttataatttggtctatagcaagtaattggatctacctcaccagagggaagtgcccagtccttacctggacctggcacttcatgatgtacacagcactgccaatcacactgccccagctaacccaaagaagcaggtttcatatcctcatcccaatggttcagtgagcgaatagcaagtagtatccttgctacttaatgtttggcccacagactagtagcattccaatggccgcaggcaagagtgtggggtctggctcaagagagctgactttgagacctggctttgtgatgctagacgaatgacactaatacaccaataacaagtacacacagtggttctcatttgctgggctcccactaggtgtctggtgatatttgtgtgctgttgtgttgccattttatagaaactgagaatcacagagggcaaggatttgctctacatcacagcacttcttaagggagctgagattcaaagccccacacagagagcctccatttttttagctatatcatggaggtgataaaggtcagctacatttagatggaaatgtcacaggggcaggcagatgtggctttgaagctgtgaagcactatacaaatatatgtttttcttgttgaggaaattaagcctgcaccaggagaagtgacttgtccaaggtcacctagctggcaaggagcagagctcggactctactacagtgttctgatgcccaatgtcccttccacaaggctgcagctgccgtctgcaagaggatttccctggtgcaggacaagggctatgaatctgcaggagcaatcaggctgatgttatttaaatacttggctatttgaaaaatataacaacaggcagttgagaataaatgccaaacctctaattggttacaaacaccacctgagggcacagatatttgtcagcgtgactgatgcttcctgcttaaatgcaacatgcagacacccgtgcagaagaaaggcaggtggcgagctgcctatggcagcaagtgaagagggctgcactgttgagaaggcatggcttgcatctggcaactcattcgttctgcattgcattccactgaagggagagttgttacactcctgttactgatgagaagccaaggcacagagacgctcaggacttagccaaagttgtatagtcagtaagtgcctgggctgggatttgaaccccgaactccatcccctgtgcgcctctgcctcccatactacttttggcacttaagaggtaagaggtaacatgtttggggttttgggaactcaagccctggccttgggacttggtggctcaccactccatctctgcccatcatcctttcctaagttccctattcaaccgacgtccctgtgttgggcatgaggctgccaagatgggtcttttatggtcctatcttgtgggacttcactgtttagtgggagaaactgagccagaaacagataatccccatcccagatcctgctgaagggctgcctccctcacccattctggggttgtgggggagtcaggctggctttttggggtggctgatacttgtgagagtctggaggtacagtgggaaatgtcagacgctggcagtcaggagaaaggggaaggagtaggttgttaggtttcagagctcttactcccggtccagcctaggcgcttacttattttttatgtgattcacatattgggcttccatttcgagtttcatttaagcaatcagatctttgtctaaaaacaagctagaaaaaccactgccttaagacctattctctatttggactggcctgaatgaatgatttataaagtatcagcttgtcagcctgggataacttgattcattcattcttcctgttttctcatttaagaagtccgtcataaatggctaatttattccttttacatatatctattgattatctgttatgagccagacaccattctaggtgttggagatataaaaaaaaataaatctctcatcctgcctgcattcctctaccctgcggaggaagcttctttgcagtcttcagcgtaatttttctaaaaagcaaatcagaccacaatcctgtccctgctcagaaccttaaatggttctctactgcctaaagtcttgctactcaaggggtgacacatagactagtagcatcagcattactatgcttgttaaaaatacagaatcacaggctctccccaagacctactcaatcagaatctgcaattagatccccaggtgactcctatgacactgaggtctgaaaaacatgggactgcaggatgccaacacagaccttcacatcctcacacctgatgtgacctctcctatttcatctccaccctcttttttcaaatatacttagtgccactctggcctgcacacctgtcatctcctgcatccaaacctttgtacgcatgctgccctcccctagaataaccttcccctcatggctgccagctgtaattccttcctaacttgggagtcacgcttaaatcctccaggagcttccttagatgccctcccacatgccccctgacttcatcgcctcatcatccctcacttccccaacccagtgctcctggattctgttggagagctcagtgctctgcaatttgtctattatttaggtgggtgttggtctcattcaaaatatggtgagccctggaggcaaggggcaggcctttttttctttacatccctccattccaactccatctctgctgccaggcactggggatgcagatgggatttagagcctgccttggggagcgcccagtctggtggggcagactgactttcaaagtaatgagtgtacgtacatgttcttgacacaggtttgtggcaatgcgtgagatgtttactgagctgaaccattttcaaggctgagggagccaagtgaatgatcactgactcccctcctcatgcacctttcccagtagatcttccattctcccctgatggagacctcctgactcctaggccaagttctcgggagactgcgtcattcgcatggacccagctttgtcccccatcacatcctggccatcagtggaccttctaagtgtggcctctatcttctcacatggctagcagagtgtgcacaattggtaggaaatgaaatgctcacagccagccaggcctggaaagggttcatgctgcttattttaactaaagagtaggcggccagttctcttcattcttatcccctgctcaatgagtcaagttagtacattaataaagtaatgcattaattaatagatccatcaaacatttactgaacacctattttgtgccaggccacagaggcagatgtttagaatacaaagataaatggcttctggttgctgctcccagctgaggcttttctcctggttcgtaggaggaggctctagaatctggagagctggctgctagccctggatcccttgtttcctgaggtaagttactctaattctcagagccttgttttccttatctgcagtatgaggattgtaaccactgagctgtctcacaaacttgagaggctcaaacagaattacatgtcaagagtacttggtaagttgcacaatgctatactaattgtgcaatggttactgagacaggtggtgttagtgacttaacccaagaatcattctctaccccattttccaggctaacacaagccaaattttgctggagaaagcaacacacttagccctggggcaatgactcataatttggctaaggcaatcaagacaagtctgtttcctctttgccagatactcaacttcccagcctcccttgcagctagtggtaatcatgtgacccacttctggccagtaagatgaaaaaaggaagttcactggactggcagagggagcttgggagggcttttgctgatgccacttgttcttcttgccataaaggtaagctctgctggccatcttgggattggaaagtgacaggcatgaggactacgagccacctttaaggacggtggagtagagcaactttccctttctacttcccccattcctagggccccactcaaggcaccatcctctcctgggtggaggctacagcctctgatcatctgctgtatgatgattcactgtgatggcaaagtgggaggagatgctgatcctgaaaacagtatttatggtccagtgtgggaagtccttggggcaaagaaagcactagacacagtgggaacaaaggagggggaggcccaatccagagtggggatggcttagaggtcagaaatgctgggggaggagttggaatgcatccccttgtctctgtctcataggtgcaaatctcatccatgcaacaggacaattccagggcttacgtcttctcctcctggagcctccattgctctcaactcaataaacactaaataagacttgcccaaggccatgtaccttgagccaatgccaagccaagtcttcacatcccatctttacggtttaggcttatgctgtccaatatggcagccaccagccaggcacaggtagctgaatttaagtttctaattaaaatcaaagttacaaattgagttccttagtcatactaggtacatttcaaaagtacaatagccacatgtggctagtggctactgcattagagactgtagacatagcccatctccatcatggcggaaggttccactggacagagctggttcagaagcttgagataatcagaaaataactcacagatccctgcctagagagcacaggactgcacagcaagcatgggttttggggccagacagcctgagtatttggatggagtaaggaaaaaggaggggagagaacacttcctgagtgcctgtgatgggccaatcactgtgcagtatgctttatatgtgctggcccatttatccctcacagcagctctgtgcaagtgccatttttaaattccatgtgactgatgaagacacggagctcaggggtgtgaaaagagttgtccaagaccccatgcctaggaaacagtagggctgggatatggatcgagatctgactccgagcccatattcgtctaccatgcctcttttccaggatgtcaggtttggaggtgtttcctcccctcactcccttgtgaaagaaaggggtgaatcagtgagaagtgtcaaattccagtaggcattggggggtgggggatattgtccacacaggcccagagagaggtagtcctcccttcagctctgactgtctccccagcctaggaggctaggtcacagggcaaaatcattctttcctgggcctcctctcccaggctgggctgttgctattagaggcctccgtaaatcaggccccagtcacccctggagactccagaccagtgggggaggagctcctactgcaagaagatcaaggtgctagggctctcccagggagtttgcggaagattcaaaggctggggcctgatttacgaggctgcctgtggctccaggctgtcccagatcaatgcctgcatcatccttaaactctgcattagtctagagatgtgtcaaaggatctgaggccagacccaggacaggggcagatctgtcccttctcccctgcaaggaggcttggagtcagccatgcctggcaggagatgtgtccatgtccaagatcttgcatcagcctgggcatttttggctctgcctgataggggtggggagaggggggtgaaggggcaggagcaggcccctcttggaaatggggtccaggctgcagtcaggaagctctgcccacagaaatagccctagagccagccttcactcctcatggcaaccctttcagggagggaggactctccctttttcatatgaggaaatggaagctctgagagggcaggtgcctcgcccaggtggtaagcagcagggcaggatttgaacccagttctgacactgaaatctctgcttcttgccctctgcctccttgcacagtaccccacacttagcgagtctttctctaccaactccaaagacaaaacttacaagccatatcattaatagcaagtatatattcctttgtactcttccaagctcttccatagccctaatgagtgatgagaggacactgcattatctgccctgggaagtttataaaacgggatggactcccttaccaaggctgacatccaggccggcaacctgccaggagacccagggacccggtgacctccagaggcccttccagtttgaggcccctctggtgactaacctggtcctcctaccaggaaggaagcagactccccagtgctcactgaagccataaagttctcagttcttagccattgtagtactagtttccatttaaagacacatgcccaagaggtgctgggtcactcagtcatcagtatttctttcagtaacctggcaaagtattttaaatgtgatttgcagaagcttataggagttaatgcctcacagatagtaagtagcagagttaggggtcagcctggcttcatttacttcccacaccctgtgttcccatggcagcacctggcctctaacagcaggccaggccgggagaacccattgagggtctctcatgtgccatccgattgctatctctttgttcctctgcccagacggtgtctgacttccaggcaacaatgcacacagaagttacaagtgtggatactagagtcagagcctggattccaatgctgcttcttaacagctgtgtgactttccacaagtaatgcaacatctctgggtctctgtttcctgttctgcaaaatgggggtactgtctacttgccccagggacctgctgtgctgaggatcattcccaggaagcacctagcaccatgctgggtcctggcaagccactgacaaatgttcactgtcacaatggccctgcttcctctggtgctcggcaccaggctgacatcgagtacacagtcaatgaagaaacaaggagactctgcaaggagatacattaggatgatgtactgacaaagccttgggaaaactgctggtgcctttgctggggggaagatttccagatggagctcctcaggatggcctgccaatccaataaactcaggttcctagaaagcctcccccaccccaccccacccccactctgtaagccccacccaaaccaggacagcagcaattctccccttcccctggtgtgccttccccggtggtctgtttctttaggacaggaacgcagctgtctggaaggcacccagggaagccattccttgggacatgtcccctgacccacccccggcaaggctgggatgacagaaggacaaacccagccaaacatatggacccgtggcccaggataggcaacagctgggccactgcctgacttttcttctgctccttggaatattctggcaatgagaagacatagtctcagcaacttatagacattttcccaggaaatcctaaccgctaagggaacaatttgctccattctcacacatttcaatctacttatttggaagaccaatccttgcgtgggcatgcacgcacatgcgcgcgcgcgcgcacacacacacacacacacacacacacacacacacccttcatgtggtcttgtgtagaagtacacaaacctgataatagcaaccactaatatttagtatatgctaagtaataaaagtagctactatagtcatcatctcatatagtcctcacaacaagcattgagacaggggctctatccacatttcacagatgaggacacagaggtgggctgcctttcacagaacaagctgctagccatgctggggctggcgtcggagcccaggtctaagaactctggtacaaggaatccactccctttcccggatttgcctcctccacctgtgcttaaggagttaaccttgtcggagaggttttctttccttggttatgttttctattctttgggtaagtttgacaaagtggggttctttttcatcgccagagtctgtgtccctggaggctgaggaaggaaccagaagttgcactttccaacatggatcgcctgctaattttccaaggcagctcagcccctgccagcgtcccctccctcctttgggctgagggcccaggaacccagcctcaaagttcagcttgcttcctccagcacgcacatttggaaattgaaatttcccacattttcaccacacaaaagccaggttgtatttttgttctcttcaaaatatgccaaaggaatttttcctaccccttgaactttctccaaaaataagtagaaaaagtcaagaccattttgccctgtaagctgagaatagaaaaatcaacatgcagggtgccatttccaggatgttacgaaacagcgaacatgtgaatccgtctcaacaccatttggcaactttggggatacagtagatgatatttctcacccacaaactcctcactgagtttatattaacattttgctttttttttttaaaaaaaaagaaaaaagattctgaaaaaggtaagaagccttgataaattaccaccacctggattaaaattcagagtcagcacactgaccaccagcaaataaaacatgaaactatacagataacttagtaaaacaaaaaacgatagtggcccaagataaattaaacttgcagcataaaggttgaagccaaggaaggaagggaagtatttatcccataactaatgaagactgcaaagaactaagtataatcgtaaaagtacatggattattctcaactcaccagatcatccattcccaggattgtctgcgatcctggtctgggcttcccaggcccctgtatctgctgccttcaaaaccctgcatgcgggtctcttgtgtctcccccacccccccccatctcccagctcagtgagaatcatctttcacagtttgatcacatcactcccagctctgcttatctctcctggcttcccttctcaaagccaaacagctagctctgcccccagggcccttctcctgacccctggctcctgacagcctactccccaacccctgctcatcacttcccaggaatttgctttaagcaagggacctgcctgtgcactggcctccactcagcacgagtctgagagagtccaagtagaaaacaggacacttagctaccatctactcccaacctctctcctgaggaggactcaccctaaaggtaagctggctgagtccatcagaatttgctcccatgactcgagtaaccgggagctcatgcacacctgtacggaagaaaagcagacagaggacaaggcttgcagacgaaaagtgtacatccaaacccatctctcccagctaccagctgtgccatactgggcaagcgatgggtcttctctggggctcagaccttccgtctggaaaatgaggctaatgagtcctacctcatagccatcaacgacatcaggaacatcatcatcatcatccctggacaatttcagtgtgaaaggaacgtggtattgcagctagtaagacctgaattggaatcccagctccagaacttggggaaatgagtcaacttctctgaccttcactttccccatctataaagtagggatagaaaggtctccctcaaagggtgactgtctagattgaataagatgacacatgtaaaaatggctttgcaaactgtttaattggaataaatatacgcatttttttctgctgagctaaaacctgacttacggtaactcacctgggaactttggtacacagagatgttcctgccacaaggacctctgagccttccctcctcctgttggaggagctccgttccttagtcattcctgggggtctctggtttgccttgggcaccacctggattcccctcctgccaggggtgcatctgagggagtgctgctgggatttccttctgtggggatctagccccagtgcctttgctccagaccctctctcctttgcaggccccccatatagtcttctgtggaacatcccatcccattgttcatgtccttttccctgtcgttctcatggtgtgaatttaaggtcccatggggagaggtcagagtcatggtgtcctctttgcctctgtggtcctgaactagtcatttcccctcccaaagcacttgctcccctgggtctatatcaaagaggtggatgatatcatcatcaggtctactaattgcaatgatcatcaaaactatttcatgcagattttcccaaaatgaatttgaccttgaatactcccccactttcccctttaatttttcagtagagcttctcagggattgtttaggaaggactgggactacagctcttcaatgctgacaccctatacatctgtatgctctttaaggcaagatccccagagacctttttgtaatcctcaccacaaggaacataaaagttggccatagccatgattgcttctagattgacagagagcacagcaagctctgctgtcaccacgtggctcttgttaatctgtacccatctatctgcctagcaaacacttgtactgtaaccttcatgggtgcccatgggggttttaacagctgtggagctttttgtttctcatgcatttgtgcagccatttgctgccccaagtatggggagatgctgttcatagcagtttagcagcagtaaagggctgtctggttgagcactttcacgccagggccgtttttagcatctttagcaatctttgcctggtactctcaggtggaggaggggagacaaccacttatatccctcccctgagcacgtttccctgtctgtaaaatgggtataaggatatgcaaatcatagggtttccgtaaacatcaaatgctataacaaatacatggagaacagcatatagcacactgtaagcagttatttcgcacttttctcaacttaaaaagctcatcacccttaggtccccgccccctcctacacatcactgacatccagtggcagatctgggtaactacaggtgtgagtacccaaagctccagcctcttccgtgcccagtggacctcgtttcagggattgtggggtgtcttctaagtagtgttagccaagacctgcctctgattttccaggcacttccatatttatcatctaatttcatccccacctcaacctttaatggtgaatagcttacaatgacaaagggaggatcatagctagttgtggggcaggactgaggcctgccctcgatggtaaattccttgaggtcagggaatttgtctgtctcatttcccacgacatcatccctgtacctatggcgctgcttggcacacagtaagtgctcagtaaatatctgtagaagcaatgacaattttaggaaaccccaatctgtgccagtccccctccagtttagaagtccatatggtgaagggacttgctccaagtgacaagtggcaacctgctccaggaataaacttacaaggaagcccctccctctctcctcccaatgtgttttcaagtggacaaaaggtatttagcaggggtgttcttaaccttccactccccttatctggaaaggagtctgcctgtgtcctctgtccattttctccaggccctttcccatcccccagaaaaggtcacaccagactggggtagggaaagaagcaaaaatggaagctgcagaggcgtgtgggctggactggggagagtgcttctctgggggagggttgcaaagcatccaggattataaagaaaagcaagagaataagtgtaggagggcagctacctgggaagaggggagggtattgggggccatccccagggtttcaaaggtggcatcatgttctgtttcttaagctagctggtggggccatgagagtttctcattattgtttacactgaacatatttgttataaacactctctgtagaatataaaaaattttcataaaaaatattttaaaagagatataggagaagctgatgtcagtaaatgcagtagagggcagagagaaaaggcggattttaagcagtttttctgtggatttggtggttcttgataacttctgagaaatattaggtggaagtctgagttattctgatgttatttctgattgttgggccatgtcttgaccttggcatgctccaggactaacacacagggtcctggctttacagcccttactttggcttgactttgaaatggattgacatggcggagaggctcttgattgatagaagcagaattaagaaaccgttgcgtcctggagggctgagtaatcctgcacagtgctttacttctctgggttccttgtgttacgtgggtaaatgatgctctgcgcctcactttcctctcagggctggtgtgaggatttaatgagaacatgcaaatgagggtgctttataaaccagaaaacatgctgtaactgtgggacgactattaccataagcactgctggcagaaaagtactctgaaaatgacataaagtgccccccaaatgtgaggcatttatgttataactgggcataactttcagccaaggtttcctggaacagaatcaagttttcataccactccagccaaaacaggtggaaagtgcacttggcagctgtcttctagctccagaagatttatgatgagagactggatagtgccagggctaggaaccaggctccagggccagatcgtgtgagtttgagtcctagcaacactttctactggcttgggcaaagtatgaccttgggaaatttcttaacttctccatgccccagtctcctgatgtataacatgggcaaaacaatggtagctagagcatagagctcttctgagaattaaatgagttggtatgtacagtgatcaggacagtgtctgacaaggaggaagcgtccgtcaagtacagcagttatcaatgttagtacaatataggctccattttctgagggaaaaataaacagaaggaataggcatctgttgcagtcatacattggaaagctgggttagacacttggaagaacttcctgagaaggtcgcacagtgctcatcatgaaatttgggggatccccagggagctccctcttgttcaaccatgggctggtgcaatggtaaagctgaagctccaacactcctcagccacccttcgaaaaatataagaatatactctggctcctggagaagccagcgctgagctaggtaaataatcgggaaatgctgaaaaatgacccacagccttgtccctgctcccaaagctcctggtacctggtggacatctgtgagatgttatgagggttcaaggaacagcacatgtgaagcccttggcatggtgccttgcacaccgtaagcaccatggtcattgctatcgcttttgtctgtccatccatctatccacccatcctcaagtgatctttccaaagcaactctgtccaaaaaggactttctgtcacaatacacacattctgtatctgcactgtccatgtggccagctagccacctgtggctgttgagcacttgagatgtgactagtgtgactgaggaattgagtttttcatttaacttttttttccagatgttcttatggattttttttaaggtcacttttaattaatttaaatagccgcctgtggcttgtggctaccacattagacagcatagttctaaagccaaaacatagccatgtcacttcttggtgtcgagtctttccaagtctctagtccctttgatatgcatccaagacccagtacaacctccagatgaggggtgttccctgtgctcatcctgccttgaagccagatggaacagctcactgctccctgaatacactggcggtgccgctgtccctctgcttccaatgccctttctgccttgtctgcctggtaacctcttcaggaagctttcttaggctctccccacaatccaaggagggtggggatgcccccttggatggctcccccaacctccaggactcccccctcccctgggatttacccagcatggatcaaatgcatattagaataaaataatgttgtatgattatagaaataacacattgttattgcacataattctgattgctccctgaaggatgaccagggccatgttgtaagcatttctgtggctggtgctctggggtgcatagaggtctagaagactcagtccactgttgtgggcccacagtgcatcccctttaggtggaatcatggacttccaccaaggcccttccacttcccaaggtccgtcctcttagcatcactcgcatacattactgcatttcatcaatcctaagatgccagcaattgcaagatgcaccatcgattcagtaataggctttctgagacaagaaaacaaacaaagcactaccttaatgtacacatggattgtaagatactttccgatttcataaatgtcaaaatgtaaagaaaaaaattgctgaaaatcaaggaaagtgaggcaaactgtgagctggcctcttgggagatgccccttctagagactcattctgcagtgggcacttgaagggcaccttcctctgctccccactcgctgtcttaggcgaactgctatctgattgggcctccggaatggaaggattcagatgggtcctatggttttttgaatggaccaaatgaatattagaataaaaatttttctggatcatagaaataatacgttgtaatggcacctaattctctttcatccagggcgtttgtgttagctgtttcttcttcttagaacacccctatcccagatttcatttgggtctctcttccctatttttctcaattaaatgcccctctaaagagtggtcttcccttcctagctgaaattggtctcacctccccctgctctgtcagtttttctcaaattaaccatctcattttcttcccagcacttatcagcatttggaattaattgtctaattatttattccttgtctttccccagcaagatagtaagcttctgaaaagcaaggattttgtctcataggtattcaagaaatttttgtgagtaactgaaagtacagaaaagaataaagaaaataataaggactccctgtgtcctcactactcagaatcacaattaacatcttagcgcatagctatccttctagacattttctgcatctacgtatgctcatacgatcacgtttttaacattagagatgtgacctttctatttagactgctttctaatctgcttccccacctcacttactataccatgagtatctttcacatccatatcacagctgggcctcactggttttaaaggaggcatgctatttccccatatggagtaaccctcattgatttaaccggaccctgcaggtggacacttaggttgctccaggtcttcccattatgataagcaatgctgccaatgagcatcttgctgcaaatgcctttgcatgatgttctgcttatttccattaaaacgttattagtgggtcaaagagtatgtgatattactaggctttggctaagtagtgagaatggggccatttcacaggtgagcgatcctactgtacacaaagcactttacaaggctccaagggggttgagaaggagataggaggtgggctcatctccatcccttgggcaaatactgtccagcacccttgtgaagtttctaagcctcaactgaacggctgcttggagctagtgacttagccattagaggttttagtcatagacattatttttacaaaaatgattttaaaaggttttagaatacataaatacattcatgcatgtgccagaaagatgcaatttacaattaagttctataatcacacctgaccaaacccacaactcaatatagcacaggtgtgagccaccaacgaaccccaatttcagttcgaaagggtgaaatcattattttcaccctctcaacatatttaatagttgttgtaaaacaaatgaatataatttggcttcatttggaattcccttttctgttattgcttccttgcaattctagttgagctgaaatctattaaatacaacaacttcccatcacctgtgtgctcaagcaaatccagtctgacactgggtgaagaactacagtttggaaacacaggaacaaaggatgtgtggaaacactgacttctcatcctctagagttcacataattcaaatccaattctccccagccctcccagctctgccctgcctgccttcattgaggtcagatagcagagtgatgctgatccttcatataaaaacagcacatcacaagctataatataagttccacctttgttgctcctgatgctgggaaggttggctgagaaaacaagggctcactttgcagatgaggctcaggtcagggaaaggtggagctggtaggggcctgccaaatgaggcaggctggtcagtgcctatgtctttcccccttccccaagctggtttcagccccatggtttgaagtaaagaagtccccaaacttcaatttggcagctattgccctaaaccagatgactaaagggctgactctgagcagcagtttgcaagagcaaggtaacagtgttgctggctggttgagagaaccagcttatgccgggtgaactctacttagtattatgaattaatggtgctaggagatgctaattatgttctaaaggcttacctaagtaaaacaaaatgttggaaacttttattttgacattttgcttttccatgaaatcttaaaatcagaaccactgattcatacaaccacaaacaagaagttatattatttttaacaaattacctagattctagtcaccacgctaatgtctcacacatgctctcttcaagcctcaagataatcatatgaagtggaaatcattatctcctttttatagaccaggaaactgaagcccagaaagtaacattatttgctccaagtcacagagtgaagaagtggcaaaggcaggatcctaactcaagtctagcgccagagcatagctacctagatgagggaaggagggcaggaatctccccagcatagctgggtaatgatgcttttattcatggatcacacctttgcagaataccctctgggaggaagcccagcctagtggaaaaaggctgcttagggacaggcagtcccaggctggggtccttgtgttccccctaccagcagagtgaccagctggctgcttaacctctcagggcttcagtgtctccaagtgtaatgcaaagatatgctatcttcctgttgtgttgctgggaggactacaggaagaagcatgtgaggaaagagctaagcagtgcctgccacatagtaggtgcttgacagacgtcggtcctcttgcctgtccctgaagggaagccactgagcaagtcaccaacactcagggcttagggttggatgtgctctttgatgtcagctggctcaactctcccactttacagatgggaaaaccgaggttcagaaaggaatggcaacttgtccaagatcacagtgcagggcaatggcagagatgggacaagaactcatctgctgacccgcatcttctgctttttctacaacagcctgttggtaactttacctcttcatggcagctgccaagtgagctataatgtaagtagattagagatgaagaacagcatgaatattttgatgggttagtgaaaggaaaacaataactatttgaccaaagagtaattgtctagaatatactttcttatttatcaaataagtatgcagcacttactctgcacctgcccggaactgttctaaggccttcacaaacatgagcttgcttcatcatcagtacaatcctaggaggaagttactctttctatcatccccattttatggatgaggaacaggtggcacagagaggttaacttgctcacggttctatttctagtaaatgggcagagctgggatctgaatccaggcagcatggctacagggtccatatcataatcactatggcatgctgcttctcacaaggaataatgaatttatttttactgtatacaagactgcacattacttgagaatactaatcataatcataatcataatcatagtggcattaataggaaaaaatacaaacagacgatcccctctgtgagtttctttggaaacttaatggtacctccccaagtttccaaaattctccttccccatctctccacccacctctgtggcacatcccattcccctcacctggaaatattttccttccttgtctgacttccagtcttatccttcaagactcagctaggatatcactagctttgggaaagcctttccaacagtgtctcaatcacagagggtcaatgttccctgattcagcagggtttgaccttgtgtccatgatgagaatggctaaaaaagataatgactttcctcaaagaaccttcccagtggtctcagatcactccgctcatcaatgatgcccaggagtaagatcatagtcacttcactgaggcatggatgtgtctaatgcccttgatgccacacgcatttatgggatagcttctttgcacctggcattttcacacgttattgcatttaatgaacattccaagctttgaggcaagtactgtcaaccctatttgagcaagaaggaccctggattgggaaaatcagataacttgtctgaggccacacagccagctaagtgatagcactgggatctgaagccaggttcccaaatcccttctccaagagaaagctatttatgtaactgtcacagtaaaaattgatcctggcaagaactagcaatagatgcttaattcatggggaaaaggttggactacttacatagtcttgaagttgtctccctccaaaattcgtattacaaaaaggaaaatgataatgggaggaactggagaccatctgggatgcttagttttgtgtcaatgtggccaggccttagtgcccagttatttagtccaatgcaactctaggtgttgctgtgaagatactttgcagatgtggttaatatctacagtcaattgactttaggtaaaggagatgacttgataatacgagtggcctcatccaatgagttgaaaggccttaagagcaaaaactgaggtttctcagaaagaaagatgttctacttcaagactgcagcatcaactcccgcctgaatttccaggctgctggcctagctgacacatttcagacttgccagccccacaatcacgtgagccaattccttaaaataatatgtatgtatatattaagagattacacatatgtatactgtgtgtgtgtgtatatatatatatgtagaacatatatatgtaggtatacataatattccattagctctattatcctggaggtggctgactaatatgccatcttaaccaactcaccaaaattagcatcaccgatgagcataatgtacctccagatgttgtaccctgagaaggagacaacatcattcaggtagtattaacatttgtaattgaaaaaagataaaaatattaatgaaaaagagctatcctcctccctccatggctcacaggccagcaatagtagtggccactggacctagtgatcctgggtgcccctgacctggaaacggtggaaaatttagccaaggatctcctgggctcctgcccagttccctgtctgctttcccttctcttagcccctttcctccttcccttccactctctccccttccccattccccacacaaacacacaccgactcacaaacacccaccgcttgaaattttctctctgccgcccagaaggcctgggataattccatctcctcgattttatgaagccagagtatgcagtgagtcactttgcacacatctgtggattcccctcagagctggttgtctgcctacagagggatgttaacatttacggccgtgagcagggacatgcgacacttcaaggaagcaaggtgccagctacctttccaagctgcaggtggtttttaatggaagcagaatattgctatttattatttatttcacttcttatttttaaaatatgattaatatagctcaccaataaatctagccaagtacaagcactcgtgaagcacccttggagggcttggtgtgacaaggcctgatagctgtgagggcagaggcagccaggtgaggggagcttccttcagcctgaacatgaaccagtcttttttgtgtgtgcctttgaagcagtgattctccttgtgaggtgcccaggggacaagccaaggaggccttctagcaagcaggccaaggtgcaggagacagatagaagtgagaggctggttctgcggttgccatgcaggggagagggttttggagccaggcaggcaggccgaggttcaaatcccagcccacgcaagcgagccaggcaagctggagaacccctctaagcttatgttcctgcatgtaaaatagctatgaagtgtcaaagggttgccgagtaggtaacgagtacatgtttggaaagttctgaacccgctgccttccaaatcacagacactcagatatctttagcctagtgtttataaagacagtggacaatggaacaagaacagtttggttttgaatcctacctctgtcactcactagccatgtgactctgggcaattctgaacctctctgtgcttcagttctcttggctgtgaaatggggctacccacagggttgtagtaagcattaactgagataatccacacctggcacactgtgaatgctaatgcagctattgttgctttcgttactccttcctttactttctatccaccttcttccatggtctgatcccaaatgacaattcctgctggcacattcctacttattcaccgaaacctagtttaaatatcatcccttctataaagtcttccctcacccttttcgtagaaacaataccctcctccctctctgttgccaggaaactttgtgcaactccatcatcatcataacacagactgccgcccacctgattataaggggacccttgctcctgcatcccctttagggtaggaccaggttttatccattgccataagcctactatacagcccaacccttaacagctcacagcacacagagaatctggtgctgtttgtctcacactgcagccccctccctagccaccctgaagcagaaggggttgagagctgtgctcccctgtaatggcactcacagcaccctggggactcacagcgccctgggcactgcaggtggacagctgcagcctggtacctagagtccatagccccggaggtggagaggaatgcatgctggtgaaggaaagatgggtcatgaggattttctcaccagctgcctcctctccctgccaacatttttgacaggtgacagtgctggcctaggagggaaagaagtctctggagttcctggatctgtaagttgaagcagagcccatagaccagccaggtccatagaaacgtgcatgtcaggtaagttccaaagctcaggtcaaaaaagaggtcagtttgtggcacaggctcccacctgggaggatggatggcatgggtctgctttggaaagggggacactggcacctgggacatggtatctgagagataggccctttgccggtaaagcacccgaccctgctctccccggctaacttggacactttcctgggctctgcactatgcaagatctttgttcctctttcagggctaactcattcactaaaagagtatcaacagctccactcaacaacagccattcctggaacctccttgatatggtttggctgtgtccccacccaaatctcatcttgaattgtacctctcataatttccatgagttgtgggagggagccggtgggagacaattgaatcatgggggtggattcccccatactgttctcatggcagtgagtaagtctaacaagatctaatggttttataaggggaaacccctttcgcttgctcccattctctcttgcctgctgccaggtaagatgtgcctttcgccttccaccataattgtgaggcctccccagccatgtaaaactgtgagtccatcaaacctctttttctggccaggcgccgtggctcacacctgtaatcccagaactttgggaggccgaggtgggtagattacaaggtcaggagattgagaccatcctggctaacacggtgaaaccgcatctctactaaaaatacaaaagatgagctgggcatgatggcgggcacctgtagtctcagctacttgggaggctgaggcaggagaatggtgtgaacccgggaggtggagcttgcagtgagccgagatggcgctgctgcactccagtctgggcaacagagctagactctgtctcaacaacaacaacaacaacaacgacaaaaaaacaaaaacaaaacccctctttttctttataaattacccagtctcgggtatgtctttgtcagaagtgtgaaaacaaactgatatactccttaatggaccagaacctgtgctgggcacaggggacagagacaggtgaggccatgggcctgccctcgggagcccacatgctagtaagagaggctgccatggaaactcaaatatgatgtggcagcacacacaccacagaagaacatgggtcatacagagaaaggaggtgggaggggggtggtcaagaagagtctcagagaggagacgtgggtgaatcctggcttgaaagaatttattagatgaagagcagtgtgagaaaagcacttcaggcagagggatcaacacaaagatatggagttacaaaaaaaaatctgtgtggggaactctacattcactgcaggagggcaaggtgggggcagagagaggaagggtgatgaagaggctgcagaagtcagctggaagctgcctcattggtcgtgtagggtgcagaggaagtggtcttctctgcccagccatgaacacgttccgccatcagcagtgccatctttggacacttgaaagagatgcacgtgtgcgcacacacacatgcatatacccgtgtctgtaaatttatatatgcttgtgcataagtaatatgcacaaccaaattctagaatgtgggatgttaagctctgagatgtaaagattctcagaaatccagatagaattcagtgtggtggagcatatggcatggttgggggcacagagagtgtaaactgagaaaaagagagacctggttgtaagccctgctcagggctgctgcatatggttgggcaggttgttcactgctcaagcacacagctgagcggggtgattcaggactgtgtttatgggaagggggctggggtggagttagggtgagaggtaggtgggtgggagatggacagggaggttgtctgaggggaaccactggtcagttcaggtcaggccagggtcaggctggctgtggtgcggtagagacccttcttttaaatagaagctctggcttcagtgacttcccaagtcctttacagcacgaacacacccatacactcaagtaggttgccctggtttcctcattggtcaaggagcatcattcctaggggattgttcccatctagccaggctggactccctgctgttccactttccttctccaaggatcccactatggtcttcctctttcttcaaggcagagccccacctcctccaggaagtcttcctcccatcctctccccacccttcacttcctggtcacttatacttcaaatgtcctctctgcaccaacaagccgttcatattgacaaaggcagaaaagatcagttctcacttccatcaagcactaacttgtcctaggaggaagagacaccaaaatgggaattcttacacccttgctggtttcagcaattttcaggcctctattcaaagtgaaggaccctctcagatgggagaataggctggctgagatggtaatgaaacacacttgacagctgcacaaaagcaaagatgaaaatctactctttgttttatcatcccttcaagtgagaaagcagccagccctgggggtcagagtcagctgagggtcagggatataagctggacttcattcaggaaagggaggaggaggagaagcaagagagggaaggggaaggctgtcttggagtggatccaagacccacggagggaaagcatgaagaaaattcatatccttcatatcctgaatctctgaacttcatgggattctgtctgagttactcccccgcctattggattggtgtgtgtgtgtgtgtgtgtgtgtgtgttgtgtgtgtgacagagagagagaaagagagggggtgcttcagatttcacaaaatccattttaatcaccctctgcaatccacaacactctgtaattacaagtctcttactctcaaggacaaaaaaactcaccgagaaagcaacattaagcttgcaagcggaaacatgaaaattcatgaaacgcacaattaaggatccaatgacaatgttaactctcccctttgccagcctaggcactggggattaaccaacaaaatggcaattctcaatcctgaggtgtgtgtggtggacattgggaaccctggccctgccatgcctgctctgtctctggattcctatttgctgccctcagaggctgtcctggggcccagcatttactgtctgacccttataggagtggagaaggacaggcctaaccttagaaggaaggagaccaagacttgtgtttgagaaatgactctcaatgcttgttgttgcctgcacaactcctgaaagacatgaccagaccttgagactctttcccatgagttaagggaattcatgaagggtgggggttgtgatcattctcccatcagagtggtttcagctcccaaacgatctctccactcccacttctaaccccttagtccaggacctcctctgttctctgttccagggccctaactctgcctctatctcaacgccttgctgccaaccctgtaccaccaattcactctatgagctcgtgttcaggccaatctccctcaacatgtattttaaagcccctccctcctctctcaatgtcttgtgaataaagcaggatacaaagttgtagctgaagtacaatcttaactatgttacatagaaaaaaaataaacttggaaagacagaaggaaatcagccaagtgtccactggctacttttgcatttggtgtctgcaaggcaagaggtaggaaagggaggagattaatatcttataccttataattatatacctttctgcccttgtgcaaattttcttcaataagtacgacttacagtcaggaaacagtgaaactgtaaaagtcccctctcttcaaaatccttctgtagttttttattttctacatgacaaaatataaatctggagcctggtatttacagcctgctaagatctggtccccatcagaagggcttcatgggtgtgtgacctgtgcagtcacagagggccaacactcagaagcagccatgcttggttgaatgctctgccatgactgtcttgaaattctttatttttgaacaaggggctccacatttttatgttacataatttatgtaactgatccagttcatcagactgtcttcatgcagagaaataattatccaattatacaggacagagcaacatagaagccctctggattgttgtgtctgggtaaggatctccaaggcattggccaggatagataggaaaccctgccatatgtgcagagtcagagagaataaggggtattcagtctggggatgcgaagaggcaggggatatttagcacatgtttattaagcatcttgagcactcttctaggctctaggaatatagctgtgaataaagcagatcaagtctgtccctgctatactgagcttaagggctagtcagggagattgataataataactaaacaattatctatgtatggagggctatgaagaaaaataaagtaggaaagggagatagtgagggctggtatgggaggcaaactatttgagttaggacctgtaaggaagtgaataagcacttggatgacggaaacttggaaaatgtcaacatgtacacagacaattactatacacggtggggtttgccatgcagacacttggtgggaccataaataagaagcaacctgcccagcctggggtgggcagaggagagggctggggaggaccttggatttaatccatgtcaaattatctctttttatctcttttcgccaactctcaaatcagcagaaaccatattctactgactataccttagtaattctctttccattcccactaccatggactagctcaggtcttcatttccccagaatcactacaataaagtcagtttgttcttttcttctgatgctctaccctcccctgagtgatcacatctcctcctgggttttcaccctgaatcttatcctctagcctgacctctttcttgagctccagacgtgagtatccaactgtctttattcctgtggattctgagcatctgaatgagggtgaggcttcttaatgttccatgctggcctcagatgctgtccctatttgggcattccaaagtgcttgtccaagacatcagaaccctgcaagcaaggtgaggaaactgaggcacagatgagtgaagagggctgcccaagggccttcagtagcaaattctgctcttcctatcatatctgccaggcacctcacctatccctcacaggccaagatatgtccttctatgtaatctccaaggtctgctctgactcgaagagtctaggtttctctactctgatgaggccccagatgggcagacaggagaggcagaatctgggggaattttctctgccttggagtcaggacaataacttggccctttcagaaacccaaatttatcagcaccccaatggcaataggacctgaagacacttgaaaagttcctgtgagactgaagcacaaagcagaataacaatatattaattgacactgagaaacaaaattgtccacattggtcttaccgtaggtttctacaaagaataagccacattatcctcagaatgttgttgggtgggcatagtaaatcataaatggcatttctcacttattcggtgacactttggaacagaacttaacattcattatgtaaagttattctgcccacttcacagatgaagaaaatgagtctcagaaatgctaagtagcttgctcaaactcacagctagtaaggagtaaagctggggttcaaattcaggacttcggcaccacagcctgcttgtttaaccactgacagatgccaaatgcatgctgttgccacagagaaaaatagtgataagtttttgtctaagtcaagttgacgttgaacataatacccgtgacggtgctgtgaaatagtaaaatagtattgtagccttacagatgggaaggattattgttgaaaatgctctcccccaaatgaatctttataatcagggttttatgttgaacacactaggtgatagttactttttaaaggactcttcctatacagcaagtaaatgattttgtttctgaaaatgaatcatcaaccctgatttacttactgtttagcaaatctgtgggagtccgaaatatatcgcctggggccaggtagacctcagattccaattctggatcaacatcagccatgttgccttggacacatgagtcatctgctcagtcttccttatttgcaaaacagatgatactgtctaccccacagggctttttaaagagaaatggggggaaaggtgtataacatgcttagcatggatcctgcacagggtaagcacaagttttactttttatttttcagggtaatccaatttactctccagttcagttattcaagttgcctgtgtcattcttaccacagctactatcaccatcatcatcatcattattatcatttttattcagctacccaatgtagctgttcaattcactgtgatgatggtattgataatgcacctattcaatatgctgtccaattcaactcacacatttgtaataaacgcctaaccctgatgttgactttagcagtaaccaccccactgggccctgatcacactgtgcccatgtgattttccccttcatcagctctctttacgtcagagacaggcacataatggccgtgctaggagggaaatcggaattctttttgtattcaaggggcatgcatctttcttggttggcctacataggcaggaggctattttcaagcctgatttgaagcccatctcatgtcaaacaatcccagtctctagaagaggctgtcctttaaatgttgtgatcatgacagagccttgcctaatagtagctgggactggaagggctatcaggggctgggctctgagcacctgccaggtgatggggcgggggccaaacatgaccttggcttcatcaagcctccacttcccctaaggattctggggaatactcttcaacaaacttctcattgcctcaaatgatgttcaagccagttccaagtgtagctcctggcacattctccctggagagcagcagccactgtccacaaccatctgtaggcaaacctgcttgacagggtgtggtaaggccagctgaaccttgctcttccttgtcttagttttgtgatctcaggcaagtcatttaacctttctacacatcagtctcttcatcagtaaaatgagaatacccactttccacaggtaaatgaaggttgaatggaataactcctaattagccatcaacacacactagttccctttcccccttcccttcagacatacctgcgcagggaacacacataagaagacccagggaagagaatggttatgaaaaggcttggcaaatggcaaagggaaaagaaagaaatgcttttggggcattcactgtgtgtcaggcactgtgctagttggatgctttacagatgatattttatgccacattgtttttcatagcagctacatcattttgctgaatccatttttaaaaatgataaaattgaggttcagaggctaagcaataggcatgagaccacacatttaggaagtggcagtaagtggcagtcagacatcattctgagtcctgtgtgccatcactgagtagtaataagaatatggttatgaaaggacttggcaaatgataaagagaagagaaagaaacactgtcaggcactgtattaggctctttagagatgacattttatgtcattctcagaattactctggaaagaagatattacctaatccccttttaaaacattgaggtaaaatacacataatataaaatttaccattttaacccttttcaagtctatacttcaatggcattgagtacattcacactactgtgctgccatcaccatcatccctgtacagaactcttcatctttcaaaattgaaactccatacccattagacaataaagccctattcccccttccctccagaccctggcaaccacccttctactttctgtctccatgaatttgactactctaggtacctcttaaaagtggaatcatacatcatatgtcttgttgtgactggcttatttcacttacataatattcttcaggttgatccacgttgtagcatgtgtcagaattccctttctttttcaaggctgaataatacttcgttgcatatatatatgctacatcttattgatccattcatctgccaatggatacccaggtggtttgcaccttttttggctattgcaaataatgctgctatgtccatggacatatagacctctctttgagaccctgcttttaattcttttgggttccactcagaagtacaattgctggatctatagtaatttcatttttaactttttgaggaattgccatactgtttttcactgtagctacaacattttacctaatccatttttaaagataataaaattgaggttcagaggctaagcaataggtatgagatcacacatttaggaagtggtagtcagacatcattctaggtcctgggtgccctcactaaatagcagttcccaaagccagggctcagccaagtacattagaatcatccagcacacctgttaagcaaataaattcctgggcctccatccaggtctagagaaatagaattactagggatggggcctagtagtctgtattttcaaaacaacaacaaaaaataagctaaacaaccaacaaatgtctgggtatttctggtgagcatctaggtttgataatcattattattgtgataatcattatcattattgtccttgttgttataaaaatcattgtcataacaattccatacccacttcaggtcattgatttataactatctgaaaacagtgggaatgcaaggataatcaaggaaagaaagtctcagaactggctttgctctccagcaactgctggctttcaaagggggacacatttagtattctaatcatcaaggcatcagccaggcgcctgcccagacctttcttagattcctaacgctcattaagcagttcaaaccaatgtgttcctaagtaagtgtgcgcagaggcaggctgttggcattttaatctcattagtgaactgaagccctaagaggaagtagccacaacagcctcttgctccaatggggtaagactcttcacaccctgagactggcagcccgcccctctactctctcccatctgtcctctccagatgtccatcctctcctgatcctggagcaaaaggctctggtaaactagagcttgatgacttgcagggcagtggctgcaaatagctcgataaccagctcaggtaaccaggctgtctatatcccagaatagacattgaattatctaccccagcctgacatattccgttggcaccaggccacaggcactgctccctgaatccaactgtctgggtcccctcccccatcaatacccttgatagaagccagacgaggctttgaagccttgggaaggaagcatccacaggcatcttcccagcacaaagccctcattgttggatgaagaaggcatgggagtagaagagggagtgcttgtctattgtcaacgcaggacagctgaaaggacttcagtgaaaaatgaccttataaaccaacagatgagggaatatgcaaaatatgtaactaggaccatctacttccctaagatagagatagctgaggctttctctgcaaatgctcatagaaaaacacacagtaacacctgtactcacttattctgctgaaattaaatcaagaggcaaatgtaaaacagatccatccatccacccatctgtctgtctgtccagttaattgttttgttcaataaaacactaacttagtgcccaccatgggcatgaactaggctggaaggaacaacaataatcaaaatcagacgtttctaactagggacacattgttactggtaggatttgggcagtaacaatgctgaggtctcaccaagcattgtctataactgagtccatgtcttatgcaacatatgtaggagctgttatgatgaatactcattcagttaaaacattgctgaatccacagcagcttgttgtcattacatattttcccaacaataaaagtgaaaaatataaatactaaatactgggagattttggacatgctctaggcagataaaagtgcagaatcacaaagtatggtttcatgaatggagatgatcacaaccaaaaccactaccataataacttactattatatgacaacaaataaataacttactatttgttgggcattattctaactgctttacttgttaacccccacagcaaatctatgagatagacattactgttatcccattttgcagatgataaaactgaggcctcgggagcttatataacttgcccaaagtcacacattagtaatgggagagcttggatttaaactcagctccagagcgattgcttttaactatctttgtaatggtagttgtgatcatattgtccaaaacactcttagatggggagacagagacttagagaggccatgtgacatgcccaaagccacacaatgagctctggaggagctagggctttcctgtcttccattctagttttcttgtttacataggctttcttgtttacataggctttctaggagctttcctgtcttccattctagttttcttgtttacataggccagacttcaccccaaagtggaagtcaaaataatctgggcttgaggacaaaggaaaggcaagagagaccagaaagttcaaggtaaaacaaatgctgtctttttgtataatctggaacacggttttcttttcctgggttgttgctttgtctaggatttccttgggagaaacccctgacacatgggaaggaagactcaggctgtactgaaaagactctgggttcccagccaagtagctttattttaggcataaaggaccatgcggcggagtagcccagctcttccctggcccacacaagacttcatttctctctaattagcatctcacagttgcacagccaggaagccctaggaatgagggccctgttcctctgagcaagtagtgtccaattacatcccagtgatctgtctgtggccactgcagccatgccagactgcacagttggctcaggaacccatcgtttgctggaggacaggtcttagggaggcagcaggtggtggtggaaagagtttggagtttaacaatactggataggaattctggacccactgcacactggctgtctgaccatggacaagtttcctcactattctaggaccagtttctgaatctataaaatgaggataatacctttcttgtttatgagtgaacatatgcaaagcacctggcacagttttgctctgaaaaatgagaatataagaatagattgatgttgtccaaaccttttatcataggataaccactttttgtttccccaccgctcaagaaaaatactaaggtaaaatttcaatgtctaacagagattcaggattgctgctggttggtgaggggtttgtggggttcagggttctgcttaaaaatgtgtctcctttcttcctacagtgggccttgaggttcctctagggaatgcaatttgaccaggtgattgctagtccccttttaatgttaattaataaaaataatgcaaggaaataaggaaggaaggagggaaagaaaggaggaagggaaagcactcttttcttttatcactgggagatttatatttgtcgggcactgttactaagaagagaatggagctaatcgtccactagagaagttggagcctggacagcccatttaaagattaaaaggtgatttttaaaaagtggggttctatgggaacacaaagcagggggtctgattgagtttagcaatcaaggaagctgagacttggaagatgagagatgtccgctgggactagcttagcaatggcggtacagagaggggactggattcatgaccttttggagatagcatctctaggccttggtgactgactggatatggggtcatgacagtaaagggtgctaccaaaaaacgatacccaggtttctggcctgtaagccaggtttgaagctgaaagtagggcataaaaagaacaagagtccactgcctccatgatcagatccaacaagatccaactggtaccccttgtccactgcccacacaactgtccatccttcccccactaaaggaactgattcccaccacaccctgtgaaaagcattaaggtcaggagaactctacacagtctagaaaacatctgtaggcagaggtatttctggaaagtacagcaactgcttgcagtaaattaataatagatgtgctggactccctcagaaatatttacccagcctgcatggttaagcaccaataaccgggaagggaacctgagccttacctcaaacagccctgactactggaaatgaagcaacgtcatcctggctcttcctgatgccagtgggggcagaaaacaaatttgcagagtgcctcactcaggaatatgagaatcttcagtctgctgggaaacgttgggaaagggaactcagaccctgggaggtaaacactggaataagacaatagatgaggactgtctcatgtatcttatgcttacatagtgcttactatgggccaggaccaaacctatattaacacatttaatcctgggcgttattgagctggacactaaatagttatagcactatttttaggcccattttacagctgaaaatactgagatattgaaaagttacgacaactttcccaaggaactagctaggaagtgatggagctggggttcaacccaggtagtctggccccaaggtatatgccctaaaccactttgctttggctgccccttgttgccagtagtcaagagagggggtcaagtcagaggaaaaaggccctacattaaactgccaaaagtacacttggacgacaccctgctatatgcatcctctctgtctccagcctctgttgagaactctggactcttctctccagacaaacgcagtagccccttttttttttttttttattaagaatttactgagcactcactgggggacagagactgtgctaggcttggactgggccttgtgcaatgcacacaaaatgtcccttttcggggaagccccatcctctctccttccttagagctctaacctagccttcaggccattctctaggatgaactgaagaacagaggggtttgaataaacacgcaaaagggattctggggcaaataagtttgggaaacatgaggctagcacccttactgcaggccttctcagagcctttagtgtgctagtggccctgagatcaaccaagaggagtcagtgtacagggcttctcagatcactcaacagggaaaactttctttttcttcttcttctttttttaaacccattttatagggctgatgtatcacagaacacagcttgggagcctgggatattttgtcctacaataatacctactatgtcaaattcatattgggttttgactgtgggtccgttggcaggactctgaggctgggtactttgtcctgcatctctgccaagctcctgccttcagccaggcctaaatcagaagagttctctgcaagttttcttccacaatggtgtgatggttaatattgagtgccaacttgattggattgaaggatacaaagtattattcctgggtgtgtgtgtgagggtgttgccaaaggagattaacatttgagtcagtgggctgggaaaggcagacccacccttaatatggattggcaaaatctaatcagcttcctggctagaatataagcaggcagaaaaatgtgaaaggagggactggcctagcctcccagcctacatctttctcctgtgctggatgcttcctggcctcaaaaatcggactccacgttcttcagttttggaagctggactggctctctttgctcctcagcctgcagacagcctattgtgggatcttgtgacagtgtgagttaatacttaatagactacccttatcatatatatatgtgtgtgtgtgtatatatacatacatatgcacgtatatatatatatgtgtgtgtgtgtgtgtgtgtgtgtgtgtgtatacatacatatatatatctagaaccactcctggtaccaaaatctgtattagggttctctagagggacagaactaatcaaatatatatatatatatacacatatatatgtgtatatatatgtatatgtatgtgtatatatatgtatatgtatgtgtgtgtatatatatacacatatgtatatatatgtatatgtatgtgtatatatgtatatgtatatgtgtgtgtgtgtgtgtgtgtgtgtgtgtatgtatatatatatatttgattagttctgtccctctagaaaaccctaatacagattttgggaccaggagtggttctagagaaatagaatattaaggatggagtattttggtggtttcagggtttctggaattggttgcttaatatgattagaccccaaaatgctaaggactctacttctaatcctgtggagaacactgatagtccttggtgtgaactgtttacagacttatgcaaaataaatccatttgacactcctgattcattgctcgtgagaagcaaggggtttagtgactctatacctaatacttttgaacatatgtggagagctaaggaacataatgaagctggttggttgctcttaagttcagtagacaaagtgatgaaagaaagtaatgaactcagggattccatctcctggcttcagaagcagatagtgagcctcaaatctgttaagactgccctgaatgagagtcttatctcctgcagggaaagagctgaaattgtggaaaaacagacacaagctcttatcatgtgagtggctgacctgcaacaaaagatgcatgcacagcctcaccaggtgtctacggttaaagtgaaggcattgattgaaaaagaatgggaccctgcaacttggaatggggggtgtgtgggacgaccctgatgaagctggggattctgagtttgtaaactctgatgaacttttttgccagaagaaacagcttccccatccccagtagtggcaacattccctccctgacccatgctgccccatcagcctttccatctttgtctgaggacataaaccctgagctgcctgaggcaacagtgatggcctcccctgaggcagttgccaggcaagataatgttgactctcttcaggagccacccccaacacccctgtttgcttctagacctataactaaagtcccagcgagcccctagaggtgaggatgagagtgtgacccatgaggaagtgcgctacactcaaaaagaactgcttgagttttctaatttatataaacagaaatctggagaacaggcatgggaacggatattaagggtgtaggataatggtagaagaaacagagtttaatcaggctgaatttattgatttgggcccactaagtagggaatctgcatttaatgttgcagcttggagaattaaaaaaggttctaatagtttatttgcttggttagctgaaatatggattaaaagatggcccactgtgagttagctggaaatgcttgatctcccttggtttaatgtagaggaagggatccaaaggcttagggagattgggatggtggagtgaattagtcactttagacctactcatcccagttgggagggttcaaaagatatacccttgaccaatgcttgtgaaatagatttgtgagggcagcacctgcatctttaaagagccctgtaattgctcatctctgtatgtcagatctaacagtgggaaccacagtcactcaactacaaaatttaaatatagtgggaataattggatcccaaggtggcaggggccaagtggcggcactcaactgtcaaaggcaaggtgggcattgctaccttaatggacagcagaggcaaagtggaaatcagaatagtctgatttgtgtagagctctggcattggctaatttatcatggtgttactagaagtgaaactgataggaagcctactgcattcctatgtaatttatacaagtagaaaaattctaggtcgaatggacaaaagactaatttgaataataaaaaaacagagaatcatggcccctcaatcaatttccagacttgtgccagtttacagaccctgaccccttgaatgaagggggaggccagctctgcttgaggaaggaccctactacattatcaacaatttatccagtgaatctttctcccatccttccccaaggagacatctggccttttactacagtaattgtgcactggagaaagggaaatgatcagacattttggggactactggacactggctctgagctgatgctgactccaggggacccaaaacatcattgtgatcctccagttaaagtaggcgcttatggaggtcagataattaatggagttttagctcagatctgacttatagtgggtccagtgggttcccccactcatcctgttgccatttccccagtgctagaatgcataattggcatagacaaacttagtagctagcagaactcccacattggctccctgactggtagtgtgagggctattatggtaggaaaggccaaatggaagccattagagctgtctctacctagaaaaacagtaaatccaaaataatatccatccctgcagggattgcagagattagtgacaccatcaaggacttgaaagatgcaggggtggtgattcccaccacattcctgttcaactctctcatttggcctgtgcagaagacagatggatcttggagaataatagtggattattgtaaacttaaccaagtagtgactccaattgcagctgctgcaccagatgtggttttgttgcttgagtaaattcacacatctcctggtacctggtatgcagccattgacttggcaaatacttttttttccattcctgtccataagccccaacagaagcaatttgccttcagctggcaaggccagcaatatgcttttactgtcctacctcaggggtatatcaactctccagctttgtttcataatcttattcggggagaccttgatcactttttgcttcagcaggatatcacactggtccattacattgatgaccttatgctgatcggatccagtgggcaagaagtaggaaacatgctggacttattggtgagacatttgcatgccagagaatgggaaataaatccaactaaaattcagtgaccttctacatcagtaaaatttctaggagtccagtggtatggggcctgtcaagatattccttcaaggtgaaggataagttgctgcatttgacccctcctacaaccaagaaagaggcacaatgcctagtgggcctatttggattttggaggcaagacattcctcatctgggtgtgttactccagcccatttattgagtgacccaaaaggctgccagttttgagtggggtccagaaaagaagggtctgcaacaggtccaggctgctgtgcaagctgggccagatgacccagcagatccaatggtgcttgaggtgtcagtggcagatagggatgatgtttggagcctttggcaggccctcataagtaaatcacagcagaggcctctaggattttagagcaaagccctggcatcttctgcagataactactctccttttgagagacagctcttggcctgttactgggctttggtggaaactgaacatttgactatgggtcatcaagtcaccatgaaacctgtactgtctatcatgaactgggtgctttcagacccatctatccataaagtggctcatgcacagcagcattccatcatcaaaaggaaatggtatatacgtgattgggcttgagcaggtcctgaaggcacaaataagttacatgaggaagtggctcaaatgcccacggtctccactccagccaccctgccttctctccccgagcctgcaccagtggcctcatggggagttagttccctatgatcagttgacagaagaagagaagactagggcctggttcactgatgattctgcatgatatgcatgcaccacctggaagtggacagctgcagcactacagccccttttgaaaggatatctctgaaggacagcagtgaagggaaatcttcccagtgggcagaactttgagcagtgcacctaaacagtgtgcactttgcatggaaggagaaatgaccagatgtgtgattatatatgattcatggggtgtagcaaatggtctggctggatggtcagggacttggaagaagcatgattggaaaattggtgacaaaaaaatttgagggactcaaatggacagagcagtatgcagaggcttgcactgtgaactttagctccagattgactacaagaacaaaccagcaatcctgagaggatccacaaaccctctgaaggaagcagacagctcctgcaggacctgggagataccccaaatactgtgagtgccccaactgcagaagggggaaagggagagcctcctctcctgaacacatacccccactggagaaactgaagttctgtttgtgggagaagtttctgaccttacctggaactaagccaatttagagagctgagcaaaatacaggggtagaggaagcagcagaaaggccctgggagcttgctgggagcccaagcaggccattcctgcctggcaccagagggatccattgggagggtggccagaggtggcggggtgggttgggggaactccacagggagaaggaaatctccagctgaactctgtaacaatttgaacggggtgagaaggctcctggccagaacttgggggagggcacaaatctggtgtgcagactccacaggcggaggaagaaccaagcccttttcttttgcagctgggaagtgggtagcctggggcaagttttcaagcccagctcgcccaccacctggaaacagactcggtgctgtttgttggggggtagggagagcatggtgggagtgagactggcccttgggtttgcatgggagctgggtgaggcctgtgattgctggctttccccagcttccctgacaacttgcatggctcagcaggggcagccatagtccgcccaggtacacaactccagtgacttgggaatctcacccccatcccctacagcagccacagcaagacccacccaaggagagtctgagctcagacatgcctagccctgcccccgacctgatggtcctttcgtacccaccctggtagtggaagacaaagagcatttaatcgtgggagttctagagccccacccaccgctggttcctcatcatactaccacagctgaggctctctggaaagtgtcacctcctggcaggaggccaaaaaccaccaaaatacagcattaaactaccaaagctaagaaccctcacagagtccattgcaaccccctgccacctccactggaacaggcactggtatacaccactgagagacccatagatagttcatatcacaagactctttgcagacaactcccagtaccagcctggagctgggtagacttgctgggtggctagacccagaagagagacaacaatcattgcagttcggcttacaggagcgcacatccataggaaaagggggagagtactacatcaagggaacaccctgtgggacaaaagaatctgaacaacagcctccagcccaagatcttccctctgacagaggctacccaaatgagaagaaaacagaaaaccaactctgataatatgacaaaacaatgatctttaacaccccccaaaaatcacacgagttcactagcaatggatctaaaccaagaagaaatccctgatgtacctgaaaaagaagtcaggaggttagtcattaagctaatcagggagggaccagagaaaggcaaagcccaatgcaaaggaaaaaaaaaatacaagaagtgaagggagaaatattcaaggaaacagacagcttaaaagaaaaacagtccaggtgcagtggctcatgcctgtaatcccagcactttgggaggccaaggcgggtggatcacgagatcaggagatcgagaccatcctggctaacatggtgaaacaccatctctactaaaaatacaaaaaattagctgggcgtggtgacaggtgcctgtggtcctagctacttgggaggctgaggcaggagaatggtgtgaactcggggggcggagcttgcagtgagccgagattgcaccactgcactccagcctgggcaacagagtgagactccatctcagaaaagaaaaaacaatcaaatttcaggaaacattggacacacttatcaaaatgcaaaatgctctggaaagtctcaacaatggaattgaacaagtagaagaaagaaattcagagcatgaagacaaggtcttagaattaacctaatccaacaaagacaaagaaaaaataataagaaaatatgaacaaagtctccaagaagtctaggattatgttaaatgatgaaacctaagaataatcagcgttcctgagaaagaaaagaaaactaaaagcttggaaaacatatttgggggaataattgaggaaaacttccctggccttgctagagaactgagccatccaaatacaagaaatacaaaaaacacctggagaattcatcgcaaaaagattgcctcggcacattgtcatcgggttatccaaagttaagacgaaggaaagaatcttaagagctgtgagacagaaacacgaggtaacctataagggaaaatctatcagagtaacaggagatttctcagcagaaaccatacaagccagaagggactggggctctatcttcagcctcctcaaacaaaacaattatcagccaagaattttgtatccagcaaaactaagcatcatatatgaaggaaaggtacagtctttttcagacaaacaaatactaagagaatttgccgctacccagctaccactacaagaactactaaagggagctctaaatcttgaaacaactcctggaaacacatcaaaacagaacttctttaaagcataaatcacacagaacctataaaacaaaaatacaagttaaaaagcaaaaacaaaaaacaaagtacactggcaacaaatagcacgatgaatgcaatgctgtctcacatctcaatactaacattgaatgtaaatggcctaaatgctccacttaaaagatacagaaccgcagggtggataaaaactcaccaaccatctgctgccttcagtccttacctagcagtaaggactcacataaatttaaagtaaaggggtgggaaaaggcatttcatacaaatggacaccaaaagccagcaggggtagctattcttatatcagacaaaacaaactttaaagcaacagaagttaaaagagacagagggacattatataatggtaaaaggccttgtccaacaggaaaatatcacaatcctaaacatatatgcacctagcactggggctcccaaattaaaacaattactaatagacctacgaaataaggctaggcatggtggctcctgcctggaatctcagcactttgggaggccaaggtgggcggatcacgaggtcaggagatcgagaccaccctggctaacacagtgaaaccctgtctctactaaaaatacaaaaaaaaaatgagccgggcgcggtggtgggtgcctgtagtcccagctactcaggaggctgaggcaggagaatagcgtgaacctgggaggcggagcttgcagtgagctgagatagcgccactgcagtctggcctgggagaaagagcaagactccaactcaaaaaaaaaaaaaaaaagagaaatgagatagacagcaacacaataatagtgggggacttcagtactccactgacagcactagacaggtcatcaagacagaaagtcagcaaagaagcaatggatttaaactataccttggaacaaatggacttaatagttatatacagaacatttcatccaacaaccacagaatacacattctattcaacagcacatggaactttctccaagataagccacatgataggccataaaatgagcctcaataaatttaagaaaatttaaattatatcgagctctgtctcagactgcagtggaataaaattggaaatcaactccaaaaggaaactttaaaaccatgaaaaaaacatggaaattaaataacctgcctctgaatgagcactgagtcaaaaatgaaatcaagatggaaatttaaaaattcttcgaacttaacgacaataatgacacaacctatcaacacctctgggatatgacaaaggtggtgctaagaggaaagttcatagccctaaacacctacatcaaaaaacactgaaagagcacaaactgacattctaaggtcatacctcaaggaactagagaaacaagaacaaatcaaacccaaacccagcataagtaaggaaataaccaagatcagaacagaactaaatgaaattgaaacaaagaaacaaaaaatacaaaagataaatgaaacaaaaagcttatttttgaaaagataaagaaaactgatagacctctaacaagattaaccaagaaaagaagagagaaaatccaaataacctcactaagaaacaaaacaggagatattacaactgacaccactgaaatacaaaagatcatccaaggctattgtgaacagctttatgcacttaaactagaaaacctagaagagataaataaattcctggaaaaatgcaaccctcccagcttaagtcagaaagaactggctatcctgaacagaccaataacaagtagcgaaactgcaatgataattaaaaaattaccaacaacaaagaagtccagcaccagatggattcacagcagaattctaccagacagtcaaagaagaataggtaccaatccttttgacactattccacaagatcgagaaagaaggaaccctccctaattcattctatgaagccagcaccaccctaacccaaaatcaggaaaggacataaccaaaaaagaaaactatggaccaataatcttaatgaacatagatgctaaaatccttaataaaatactagctaaccaaatccaacaacatatgaaaaaaaaataattcacctgatcaagtgggtttcacaccagggatgcagggatggtttaacataagcaagtcaataaatgtgctacaccacgtaaacagaattaaaaatcacatgatcatttcaatagatgcagaaaaagcatttgacaaaattcagcatccctttatgattaaaacactcagcaaaatcagcatacaagggagatacctcaatgtaataaaagccatctatgacaaacccacagacaacataatattgaatagggaaaagttgaaagcattccttctgagaactggaataagacaaggaagcccactctcatcactcttcttcaacacaacactggaattcctagccagagcaatcagtcaagagagagaaataaagggcttccaaatcagtaaagagaaagccaaactgtcactgtttgctgaagatatgattgtttaccttgaaagccctaaagactcctccagaaagctcctagaactgataaaagaattcagcaaagtttccagatagaagattaatatatacaaattagtagctcttctatacaccaacagcgaccaagtggagaataaaatcaggaactcaactccttttacaatagctgcaaaaaaataacatacttaggaatctgcctaaccaaggagtcaaaagatctctacaaggaaaactacacaacactgctgaaagaaatcatagatgacacaaataaatggaaacacattccatgctcatgaatggggaaaatcaatattgtgaaaatgatcatactgccaaaagcaatctaaaaattcaacccaattcccatcaaaatactaccatcattcttcacagaactagaaaaaacaattctaaaattcatatggaacagaaaaagagcctgcatagccaaagcaagactaagcaaaaagaacaaatctggaggcatcacactgcctgatttcaaactatattataaggccatagtcaccaaaacagtgtggaactggtataaaaataggcacatagaccaacggaacagaatagagaacccagaaataaacccaaatacttacagctaactgatcttcgacaaagcaaacaaatataaagtggagaaaggacaacctattcaacacatggtgctgggataattggctagcgacatgtaggagaatgaaactgggtcctcatctctcacttatacaaaaatcaactcaagatggattaaggacttaaatctaagacctaaaactataaaaattctagaagataacattggaaaaacccttctagaaattggcttaggcaaggatttcatgaccaagaacccaaaagcaaatacagtaaaaacaaagataaatagctgggacctaattaaactaaacagcttttgcacagcaaaaggaacagtcagcagagtaaacagacaactcacagagtgggagaaaatcttcaccatctgtacacctgacaaaggactaatatccagaatctacaatgaacttaaacaaatcagtaagcaaaaaacaaataatcctatcaaaaagtgggctaaggacacgaacaggcaattctcaaaagaagatatatgaagggccaacaaacatatgaaaaaatgctcaatatcgctagtgatcagggaaatgcaaatcaaaaccacaatgtgataccaccttactcctgcaagaatggccataatcaaaaaataaaaaaaaaacccagtagatattggtgtggatgtggtgatcagggaacacttctacactgctggtgggaatgtaaactagtacagccactatggaaaacagtgtggagattccttaaagaactaaaagtagaactaccatttgaccaatgaatcccactagtgggtatctacccagaggaaaataagtcattatacaaaaaagatacttgcacatgcatgtttatagcagcacaattcacaattgcaaaattgtagaaccagcccaaatgcccatcaatcaaccagtggataaagtaactgtgatatacatatcatatatatacacacacatatatgatatatcatatatgtatgatatatatgatacatcatacatatatgatcatacatatatgatatatacatcatatatacatatatgtatatatcatatatacatatatatgatatatatcattatatatgtatgatatatatattccatcatatatatcatatatatgatggaatacaactcagcattaaaaaaatgaattaacagcatttgcagaaatctggatgagattggagactattattctaagtgaagaaactcaggaatggaaaaccaaacattgtatgttctcactggtatgagggagctaagctatgaggattcaaaggcataacaatgatacaatggattttgggaacttatggggaagagtgggttgggggcaagggataaaaggctacaaatatggtgcagtatatactgcttgggtgatgagtgcaccaaaatctcacaaatcaccactaaagaacttattcatgtaaccaaatactagctgtaccccaataacttattgaaatataataataataaaaacaaatttggggaagaggtatgtgatggacctctttgagtgatcaaaagctgtgaagatatctgcatcccatgtaagtgctcaccaatgggtgacctcagcagaggaggattttaataatcaagtggataggatgatccattctatgaacaccactcagcctctttctctagccacccctgtcatcgcccagtgggcccatgaacaatgtggccatggtggcagggatggaggttatgcatgagctcagcaacatgtacttacactcaccaagagtggctacagccactgctgagtgcccaatttcccagcagcagagaacaacactgagctctcaatatggcaccattcctcaggattattagccagctacctagtggcgggttgattatactggacctcttccatcatggaaaaggcagaggtttgttctcactggaacagatacttgctccggatatgggtttgcctatccttcacgcaatgcttctgccaagactaccatccatggactcacagaatgccttatccactgtcatggtattccactcagcattgcctctgaccaaggcactcactttatggctaaagaagtgtgacagtgggctcatgctcatggaattcactggtcttaccatgctccctatcatcctaaagcagctggattgatagaatggtggaatggccttttgaagtcacagttacaaagccaactaggtgacaatactttgcagggctggggcaaagttctgcagaaggccgtgtatgctctgaatcagcatccaatctatggcactgtttctcccatagccaggattcatgtttccaggaatcagggggtggaagtggcaccactcaccattacccctggtgatccactggcaaaaattttacttcctgttcctgtgacattatgttctgctggcctagaggttttagttccagagggaggagcactgctatcaaaagacacaacgattccattaaagtggaagttaagattgccacctggacattttgagctccttccacctttaagtcaacaggctaagaagggagttacagtgttggctggggtgactgacctggattatcaagatgaaatcagtctgctactccacaacggaggtaaggaagagtatgcatggaatacaggagatccattagggcatctcttagtattactctgccctgtgattaaggtcaatggaaaactacgacagaccaatccaggcagactacaaatgaaccagacccctcaggaatgaaggtttggatcatgccaccaggcaaaaaaacccacaaggtgcttgctgaaggcaaagggaatacagaatgtgtagtagaagaaggttgtcattaataccagttacaaccgcgtgaccagctgccgaaatgaggactgtaattgttgtaagtatttcctctttcttttgttaaaaacacgtctgcgcatatatacgcttgtactaagaaaatactttcattttatttcctttctcctttatcatgtgacataagatttattaacttcacgtcaacatttaagtgttgttaactttatgtaatagcatttgggttggggattggtgcgtctccagttgtatgaaggattgttgttttatgttaggcataattatgaccttattattgtctttatttgaagattatgtatgatctcaagagatgtgcatgggttcaggttgacaaggggtggacttgtgattgttaatactgagtgtcaacttgattggattgaaggatacaaagtactgatcctgggtgtgtgtgtgagggtgttgccaaaggaggttaatatttgagtcagtgggctgggaaaagcagacccacacttaatctgggtgggcacaatctaatcagttgccagcatggctagaatataagccggcagaaaaatgtaaaaagagagactggcctagtctcccagcctacatctttctctcatgctggatgcttcctgccctcaaatatcggactccaaattcttcagttttggaacttggactggctcgctttgctcttcagcctgcagatggcctattgtgggaccttgtgatggtgtgagttaatacttaataaactcccctttatatatatatatatatattatatatataatatataaaaatatataatatataatataaatataatatatattatataatatagttatatataaataaaatatatattatattatatataaatatatattatatttatatataatatattttaatatattatatacaaataatatatatttatacataatatattaaaatatattatatttatacataatatattaaaatatattatatttatataaatacataaaacatatatttatataaatacataaaacatatattatatttatataaatacataaaacatatattatatttatataaatacataaaacatatattatatttatataaatacataaaacatacattatatttatataaatacataaaacatacattatatttatataaatacataaaacatacattatatttatataaatacataaaacatacattatatttatataaatacataaaacatacatatttatataaatatacaaaacatacattatatttatataaatatacaaaatataccttatatttatataaatatataaaatatatattatatttctataaatatatattacatttccataaatatataaaatatatattatatttccataaatatataaaatatatattatatttctataaatatataaaatatatattatatttctataaatatatattatatttctataaatatataaaatatatattatatttctataaatatatattatatttctataaatatataaaatatatattatatttctataaatatatattatatttctataaatatataaaatatatattatatttctataaatatataaaatatatattatatttctataaatatataaaatatatattatatttctataaatatataaaatatatattatatttctataaatatataaaatatatattatatttctataaatatataaaatatatattatatttctataaatatataaaatatatattatatttctataaatatataaaatatatattatatttctataaatatataaaatatatattatatttctagaaatatataaaatatatattatatttctagaaatatataaaatatatattatatttctagaaatatataaaatatatattatatttctagaaatatataaaatatatattatatttctagaaatatataaaatatatattatatttatagaaatatataaaatatatattatatttctagaaatatataaaatatatattatatttatataagtatataaaatatatattatatttatataagtatataaaatatatatattttatataagtatataaaatatatataatatttatataagtatataaaatatatattatatttatataaatatataatatatattatatttatataaatatataatatatattatatttatataaatatataatatatattttatatttatatataatacatagattatgtaatatatatgtattttccattagttctgtccctctagagaacgctgagtaatacagatggcataagtgagtgctataatacaaaatttgaagatggaaccaacattccttatgtccgcttacatcttttattctgtctcctaggtgacaggcatttcttgcctagatgactctcaggcatggtctcttattcactctggacactccttgtcagggcacagagcccttcacatctgcccctgccaatgtcttctggatcgtctcccatctctccctatatgcctcctcaacttcaactccccagaatcataggcagttccggcgtgcaacatggcttcctttagaccaggttcccacctgctagccagtcctcagcaacctctgctgtgtggtttccctttctttaatcctttgctcaagcctcttgagatttgaaaccttctttgaagacataccatccccttccctccgggctccctacccccaaggttgggctaaatgcccttactttgatggtctggactggtcagtcctaagcctcacctatttacctgagtgggtggggatgtgtcctaagtagatatcccatgtgttttgtgctgtgggtcatagtcaaaatagtcagcaatccactgatcttatttaccctcctgtttaagacgcttccaagtcttgtgtgaggctcagactgagcctttaaaatccccacatttcccttttctgggctgctctgcctggcagaaacagggctacatcttgttcttgtactctggaagcctggtagcactgtttgaccaccacagaagaagtctgcttaatggactcacatttttgtaataaaataaaagcaccaagccagaatagaagccttcgttgtcagatcttattctccaaatgtattttcttcacagttttctaacttctaaaaccatcaaacagctttggcatgacagtcgtcttccacaaatgaaaacaggatttagtgcagtggcgtttctgctgctctgagggaagctgatttagacagaagaggcaggaaggaagagggaggggatctgtggacctggagccaggtccctgcagaggtagctgggcctctgactctaccgtctgtgggtggaaaaacaatctttccccttggaccaaaagtaccaggttgcctccctgagattaaggtgctagacggagcctattaatgtgaatataccattcaaggcagtgaaaacaggcttaacacagaatcatcagcagcaggagacctagagacttcttcctagctctgtcttcctcctacctctgctcctaattcccttcttctctgggcctcagattcctcacctgaaaatggaaggattagattaaatcagcggctcttattttctgactgtgactcaacattaagaaatacatttgaagactaagaaacagagaagacccaaataaaatcagagatgaaaaaggagacattacaactgacactgcataaattcaaaggaacattagagactactatgagcaactgtatgccaataaattggaaaacctagaagaagtggataaattcctagacatacacatcctacaaatattaaaccatgaagaaatccaaaacctgaacagactaatgacaagtaatgagactgaagccataataaaaagtctctcagcaaagaaaagcctgggacctgatggcttcactgctgaatttcaccaaatattttaaaaagaactaataccaatcctactcaaactatcctgaaaaatagaggaggaggaatacttccaaactcattctacaaggccaatattaccctgatacccaagccagacaaagatgcatcaaacaaataaacaaaaccaaacaaacaaaactaggccaatatgattgatgaacatcaatggaacaaaacactagaaaactgaattcaacaactcattaaaaagatcactcatcataaccaagtggaatttattcccagatgcaaggatggttcaacatacaaaaatcaatcaatgtgatatatcatattaatagaatgaagaatgaaaatcatataatcatttcaattgatgctgaaaaggcatttgacaaaattcttttatgataaaaattctaaaaaacttggtatagaaagaacatacctcaacacaataaaagccatatgtaacagattcacagctggaatcatattgagtggggaaaaactaaaagcctttcctctaagatgtggaacgtaacaatgatgcccactcttgccactgttatttaacatagtactggagctagagcaatcagacaagagaaagaaataaagggcatccaaattggaaaggaagaagtcaaattatccttgtttgcagatgatgtgaccttacatttggaaaaagctaaagactccatcaaaaaatttttagaactgataaacaaattcagtaaagttgcagggtacaaaatcaatgtaaaaatatcagtaggatttctatatgccaacagcaaacaatcagaaaaaaaaattaagaatgtaatcccatttataacagctataaataaagttgttaaatacctaggaataaaatttaccaaagaaataaaagatctctacaatgaaaactgtaaaacattgacaagaaattgaagaggacaccaaaaaatagaaagatatttcttgtttatggattggaagaatcaatattgttaaaatactcatgctaccaaaaggaatccacagattgaatgcaattcctattaaaataccaaagacattcttcacagcaatagaaaaaacaatcctaaattttagatggagccacaaaagacctggaataggcaaagctatccaaagcaaaaagaacacatctagaggaatcacattacctgacttcaaattatactacagagctatagtaaccaaaacagcatggtactggtataaaaacagacacatagaccaatggaacagaatagagaactcagaaacaaatctgcatacctacagtgaactcatttacaacaaaggtaccaagaacacacactggggaaaggacactctcttcagtaaatggtgctgggacatgaaaaaaatgctcatcatcactggccatcagagaaatgcaaatcaaaaccacaatgagataccatctcacaccagttagaatggtgatcattaaaaagtcaggaaacaacatgtgctggagaggatgtggagaaataggaacacttttacgctgttggtgggagtgtaaactagttcaaccattgtggaagacagtgcggtgattcctcaaggatctagaactagaaataccatttgacccagcgatcccattactggctatatacccaaaggattataaatcatgctactataaagacacatgcacacgtatgtttattgtggcactattcacaatagcaaagacttggaaccaacccaaatgcccatcaatgatagactggattaagaaaatgtggcacatatacaccatggaatactatgcagccataaaaaatgatgagttcatgtcctttgtagggacatggatgaagctggaaaccatcattctgagcaaactatcgcaaggacagaaaaccaaacactgcatgttctcactcataggtcggaatttaacaatgagaacacttggacatagggtggggaacatcacacaatggagcctgttgtggggtggagggagtggggagggatagcattaggataaataacctaatgtaaatgacgagctaatgggtgcagcacagcaacatggcacatgtatacatatgtaacaaacctgcatgttgtgcacatgtatcctagaacttaaagtataataaaaataaataaataaaataaaaaataaaaataaataaataaatggtgctgggaaaacaaggtatccatatgcagaagaatgaaactagatccctacctctcaccatgtaaaaacatcaatcaaagtggattaatgacttaaatgtaagacctgaaactaggaaactactaaaagaaaacattagagaaactctccaggacactggactaggcaaagattttccaagtaaaactcacaagcacagacaaccaaaggaaaaatagataaattggatcacatcaagttgaaaagcctctgcacagcaaagaaaaacaatatcaacaaagtaaagagacaacccacagaatgggagaaaatgtttaccaactattcatctgacgacgcattaataatcagaatatataaggacctaaggcaactcggcaggaaaaaaatataataatttgattaaaaagtaaacaaaagatctgaatagaagaatgtcaaaagaagacatacggatggcaaacaggtagatgaaaaagtgctcaacatcattgattatcagagaaaagcaaatcaaaactacatgagacatcatttcatcccatttaaaatggcttttatccaaaaagcaggcaataatgaatgctggcgaggaggtggagaaaagggagtgaaaattagtacaaccgctatggagaacagtttggaggttcctcaaaaaactaaaaataaaactaccatatgatctggcaattctattactaggtacataccccaaagaaaggaaatcagtatattgaagagatatctgcacttccatgtgtatcgtggcactacttacaataggcaaaatttggaagcagtctaagtgtccatcaacagatgaatggataaagaaaatatggaacatattcacaatggagtaatattcagccataaaaaataaagagatcctgtcatttgcaacaacatggatggaactggaggatattatgttaagcaaaataagccaggcacagaaagacaaactttgcatgttctcactcatctgtgggaactaaaaattaaaacaattgaactcatggagataaagaatgtaaggatgattaccagaggttgggaagggtagtgagcatggggaagtggggatggctaatgggtacaaaaaatatagttagaataaataaaatttagtatttgatagcataacaggttgattacagtcaacaataatttattgtacatttaaaaataacaaactgtataatttcaatatttataacacaaataaatgataaatgcttgaggtgatggataccccatttaacctgatatgatcagcatgcattgtatgcctgtatcaaaatatctcacgtgccccataaatatatatacctactatgaacccataaaaactaaaaattaaaaaaaatttaaaaaagaaatacatttcatacctcaacttggtctatacacacatatttagagggacatgtaactgaagtttcacttaatgatgtttgtccttatgacctgctatattttctcctctgttatgctcattttataaacttttattgaagtatgacttaagtacagtagagggtacatatcataaatgaatagattgatgcatttctacaaattgacaacacccatttaacctgccctcctacctctgaattaaaaggcagaatgtgactagagagcccctttgcactccttcccatttaccaactcctccctcgggggcaaccaccatccagacttctgaaaacacagagtagttttacctggctttgtacttttttaaagtgcagtcataaagtttctttgtgcctgcttctttctttcaccttcatgcttctgaggttcatcaatattgctatgtgcaatattccactatgtgaatatgctacccttgatccattccagggctgatggccatgtgttttggtggatatctgtgtacatatctcaggggtatattccaaggagtgaaagtgctggtatgtatatgttcagctttagctgatattgccaaacagttttccagtgtcatcaaaccaattacatttcagctaacagtgtgtaagtttcggttgtttcacatctttgccaacactagatagagtctatattttttatttcagccattctgatgagtacatagtagtatttcattatggttttaatttgtcattccctgaagagtaaaaatgttatgtgcttttttggctatttggacatcttcttttatgaagtatctgagtcttttgcccatttttctattaggctgtctgtcttttcttactgatttataggagtttcttcttttttttctaccatatatatttggatatgagacctttgttgagtatatggagtgcaaatatacaacatctttacccactctgtgggttactaggttactctgtttttactttaataaatgctgatcttgagccaccaaattaatttcatgacctgttactggactacaacccacaatttgaagcaccctgtgatacacaattatgcagtctttcctgggtcagaatagcccagaaaggggcatttctagcctgtggcatccacaccaacattggcctggatcaacacctctgtatctactgtgagccactgtctggagaacaaggatgttagctatatttaatttccaaatttaaagaaaatactttgtcctataccttgagtgataccagtttccaattcttctgaatttaataattgccagccccatggcccagactgagggaagagactcagaaggatggccaaggtgtggaaacacctctgaaattagccctttcaacaggtactagagggtacgttttcctacacagtctctctagccaccgaggtacctaggtcttcaggggcatggtcttatggaaccaaagataccttcagaggttccttttatctaacgagttaacacaacattccctaaactctgagaaaaacaaacagaaaaaagccactaaccaagggagaaagactctcccatatcctaagcactttcttggtgtgagagatacatcctatgctgcatcctcccagctcctgagagcagccctatccacagactttcagctccaggaaggcgaaaactgtaccactcttatcaaataatgtgaccaaggccacataacttgtaagttatagagctaggctgactgacaccatagcctgtgttttcattcctctgttatactccttagaggcagccagtcactggataaagagtggtgactacctccaaagggtcaaagattcacacacatatgcacaaacacacacgtgtgcatgcacacacatgcatagacgtgtgtatacagatatgtacatgcatgcatacgtatatgctatttcactcagaaatcagtggggctggactctacaggttcattacacagtcagctcatctgagttcccccctttcttctgatttgcaaagtattgatacagtccataatacatgaatcacacaaaggcacatatatttgtaggaaactttacagtttacaaaacactcaatctctcatccaacactcaccaccagccttctgaacatatataaatatttgatgatttgcaggcctcccagtctgtgtgtttaaggaccttcattctggggggctctaatccttaccatctaggaccggggctatggcatcagtgagagattggcaggatttgtgcagcttctcggacccactctaaaatttcccttttaactgtatatttccatagcaacccatcatccttgtctgactctgagaagtagagttttaacctcatgaattttctgaggttgggcttatgtttgcatgagagtttatgagatgtgaacactactgtatccctaatgagtatgcccgttcttttctctccttatgagagtctctagcacctcctatcttctcctctggctaaaggtaagtagttctgccattacttataatcatactagcaactgccatgttttgaacactttctatgtaccaggtactaggtgctttatgtacattatctcagtacatcctcacgcaaccctttgcaacatttattggcatcctcatttaacaaatgaggaaacagatgatcagagatgagaaatggcagtctatggccacatagtcagcaagtgatagggcttggattggacccagattccatggattcccaagacctggcccattccagtgcctgagatggtaagaagcagcaacttctttactctgagtcagcaaaacgatccaagtggaggtcagaggcatggtagtgactatctcttcctaccttccttgttttcaccaagctcagaatgatgaagtgactttcctgaaaacacaacaagagtagaactggggctgaacccaggcctgctctttgggtttaccctgctttgattctcatccatatactgggcaaagatcactggaggtgctctgtctgtattccaagtgaccagggtgggagctgctcttgaaaccaacttatgagaaatgattggaggaacaaataacaagaaaagatcttgaggagggacatgctgtttacattcacctattttaggatgtctagtagagaagaaagagacttggcaagacgtggagtgaatttcaagtccagattatgggagagctctacaaaaatcctaagtgtggggagataccaacctccaaaccagtccctgcaagtttccaagaacaggccagggatctatagagatgctgttgtgggtttcccagcatccaggagggaatggtccgtacctctaaaacccttttatctctaagattccacaagcctttgaaacatataaaaatcttgcagggaaggcaagcagtaatcctgcactctttgttcattgttcttagggaaaaaaaaatctttattgtaaaataaatgaagataaagtctacctattaatgcatatttaagaggtagagaaaaaaagaacccataacattaacttaaatcatgaatactctctgaagtgtaaaaaaaatcaactcacttttctttaaatcttcttaaaagggtctaagaatagtccttcaaataatccttgaagtatgcaattttaatttggacacatggtaatttcagtctacctgttgaaagagacaagagacaaatcagtcatttttgatgaggatgctgttctgataagcagtagagaagattctggcagcttgggaggtgggggtgagacgtgggcatgggcattagtagcagcagtatgagctttggtcccaagctgaagtctagtgtttgaacgctcagaggaaagatgcaactaaagtagctactagcacagtgcctggcacatggcaaatgctcattaagtagttgatggacaagtaaaaggatggctgagaaaatgagtgggatttatcatcaagctttcatgcagggagttactttgtagcctcatctcttcaactcttagggagagagaatctccaggtactgggcatataatggaaagcagcacagagaaaggtaccagtggagtaaagagagtgagggatttgagccagccatagctatgcccaaatcctggccccaccacttctgactgcacaactctgggctggtttatttacttatatttgctgttgttcctaaattggatacttaacccattcattaattttcagctcttcttttttaatataagcatttaaggtgataaatttctctctaagtgctgtcttggctatattccacaacttttgatatttaatatttctttggtcattcatttataatcattttataatttctgttatcatttctttttgatctgagagttagttggaagtatttttataaatatatctcaatataggtttttaaaaaacatctcatctttctgttactgagttctaacttaattgcactgtggtaggtgaatatggtctgtaggatactgactccttgaaatttactggattgtattttacggcctaggatacagtccactttcgtgagtgttttatatgtgcttagaaagagtgtgcattctctggctgtcgggttgatcttgggctggctttctttaaatgtttctgcatctccatttcctcacctgtaataaggtatgtgagcaatacacattagttccctcacaccatttaaaattatactcactgacaaagacacagtgcacaaggaaagatcaaggtatgctcttttttctttataacagtatcactaacaatgccctacactgataaagtacttaaaagtttctaaacaatgaccacgtctgttatttggtcttaaacctgtataatgtcacctaggcaggtagaggtgggaacccacaaagaaaaaggacacacaccagttggtgcagtgatttattcagtcctcaatgccagaaccccaggatccctctgactcgcctctgcccctcactcctcactcctgctcggttcagccttcttatcatctttcaaatccatccttgttatgacctacaatgcctccatcatttcttacctgcttggttctcacagatcattaaattcctactgttttaaaaatacagcacagaaagtaaatcctgacaaaatcctcctggcagatgtggctctcaaataagcctggtgttaggtcttgggtgccagaacatcagtcttgcaggggagagtgatgtttatgtctatcaaagcaggcatgagtttagaaaggtcaaaaaacactgtgttgagttcaaatttcttcatctagcaaacagcccttcccatgaccttgtcccctgtcctgcccccaagttccttttctccttttcagagagatttcctgaaagagtcatctagaccaccacttcctccactcccacactcttcacaaatcgttgccttgtggctttcagcctctttctttaagatcatagggatgttgtcactgcatattccagacacttcttctcaatctgcagtggcctctctgggtcatttgctagcagggaccccttccctctagaaattcctgcctccatatcagcaacaccagtttctcctggttcttctttccccccaaggactttctctgactccttcacaaattctgtggtttgaatgggcattttcataatttaattagaagtgtttttttataaaataataaccataaactacactttattaagggcataccaatcactgtgctaaacattattttattctacttaatcttcacaataaccacacgaggtagacattattaatattcctattttacagatgagaaaatagaagcttggaaaagtgacctaatttgcccaggatcactcagctactatgtggcagaacagggattcaaaccgcagtccatccaatcatagcctgtgctctcagccactacattaactcatcctgccttcctataccatggcttctgtgactcaccattcttccacgatgtcatggatttcatgctctcattttgcttccctctgaagggaaggcctttatccatactgtgtgctgagaaaattctgtttattgtttaaagctcagctcttcccacaaagctattagcgagccaaaccagtttcactgcttccatctctttgctgtggcagctctacaatgatatgaaaccatccattcatccatctgaccatgcatccatctctccacccaagaattacacaagtatagtagaagattgcttatctagaagtctaaacacaagaagcatccagacaaaggaattgttccaaaggattttttatgttgactctttgaaaaaataatcatactatggtcaaaattgaagaaaacttgctagaagttgtggtgtttggggaagagatgtgctctgtgtgtcatgtgttaatgactggtcaaggacagtcatccatgggacctggccggggcgctttccgaggttactaaactagatctgtccaatttcccttacccaatccccacattttaaaatcatatttacatatcatccctggctcaaatacctcattatccctgaagtcttccctgattctcctcccccaacaggcacagatgaacctagacactccccctacccctcacaatgtatctctctgtgttctctctgctggcacttggtatttaatcatttgtagataatagtgcatttcaaaaagcacttcaacattttcattgcatgctttatctccacctcctgtctccttggaggtaagagatgcatctaatttaccctagatattttcagaaccaaccccagtggctggcacacagatgtcaatgagtgactgattgattaaaattagatgacattgtccttgaatggagaaggccatccaaatatcactcaaatgcaagcaccaagcagtgtattatgcaaagagtacgtgctaaataaacataaaatccttccatcctctctccactcctcaaaattgaggactagaaaagaaacgcaatgtgtccattgagcctgaggtttctgaagatctgtgttccatggttcacaaatattaatatgttggtgtggtggcttttgatattctccatgatcaaccaggaactgaaaacccatgtttggctacattctactttgcttagtcagaaaatgagagttagagctttgaagatagacaagaccttcaaagtgaacggctacaaccactttcttttacagaggagaaccggagaggttcatcgtctccaggtcataggccaagaaaggttgtgcagatgcattttccctgttccctcctagacttgcaaatgaagcctctaggaaactgagtgctttctggatggctaaaaataaactcccagaaacttcatctagatatatcatggctgtaatttacagcgtctagaactttagcatggtataattagcaaatggattacaacaatttatttttggtttaaaagctcgaatgaacacaaccttccagtggaacgggaaaacaaggggctgggagccagctgcattcctccaaccccttccaatgccacagtgtttgtgctggctggcagccctctactgatgtccaatggatatgcaaagagaaggaactgcaattctgagctctgggctccctgaagcatgacttcctggacatagcctcccaaaatggtcaatgttcatccttttagtgagcaggaagatgtccaaactcaccttttcaatgcacaggaaaacccaacggcattcatcaagaggacagaagagctgccaaccttaaactgatgcagaagaaaggtatacactgaacaaaacataccaaagactaattacatggatgtttgttcttctaaagattctgggcacatttttagaatggctttccatcacttgccttactgcggggaaagtttgttgtgatgtctctgaataggcagtactaaaggatgataccaagatagacacttgtcacgaagctagaagatgactagactggggtcagagaggacctgtgctcaggttttggtttgttatgtgtgccatgaataacaaccaattcaaaacccttttataaaatgtcagtaatgagtaactacctcacaagattgttatggggattaaatgagaaaaatgtatgaaaaggattttgtaaatgaatattagatgattcttcttgtgtgaatacatgtccaaagcagatcattctgatgaggactttttctgaccaaagcactgtagaacattgcagcaagggccaggggcagagcagcagaaatcctgggaaattttcttctcatgtttccttgcacggtgtctgggcagaggcaagtcacccagcagaacaatcagagctaggaaagatggatcccgacttgggtaaggagcacaagacaacctgtctcccttctctcacacccctaccaaaaccaagtatctgcccaaacaccccttaacctagaaggtggcatgatggtggccaggcagtgtgggaaaccgaagcagtggttcttgcggctgaaagaaggggaagggtagttttctgagcatctgccatgtacgaggcacagtgctgggtcctttcacactggggctcttctccaaaccatgcaaggttcccctgacaccatgttataccattgctcatgctgtgtgtgggtctacgaggccccctttcttctctctgattcttcaaccagcccctgagcaggaagacttagaccctcatcctctcactcgttcaattcttagtgatcttaggtaaggtaagtcatccattttggaaggacttcagttttctgatctgtcaggttaggacaagaaccccaaactcactgccttaccagattgctttcagactcaaaaacactgggtgtgaaaagttttaaaaacagtgcaaaaacctgaaggcttatgtcaccccttgttcaagctcctcaagagcttcctcttgctgcttgtgctagttggcttttgtgttgctataaaggaatacctgatgttgggtaattaaaaaaaaagaggtttaattggctcatggttctgcaggctgtacaggaagcatagtgttggcatctgcttctggtgagggcctcaggaagcttccaatcatcggggaaggagaaagggagccagcacatcacatggcaagagagggagtgagagagagagaggaggtgccatgttcttctaaacaaccagatctcacataaactcatagagtgagaactcactcattaccatgaagagagcaccaaaccattcatgacagatctgtccccatgtcccaaacacctcccactaggcccacctccaacactggaggtcacatttcaacatgagatttggagggaacaaaacatccaaaccataccactcttaaataaacattacatgtctactttgtcccctgaccccctgctgatgttatgttcccatcagggccccttgttcccccagctccatccaaaccaggcatctttcaggtaattatgctcaaggagtaagtgccgtccccaaggctgggagtcccctcttccccttcagctctcagcttagccttactcacttgcaggagagctccttggcccctcagaggaaggagtttcctctactctacattctcagagcccttgtgatcacacttaccagagtgatgatctgattaatgcctatctccccagctagaatataagccctctgaagcaggcccacctgtatgttgtccaccggggtgtcctcagggggccaagcatgcagtagacccttacctattttgttcactgctctggaccagggcagggcacatagtaggtactcaaaaaatacttgttgaatgagtgcatttccatgcagttcaaatctgaagctgggtcagctcgaccctcccttctctgctctccacaagctctcccttcctttcccctgcactcagggccctttcctgtactgtttgctaccaggacctcaccattatccaagtgagtagcttgtctcccctgagaccacaacagccccaaggaaggcctagagaggcaaaccctagcgggacccagaagagggacagatccggagtatctgggccaatggaggtggggcacacagtaggggctcctgtggaacccacatttgacctactctgaacttctgcttcacaacctgtttctagggcaaagcttccagccttgagcttttgcttcatgggctaaaatatgtctctctctctcttttttttttttttggcttgaaataaatggttagccattatgatgtaaaatgcagctgtcacagtccatagaacaacagacaggttaatatgggtttttaagaatgccatttcctcatattaaccccagagcaacgtcaacctatcaagatagactccagagtgctccggaaacctgctgtttttgttctttaataatatttgatgtttaaataatagttgatgtttgtttccaagtagtttaatggtccgcctttccctccctccctccctcccttccatccttccttccctccctcccttcctttttaccttccttctttccctccctctccccctcccctcctttcctcctttcctccctccctccctccgtcccttccttctcttccttctcttcctccctgcctcctttctcttcttcctcattcccactctaagagtatcctggcctaggctttctccctgagatctgggatataaacatgaagatgtgtatctgggtcatgtctggaattctgaagcctcctgactgggttccttgaccctcatttcttccttttatccccccacccttcccacctgccagccatcccatccttcctacatgttgtctactatagaactaatttaacttcaaaaatatttaaactttaaataaagtgtttaagttattccctaagagaggtgagcttcagttacatagaaaatgtcaacggttaggactggcctctcccagcagaagtgaaggcacactgtgttctcctgcctagagggaagactgggtggtgttaaaggtatccaggaaactccagagggacaggtctgggcttgcactgtggctccggccacttggcagcctgaggaagtgactgtagagtctgtcctgcacagaccattgtagctcctgcccaagttggcagcccagcaccaatcaataagtcctgcatggaagagtgatgtgcgaggtgcttgtcagcatggatagattgattcctctctggtccctgttcacgttgtgtgtaacgcataccccaccagggagtcttggagggaagaggtgaagggcgagattctggcatcaccagaaattacttgtagatcctgaaatgggcaaggctttctcaggcctccagcactttctacatgctgtttccttagtctcagtcaccctcatctttccctgagtaactccttgtccttgaagactcagtggaaggttacctcctcctgaaagccttcctcaccctctgtctagatcagaggtccatcctgagcttccagcaccctccttttctttctcccctgctggtgcaattgtcccctttgtgcaatgctctgcttatttgactgtctccgataaatgtctcctgtgaatgcctaccagtctaaggtgctctgggacaaagaaaaaataatcaatacactaattaatctatgtatttactctctgccttgctccaaaaataatttaaggaagcacaaggatcaaatatgcccccaagtaactttgagtctggtgagacagcagacaacataagcattttaaaaatatatgacaaaggctgacaatgtgatcaagttgaggggttgggcaggagtggggaccctctctctgatctcctgcaggaccaagcatgacacacaaggatgctcagtgaatgtttgcggaatgagtgagatgggttgagaaggaggacctgaaggggacttggagatcacttatttcaagggaggaaattgtagtcagagaggagatgggacagtgcaggagctccccagttagtagcagtgcaggacacagagcccaggactatacgacattagttggtcattctaagtcccatttattggatatgcaataagacaagccataactgaggctctctctgagcctcagtttctgtcctggacacccagagatccaatacatctttgtgaacctattcccttcatacaggtctttaacaccctgggcggctgtcctcaataatctgtgctgcaacgtggagtaaatctctgacttcttttccttctcttctgttgctttctctctttctttcataccttcactcacttactcatgcactcagcgaatgtgtgccgagtccctacagcatgcctggctctgtgctctatgtgctacagctacagtggtaaagaagacccaggtcttgccatctgtaactcagtactctcctagtactcacccaggcagttttcagagctacagtttcttcactgtgcattgtccttctattcctccacaattctgttcctgctgtgtgtctgcctggaacatcctatctactgatctccacacttctactcctcttctaaggcctcgtccacaagctgcctcctctgtaaaacctcccctgagggttccatacctccttgctttctaccataatcctactgtactgtattggtaaattctgtctgttggtcccgctactgtgaactccagaaggccttggacagtgtatttttaccattgtatctacagcagcagggaaccagcaaatgctcaggaaaccttggctgaagtggctgaacttcctgaccagcatgttctaactagtctggggagttctaacctctggtgagagggcagaatcgtcctcattccactacacgtcctacctgcaaagctagcacaattatgctgtgcagcttacctctgctctcagaagtcgatcccagcttgcccaggacccagggaccctcctcctgcactctgggctgcttgcccctgcatccttgtgtgtcccacctaatctctgcttaggactttctgcagatttgctggggaatgtgcataatcaaaagtaagaaaatctacttttgtaacatttccacaaataaaaaatactcatagacacttaagcttttctggccacaccagaacattttggtaaatttcctttaggaagaaagaatgatctccccttgcaaagttgtagtcatactagccaaggcataggagactacagacacaggcaagaccctgccttggaataagatggctggggttgagcctggctctgtcatgatagctacaaggtctcaacaacttatttcttctccctgagaagcctccaggtccttacctgtaaatcagagttaatagcacaacccttgcattggtgcaatgaagattaaattaggaggtaagactcttgacatattgactgtgacactgtactcagtaaggattagtactctcatgaaggaatggggaaggtgagtagaatgagaagaatatcatttctcattgtagtttatacttctgaaattgattctacacacactgtcacatttacgcctcaatcaacatgtgatatatgcatgatattatccttttcttatagagaaggtatctgaggcttagggatgttgaataatttgcacaggatcatacaggcaggagagatggattcaccaattctctgactctaaatctggagtttcaatggccaccagccactgaggaagctgctagcatgggtctacagctggagaagtactcctcctcagaccatcacctctattggaccaggatcacaagccccaaataaccctagtatatggtagacatggtcagtgctcactgaaaagcccctgttcttcgcagccaatatccactttccttatagagaggttgaagtgagtggcatggagatgtgtaatttccaggccaagaaacaatgagcccctctgtactgttcctcttctgtggtggtgaccctcaaagccatgatttccagaatgcagagctataagaggggggctctacatggccctcatctgtgatatgagcaggaaacgcatctttgttgagtcaacatcgctgggtttgggggttctttgctgttatatcttatcttagtctacccggactgctgtgtctaggttcaaactatcgattgatcaccaaataaacaccacagggaataacagttggcatgtagtatctgatttaatcttaccctacgcactaggtagcatcacccttattttgcgaatacagaaactgaaatctaaggattaaatttaaaaatgaaataaaaagaataaattgcccaagataacatggctagcctgttttcaaatgtcttgttttcaagctttttgtcattccttttgtccttagttttcgcatctgtaaaaagggggatggggctggaccagatgcttttaacatttatcccacctctcataattataattacatgactcttccagctttgcccgccctcctggcctcctaatgtgtggctgacccagatgttgagcctctaggtagatagagctccagtcctgccctacaaccccagtcttgctgccgatcgcatctgtccagaaaagaagagtgatttgactactggttcactcactcgttcactcaatcaattattctattatttattcatttctacttaatactgactcagtcattcatttacagatgccttccacttcctcttccaccacctgctggccaaagctcatattcagttcccccaattttcactcatttatttcctcaaaatcacacttgttcactcattcacttgttagcttcttcatttattttcttgttgatttatttattcacgaattcattttttacttatttatttcttcatttattcattcattaagtaaatcattcatttaccattttcattctttctatccttcattcactcccttctccatgcactcactcactcattccctactctccttcctccctattccccagtgcagcatcctcccaggaagcagagcctccatcatggctggggccattagtcctccctcccagaacactctcttccattttaacatcctgcttgttgatctgtgcaggcatatctcctggtgtgcaggggatatgctttccactcagaaactgatgttcttgtaattactgttttgactttcaccctctaatgatagaaaattctttccacaaactcctctagtatccaggaaggcaaccgtgcagaatgggcaaggcatgcagtgcctgggggttcagattccagaacacagggtattcctggcagtcagagctcgggggacttggggagagcctctcttctccaggactttgcaacctggggtgcagggctgagatggagatgggggcatctcggagagcagcagacttggggagccaggtaaaggagtgtgaagaaaaagcggcccatctcaagactgtggagtcataatctgtctgtacttgggttactacagtgacaggtgccagggtcaggggtgaatatagaggcttatcagcatgtcaccagtgagaataagttgtcagcaatatcatggcagaagatcaacattacaatttactgacctcttaccctgtatcaggtatttctcatactttattctagttgtccctcaatgatcaatctccccatctttcatttagaaatttaatcctttgagttttagctggttccatgacctctcagccaaagactagatttcccggattcccttgcagtgaggcatgactgtctaagtttgggccaatgggtgtgagcagaggtgttatgtgcaactttttgcttgcagttttagaaaaaagccggttgccttccacttcctcttccaccacctactggctaaagcatggccctttttagtgagccatctttgtctctggggttaagggcatcttgaacagcatgttagaaaaagataaaagaagccctgaagaaccttgtgaagtagaacatctctatccccctggctgagattttatgtgcaagagaaacaagcttcttttatgctttggccaccactgttctgatctctgttaaagcagccacgccagtgtctactaatcccaggaggaaacctctttgcccacattacgtcttcttgaggataaacttcccttatgggaacactcttgccttaccttattccattactaatttctccttttcatggttgaaacgtgtgccttcaaaattcatgtccactgaaaatctctgaatgtaatcttatttggaaacatggttttgcagatgtaattaaaagattgatataagaccacactggattagggtgggctctaaatccaacgaggggctccttaccagacagaaaggacacacaaagacacagaggggaaggccatgtgaagtgggggtggagactgcagtgatgtgtgtccccaggccaaggagtgctgtggagtgctgacagccgccatagctaggagaggagcatggagtggattctctcagagcctccagaaggagccacttcgccaatacctggactgcagacttttagcctgtccaactgtgatagcatatgtttctgttgttttaagtcagcaacaacttgttctctgtgaaaggagttcaacctttatcttgtggtcagtggggacccattgaagggtttgcagtagagaagagatgataacaagaatggctaacatgggttgagtactaactctgcaccagaaaatgacccaagtgcgcacttagacataccacctcagctaatccacagcacaacatggacacaggtactatcattacccccagttacaaattagcaagtttgtggtaatctgagtgacaatgattgggttggtgggtgtgggagaaggaaccggacctgcctcacccagtaccccctgtatggcctatgaagtggcctatggaaagcacagctcttctcctctccttgacgggatggccaagtctgtctaactataggtcgaagtgttagcaagaccctgtgtgcagatctaaagctgccctgtgggctttccatggtaattggtggagggcagtggtcaagatcatggccttggaagccagaccacctggcattaaatcctagtcttccagttactagttctgtgatatgggaaaaattaattaaactttcagtgccttggtttcttcatccatcaaatggggctaagaatagtacctaccttatagaaatgttgtattagttaacatcataaagggcttagaacagagtttgacaaataggaaatactaaataagtattaatgcttaactagtggtcatgatgctataaagtatttgctgttattatttatttatttatttatttattattattgttatctgtctgactcctctatgtcttaattaattttgattttaggccaggaagataagtattattttctagctccaccggaatcccaaaacttatttaattttctttagcctgattttgcagatgaggaaactaggtctgagagagatgaaatggcaagctctggacagccttcgagtcctcctccacattccctggctgcccagtcacccatctggtctagttgttgggtttgcgggctcacccctccctggcaccaggtggcaggtcctggaaggtctccctcctggctcccaggcagtgtgcaggagcccattgggaactccctgggccagctgttcatctgctgcacagcatgctgagccatgcagcctggtcaagtggacatgggcccatatgaggatccatagtccctgttcatacaaggctggctgactcttcagctctgagggagctatttctgcaggcccaaggtgcgctgcagggaaagcaggttgcacatacatgcataaacatggtccttctgcctaaaaggtccctagaccttgtccctgagtgaaggcagcatgtttaatgtagagaaccagcctgcttaccagacacctgaccccacataccagttcattgggaggacagaatttccctctgcccaatggcacagacgatctgagaggacaggggtgagagggagagtgagagaaggaaaggggaagggacatttgttgagcatttactgcaggccaggcactatgctagttgcttcacgtttgtatgaatataacaattgttatattcataaaaatcctatgctgtaaactcattttaacaggtgtggaaactgaagcccaacaagctgaaaacacttgtacaagccacatagccaagaaacactggaggcctgccgaactttttttttaatagtttttttgggggaacaggtggttcttggttagatgaataagttttttaacggagattttggtgcacccatcacccgagcagtgcaccctatacccaatgtgtagtcttttattcctcacacccctcctaccctttcccctgagtccccaaagtccattgtaccattcttatgcctttgcgccctcatagcttagctcccattatgagtgagaacatatgatgtctggttttccattcctgagttacttcacttagaataatggtctctaactccatccaggttgctgcaaatagcattatttcatttctttttatgtctgagtaatactccatggtatgtgtatatatatacacacacatacatatatatatacacacacatatatatacacatatatatacatgtatgtgtacatatatattatatatacatatatacacacatatatacacatatatgtacatatattatatatggatatatatcgtatataggtatatatccatatatatcatatatatctatatagtactatatatctatatatctatatatagtgtatatatagtgtatatatagtatagtatatagtatatatatagtatgtatatagtatatatacactataaatactatgtatatatagtgtatatatacactatatatactatgtatatatagtatatatacactatatatactatgtatatatagtatatatgtatatatacagtatatatagtgtatatatggcatactatagtgtatatatatactatatatagtgtatagtatatagtatactatactatatacagtatatatagtatatatagtatatagatatactagtatatatagtatatagatatactagtatatatagtatatagatatactagtatatatagtatatagatatactatatagatactatatatactatatataatatatagtgtatatactatatagatatactagaatatatatagtatgtagtatatagatatatatgtactatatagtatatatagtatatatatagtgtatatatatagtgtatacatatagtgtatatatatacactatacatactatatatatactatatagtactatatatatctatatactatatatactatatactatatatatacatatatatatctatatagtacggtttggctgtgtccccacccaaatctcaacttgacttgtatctcccagaattcccgtgtgttatgggagggacacagggggaggtatttgaatcatgggggctgatctttcccatgctattctcatgatagtcaaaaagtctcacaagatctgatgggtttatcaggggtttctgtttttgcttcatcattttctcttgctgccaccaggtaagaagtgcctttcacctcgtgccatgattctgaggcctccctagccatgtggaacggtaagtccaagtaaactctttttgttcccagtcttgggtatgactttatcagcaacatgaaaatggactaatactatatatatatgtgtgtgtgtgtgtgtgtgtgtgtgtgtgtgtgtgtgtatacatatatatacatgcaccacattttccttatccactcattgactgatgagcatttgagctggtttcatatttttgaaattgcgaattgtgctcttataaacatgcttgtacaagtatctttttcatataatgacttctttttctctgggtatctacccaggactgggattgctggatcaaatggtagttctacttttagttctttaaggaatctccacactattttccatagtggttatactagtttactttcccaccagcagcataaaagtgttcccttttcaccacatccatgccaatatctattactttttgatgttttgattacggacattcttgcaggagtgagacagtattgtgttgtggttttgatttgcatttccctgatcattagtgatgttgagcagcttttcatatctttgttggccctttatataccttcttttgagaactgtctattcatgttcttagcctactttttgatgaaattgtttgttttgttcttgctgatttgttagaattccttgtagattctgagtattagtcctttgtaggatgtatagttgaggagattttctcctactctgtgggttgtttgtttattctgttatttcttttgctgtgcaaaaaccttttggtatcattaggtcccatctacttatctttgtttttgttgcatttgctttcaggttcttgatcataaagtctttgtctaagccagtatctagaagggtttttccaatgttatcttcgagaatttttattgtttcaggtcttaggctgaagtctttgatctatcttgtgttgatttttgtataaggtgagagatgaggatccagtttcattcttctacatgtggcttgacaattatccaagtaccatttgttgaatagggtgtcctttccccactttatgttgttgtttgctttgttgaagatcacttgactgtaagtatttggctttatttctgggttttctattctgttccattggtctatatgaggcctgcctaactttttctctgacaccacattatacttaccttcattctgaatagggagtgtccttaaggtccagaagagacccagagcaggttctactgcatgtctcagccactaatcatcaccgccagcagcagtgttgtgggcagcactgaatcacacttgacactccatgggggtcttttacttgtattatctcttttgacttgatgtaagtcaagacatgctctgctagtgattgtactaagaaagttccatagcagaaagatgaaggtatttcgtcttctggaccccactggctccatttctggaaatgccaagggcatagagcatgttctctttttaagaggctttcatcagcaaattcagccatcatttcccaatgcccatttggtgccaggtactatgcttgggtaggggattcagagatgaatcatacaatccctgcccctgaaaggtttatgcacaagtgggaattatagatctggaagcttaagaatatccatgatgaggatgataataaacacttattgactgcttactattggctattctaagttattgacccttattaccttatttaatcttcataaaaccctgttatttgcttcatttaattcaggaggaaactgaggcacagagagaatggaattactaataagtggcagaagtgggaactgcattcagtcggtctagctcaattttgtagtcatgcggtgattaatttgcccagaatgggtgaagaggtcagttacagcttcatagagaggcagaatcagtgcagggttttgaagcataggcatttgccaggcagaaaacagctgacagtgcactaggaagttccaaacagaagaagaatgagaaaagcatgaacaatggttgagaggcacaaaactatggtgtgcagaagaatttccatggagttcagtatggctagaacataaagcaggggagtggagggtgggctatagtttcagaaatgaggctgcagagggaacaggaactcttagaggctcatgaatgccaggcagagaagccagaacattttattcacccattgaacaagtggagtttatttgttgcatatgagtagtctggggagaggcggttcaggccggcacggcagttctacagagttaccaaagcccaggctcctttcacatttgaactcttccatacttagcattttctgcctggttgcgaggtggctgccacacctccaagcatcatatctgagttcacagtgggaagaagggagaaggataaagaacaatggcctggtctttgtgacaggagttcaacctttatcttatggccagtggggacctgttgaagggtctgaggtaggacagagatgataacaaggatggctaacatatattgagcaactaactctgcaccagagaatattctaagtgcacacttatacatatcacctcaactaatccatagagcaacctagatacagaaactatcattatccctagttacaaataaagaaaataaggagacacagaaaagttaagaaaattgcccaaggctgcctagccaggagcagcagaaactgggtagtctgcctcctgggtcttgctgctgatcaccacattctcgtgtatttagaaaggtccactccgactgccagaaggctccaggtgaaggggatggggcttgagcagggttggtagcccagttggaggtgaaggtggcagggtaggaggggaagagtcaggacacagagagagacttggtgtggggttgagggtgagggacgagtggaggacacccccaggtctatctgaccctcccctctctaaaccaggctccttctgtgtccacagggcctgcaaaactgtggctggggcacctaccctggatgcatgtagagatttaaaaaaatgagtcatacccttgtagcaggcacagcctgactctggtttgacatccacactgacacccacatcattaacatggttccctgtgcagactctcaccctagacagtgccaaggatggaaaaagcatcagctagtttgcagaactggggccatggttagatcattgtcttgtgcctggcaggcaggagcagggtgatgctgaagtctgctgctggcaggagcctgagatgggctctgggtctgagtaaaggggatagaacaaagattttgggacttccattccagctggacctcaagccatccctcagcaatctcctaagcacctatatgtggcagaacttcagtggggtgctggggtacagaaacaaatctgattatctcccaagtcaagaagctcccagtcctcacaatgtcagtacctggtggtgggtgctgtgacacaggaaagcagagagggttgtgggagaatgacatggtgatccaggggtgtggggggatgccaaaccagtctggaggtcagggtgggcttcctggaggaagggactgcaagctactttcccatagtgaaaagttggccgggcaaagagtggaactgtatttactgggaccacatggactaaagggagaggagagaaagctagacacatagaggagcatctgttacatcatcacactctggctcctggcatcttggtagctggttgatacagcatctgactgctgcagaaagcaaagctctttgtgcttgcagtagattcaccgcaaaatgaacacaattcttccccccttatatccacacccctttgcaatgtgactctgtagctcctcccataggaggtggagtccatttccccacctgttaaatgtgggctcatcctgtgacttgctttgatcaataggacgaggcaaagttgtgatatgtgagttctgagcccaggcttcaagaaaccttgctcatccctgcctgttctcttggaactttgctcagctgcccaggtgaacaagcccaggctagtttactggatgacatgagacacatggcccagtctacccccacccacgccatctcagtccttcatctcagataacaatcagccttcagctgatccaccagctgacctagggtgaccagctcatcccctttcacccaggacctttcctaactttaaaactggaagtccaataccccaggaacctcttcagtcccaggcaaatggagatggctggtcacccagacccacttcagatgcatgaatgagcctagccaagctttatctagattaacagaattgcccagctgaccacacactcagaagtaataatacacagttgttttaaaacatcaagttttgggtagtttgttacacagcaatagatgagggataccctggcacatctgtgaattaagcccagacttgtggcctcagtagcagttgggaactgaccagatccctctccttgagcatgccgttgagtgatcgcaagagggagggcggtggaacttggggaggctacgcaacctgtctgggatctcagagccagggcatattggcagtgggaacagactcaggtcttggaatccttcctcttcccccaagctgcctctttaactagcacatttgtgctgcagtaactcaagctcccccagagactgttgattgaacaaatctctggtcatgctcaggctctttgacacagttttcttgacaagatccagtgtcagactgtgtgatgtgaccccctccccccaaaaaatgatgagaccaatacttaaccacaagccaccaccaattctgctgtggccagagactagggcaaagacaaacacttatcagtcagcaaaagagatatgttcagaacattctgatgcacaggttgaaaagccaaacaggttttgagcatgcataaggagctggcagacagagatcttagcagggtcttccctggggaacttaacttgtgtttccttttttgtggatagagtaagaaatctctctagccatcttggggagggcaggggaccctgacagattaatttggaaaaaatgttagtttgttccctattccaaagacaaataggatggggcttttctttctggtgcctgggcatctttgcccctaaagagagctggctggctttttgggctttttgacattcccatgagctctttcctgtccagctgctctgaaccctgtgatatgttgggaccttggggtttttggaggataatggtactaaggggacctggtggtctcagtggtctaatggggaacaccagaggcaaaatatagcactgagaagactcctttccttccaagttcatgaaggcttgggtgggaagttgggaacataagactctgtcacatcaggagcccagcactggacagcttgccatgggccagcagctgcctatgatgcaaaatggcagtaaccacagcagtggattgaacaataacagagactttccatacttgagaggtgttataggtcaaacagcattgcccaaaattgatatgttgaaatcctaacccctagtaccttagaatgtgaccttatttggaaacaggggcattgcagatgtaattagtttagttaggatgaggttatactgaagtagggcaggcccctaatccaatatgactcgtgttctcctaagcagtggaaatagtgacacagacatgcacacagggagaatgtcatgtgaagatgaaggcagagactgggggatgcctctatatacgaaggaatgcccaaggttgccagcaaacccccagaagctaatggagaggcatggaacaagtctttctcacagctcttgaaaggaagcaaccctgctgacacctgcctttcagacttctagcctccagatgggacactatgttgtttaagccacccagtttttggtacagtcttatggaacctagcaaactaatacaggagtaggagccggagagacctttttatgcgggagaggattgtatacatttccttggttctaggacaaggtggggaagaggaactagggaaagggatcataagagaaccatctggacatgccccaatctctgtgtgaaagctcaagtcagtttaaatttgacttgagaaagagaggactgtgctataactcccccagccccgtgagtatgatgttgaagcatcttttcccattacatgaaggacataagcacagaggtagaagcacacagaggtcagagaggcatcttctcctatcttacctgtgagaagataaaagcccagagaggggaagaatttgtgtcagagtcccacagcaggaaagggtagagagggcctagaaccttggtatctacaaatgtccttctccaaatatcagcatgcctcacccagtatatggtatttgtgtgaaatgctaatgcctctgtgggcacaactgcatatttagacatccttaagaaggaaaggcagctggaaagtggatctttgcatttcacaaagtatttcagagccaggatgagtgaggattatcttccaagactgtgccttcctagagggaaacccagccatggaaacgctgtggagtagaaagtaagtggttagtgcctaaacaaaagctttgatctatgaaacgattaaccgttgggttcctttaaatagagagtccccatagactgattaaatatggtgttttagaaatctttaacaactggggaaggagagaggaagaggatctgggaaacagagttccattctagggttgggagccacatgtcttggaagacaatcagacagggggattggttgaataaatggataagaatttatcttatccatttattgcttgctgtagaacgtagcctaaaataattgtgtaagttaatgagcaaagaagagtcagcttttggacaaatcttcattaacatagctaatgctgattgacattttccatttactgtttttcacatttcaaagcacttccccaacaattctctaacaagctaaaattctctaagctggggtaaccaagtactttgccatccaaagcaggtcacttttgagggtgaaaggaagcattctttgattgttgtttgcttgtttgagacaaggtcttgctccgttacttaggctgcagtgcagtgatgtgatcatagcgcattataaatttgaattcctggacttaagggatcctttcacctcagctttctgagtagctgggactacaggcacgtgccaccacacctgactaatttttatttattttttgtagagacagggtcttactacgtttcccaggctggtctgaaacccctggctcaaatgatcctccagcctcggcctcccaaaatgctgggatcacaggcatgagtcaatgcacctagtcagcactgttaataattacactggatcagcagatgtaaaccagggctgtcctaggcaaacgggggcatgatcagcccactacagcctcctaaagagactgggtgaccagggacaccgttattcattcacttatccatttattcaaccaatcccccaaaccagccccttctactttacccctatccattcagttactcaaataaaaacataggtcattctcaattctttgctttccctcacagaccatgttcctccccaactccaatccatcagcaaatcctgctaaccctatctgcaagttatatcccacgtggccttctcctttgtgtccttctctgatttcatccctgacttaggcatcatcaattcttgcttagacaacagcaggagtgttctaattcatcttttctgttccttttttttttttttttgagtcagggtctctatctgtcacccaggctggagtgttgtggtgtgatcttggctcactgcaacctctgcctcaaccttcagagtagctgggattacaagtgtgcaccaccacgcccagctaaattttttgtatttttagtagagacggagtttctccgtgttggccaggctggtctgcaactcctgacctcaactgattcgcctgcctcggcctcccaaagtgctgggattacaggcgtgagccaccgtgcctggccctcgtctctccattttcatacttgtccttcttataatccattattcaagaagcaatcagagtaatttttccaaaatgtaaatctcatcatatcttttccttgctcagaattttctagcagctctctactgtaccaagaatcaaaaactaaacttattttggccctaactttgttcaataagtatttgttaaataaatgaacacacagtcgacatgtatttattgagtacattttatcgaccaggctcagtcaaggcacatttttagcttctgtcacacttatgtcaccgttggaaggaaaacttcatctttattcctgatagttatttccatgggaagggagccccattagtgttcttgtgagccatcttgcccctttggtcacaggtagtggtatgagttacatgaatggtaaactgaggaagaatatggttattctcggttgagtctcaattttcttcttcttggcagttggcaacttttttttatgttcctccaggagctggcttatcctctgcctcatccaacgtggcctatcaccaggtgggtcagtctgcctaattctgggtccaattatcaagcctatttagctgttacactaagctaaattattcattatcaataataaacatggtattttagctttcatctgctatcttccatttatttctcaacacgcttaggacttaggtagagaagggttgctacttattgggctgcctcaaagacctcagatacccttgcaaaacaggagaagccagttgcataaagcctggtgcagagctgctggcaacccaagggtatagcaatctgggactcgagaagtgaaagctgtaatagtgcagttgccgcctgagcaaggatcatgtgggactcacagtgaaaactgaagtacaaatttagcagccgcatttagcccagaagaatgtcttcaggaatgaatcacgaagggaatgttgtcatttgtgcaaagagacagagggttataagggaaaaggtggctagagagtctcatttatgtttatgaaaacagatggcctttttgaaaaacagaaagccaaaacaaaagcatcatttattccaggagtttagagatttttctattgacatcacataaaaaacccatctcttaagctttttaaccccctggggaattcataaatagcacttcttaaaataaaagcaaaatgagttttcataaagatgtaagttacataagactaccttggtctccccgcccccacagcttatcctccctttgtctgttctttgcccgggtgcttctaaaaaccaacactctgctgggaggggtttgcaagaggtggcaaaggtgaaacgttgtacatgatgctctcgggggagagatgtactgactcatacctccctatgtctcagatacccctacagcaagtgaaagactgggctggaattttgattttgtttcctcactatctttaatttttttttcttcaacccattcttccctttgtcttcagactgatttaaaatgaaaaaatcgatgcctgtgcttacagctacagctgtgcctagtgcatgtctttcatcggctcttccagatccactgctctccttttccagcctgttctgtgccctgcaaggctgctctttaaccactgggtcaactgggctctctctggcttgcagctgggttcagccaatgggagactctggcaggaggtgtgaggaggttgggagaagaatgaggttagggtttctattctccagatgacctccctgctgggaaattgctgtgttgctatgtaggaaggcacgactcctttgggcagccttttgctacagctatcatattgctacacctctctctaagttgcaggaacttctccttcaccttgctcatcaggtctaggagtgacagctcccagctgttgttagcctcagggtactttgccaaccttagtggttgtccttaatcctgctcatacttttaaaataatcccttcactacactctcctcagctaccccatatgacaatgccactgtttcttgccaggatcctaagtaatatactatctatctctatatcaatatctctatctatacatctgtctttatttgacttcaaatagagctctatttctttctttgctgtccccatcagacttcttgaacaaataccctagaaagtttgagttcagcagggcatattggaccgtcaaacctggtgttaactagtacaggttttttagaggttaatttgccaaagtatagcaaaaacctgtaaaaatgtccaatgcctatagctgagaaattataataattctaaaaaatatcccaagcaagccatggatttatataaaattttttccacgggtgatagtaaaaacatttaatgactggtatgggcactcactagttgaagtggggcaggttgtattaatatgtcaatgccaactgaatatcagtgctgggtactcattgtagtattgaatagaagaataaataaaaggaggaaacaatctaaatgtctaacagctagagaaatgggaataaactctggcattccacaggacgcaatacaatgcagccttacaaaataagcctaagagatgaatatttaatgacatggaaaggtagactatatgttgttaaatgaaaaagaagatcacaaaatttaatgtggaatgcagtcctatttttagaaattaaaggcaaacttgtgtgtatatttacagagctcaacggtatttattttagtgtggtatggtaatagctacttttaaaattttcttccattctcatatctatagtttctaaattttcaagaaaaaataagtataatttactgatgaggaaatatcacaataaaatatatttgtaaaaatagtcaggctgggtgtggtggctgcaatcccagcattttgggaggccaaggcaggaagatcacttgagcccaggagtttgagaccagcctgggcaacacaaggagaccatgtctctgcaaaaaattaaaaaatttgctgggtggcactaatggtggcacacacctgtggtcccagctactcgggaggaagaggtgggaggatcacctgagcccaggaggtcgaggctgcggtgagccgtgatcacaccactgcactccagcctgggtgacagaggaagaccctgcctcaaaataaataaataaataaatcacccaaccaagttttagagatgtgctactcagatgttcataaaatatttgttgggaatctctgattacaaactgtttactcaatgtactgcccatagggtcagtcattcaactgatgacttctggtctcattaaaggtggttgcatttccaaacagtgagatgctgatccaacagggtccttgggccatcttctacactccatttactccagttctgctcaatggccactgactccttgccaagaaaaagatgcattccacactgaatctgttgcctgaatccttagcaattcttttcagatgttctatctcctgaacacttaatatattcctaacagattgactacatgttattaataactatattgtctgtcaatcaacaccatcttctgagagaaactttccaagtcagtcatattaaaaacccaattaaaaaaactatttaaaaggcattctttctcaatagtacttttaattacttgacacctaattatttactccttcattttttagtctgcctccttttccaaaggactcagtgaaactaattagccaacatgaagctgtatgcatattcatgtgtatgagaagatatgttccttttaatacagtatttagtatatagtaatatatgttatatagtgtatagtcagtgataataatatggtatttagcacatgtaaatacaatcattttattcaggaagagaaagcacagaccaaagaatgcatctaacatcggtctgaagaacagagaaataaatgggaatttactgaggttcctgtaggagaccggtcagggtgggggcaggttcctttggttttctgattgaaaggataacattgcttttacctcttgtccagctagattctctgctctggtttcaccccttctccactaaccatacccctgacagactaaacttcacaatatgcagacatgaccgtgccacttatctgttctaagccctaacatggtgacccgtggcctagaacagttgttttaaacgaattgtttaaaccttttttttttcaaagcagtggaaacttttcctccaaaataaaatttatattggtattcagtatataaacagatagaagaactgttctcattaaagcaggggcaaagggttggagcccccttggttttcaaacctagtgcacccatcatccttactttagtgctcctccaccagactgggtctcttttctcttttctttctcctttcctctcccttcccctcccctcctttcctctccttttctttttttttcttttctttccttttccttttccctttcctcttcttttcttttctttcttctccccctccatatttgaagcctctctgagcacccataggtattgctctacattcagggatcaagaataaacagacaaagcccctacttcaatgttagagtctaaggtggaagtcagataacaaacaaaactctgacatgttaggtgatgatcaatattatggaggaaagtagagtgggataaggaggaaggagggtatggttagggcgggaatgtctctctgataaggtggcattaggtaggaacctgaagggaatggggcagctatccctgcaggcagctaggacaataaaggtccagaggtgcaagggtgcctggcacgtaggaggggcagcaaggaggcaggtgtggctagacaaaggtgacccaaggactgagggaggagatgggagcacagcatcagggtgggccctgctgtgacagatgtgtagagccccatgggacatgacagcaattttagcttttcctctgagatggggaacctttagaaggttttaggcagaggagtgatgtgaacagattgaagaagagcaaagaggaagcaggaagaacaggtaggaggctcctggaataacccaggagagagatggccaaggtgagggtgtgaaggtgaaaggaagtagtccgatcatatacttcacatacttttgaaggcagaactgaagatatctgctgatgggttggatgtgggatgtgagagaaaggggagacaaagaaactctaaggtgttttgcttgagtgaagcaaggaatagaactaacacaggaagagcaggttggcaagcaggtgggaaaaaatcagggaacaggctttgtgcatgttaggtttgagaagagctgttgcctgtttagagggatatataaattggagtttagggcagaggtccagactagagatataaatctgggcgtcatcgatagatagatgggtttaaacctggaggttgtataagatctcccagggagtgtagaacagaaagaagagccctggggcacccctgcattcagaggattcatgaggaggaagaaccagtgaaagaggtggaagaagtagtgagtagtgtggtgaggcagaaccaggggagagcagagaccctcagcaaacaaaaaggaaatgctccagaaggagcgtgacatcaaccacgtaaatagtttgagtcatatgaggactgagcaaggaccactgcatatagcaacatgcaggtcctggggcccttgacaggagcagtgttggaaggatagcggggagaaaggttgactggagttcctcaagggcagaggccacctctcattcacttctgtctcccccacacccacccacagggtccagcacagtcacagtatctggcacacagtaggcaataagaaatacccgtcagtgggtgagccatcacccccatgaagccaccaaacttttatttttccctgttcataggatacactaatttcatagaaatgatccagtcttttcatatgtgtatgtatctggctagaagaaagtagcagaggaaatcaaataaaaaattgtatcttgcttccagaaagtcagtgagggctgcccttatttacaaaagactccatattatttctgcagagtaaggctggtacaaggacgtcagtacctttaattgcctatgcatggaaaatgttctaatgttagcaacaacaacaatgatgatgatatactatattttgtacattttggaagaagctatcatatgcatcacctcacttctcctccttgccaactacctcacaacgtttgcaagagctgctggccttacgtagtctgctgagggaactttgtatttaaagagcacagcaaactctcttaggtcagaagtctgcaaactgcaaacgatggcccagcacatgttttttaaataaagttttcttggaacacagccacaaccacttatttgcatactgtctatatctgctttcataccagaacagcagagttgagtagttgtgacagagtcccaacaaagtcagaaatcttcactatccagctctttacagaaaaagtttgctaataaactgttttagataagctaaactggaggccttcaaaacaagatgattaagatagtccattgaaatttgggataaaatatttgaacatctctctctttttaattttaagaaaggaagcattaaacttacctaatatttagtatatggattgagaatgagtcatggatgtaatttataaataaaattgcaaatactgaggatgtgtactcaaaaaacatttattgttaaggacagatgataaaaagtttgaagaccaagcgagtgattcaataaagagtttgacatatagaaggtgctcaaaatagtttagaataacattagttaacatttactgaatatctagcctgttttaagagcagagctatgggctttacaagcatttttctcatttaaatcaacaaccatccgatgaaaatggtattatatccctgttccattttacagattaagaaactgaggcttagcaagattaaagatctccttaccatgggacagtgagaaaacggtagctttgggaatggaatcatgatctctctgtctccaaaacctaaggtctgggcttgcaaattgccctgcagttttaatggtgctattttatataaatatgttttaggtacaggcttaaaattaaccaaagcaatgaggaaagggaaaacattgactttgcatcttaagcttattaacaagattctaaaaatgcattttggcaaaaaggaaagaaaaaaacccaaggtgagagcagatccctggaacctcccccgtatttatgattcaccctccactctcaagtgtctgagtgtggagcttctgtaactaccatactaggtatatggccatgaggtagacagtcaaagcctggaattagacatgggtttcctcacagaaaccttatggcacatacgatctatagattccaaaggttgaagaagcatcatagtgcagtgttcaacagccaagtagtcaggcagaattggattttgctccattatgaactagcagtgttgccttggtcaagtcctttaatctctctaagcatcagcgttctcatttatacagtgagaacaataccgcgcacttggcaagtttggagaccttctgaaacacttagtaattgtgcgtggggttaatcataactatacttatatatatatttttatatttgtttttagtaatttgtgttgtctgaatatttttgtaacaatgcagttaaacataaataagactggctgggcatagtggtgtgcacctgtaatttcagctacttgggatgctgaggcaggaggatcccttgagcctaagagctcaagaccagcctggacaacagagtgagaccacatctcaaaaataagtaaagaagacaaatagattatctgaatagtcatatatatacacacacatatatatatgtatatctaaacatatatatgtatgtgtatatatgtatatacatatataaaagaaattgtattaatcattaataatcttccaaaaaataaagtaccaggcccacatgtgtttactggtgaattctaccaaacacgtatggaagaaactataccaattatctacaatgtcttctaggagacagaagcagagtcagttcttcctaactcattccatgaggccagcattaccctaatgacaaaaccagcaaagacattacaagaaaagaaaactacaggccactatctctcaggagcacagataccaaaatcttcaactaaatattagcaaataaaatccaacaatgtacataaaaaactacacaccatgactaaatgggatttatcccaggtatgcaaggctggttcaacattcaaaaactgattaatataatccaccacatcaacaggctaaaaaagaaaaaccaaataattatatcaatagatgcagaaaaagcatttgacaaaattcaacactcgtttatgacaaaacctctcagtaaatgaggaatagaagggaacttcctcaacttcataaacagcatctacaaaaaatctactggtaatacatttaatggagagaaattcaaagcttttctgctaaaaatcaggaagaaagccagggtgtctgtcccttcacaccactactttttaatattttactggatgtcctagctaaaacaataagacaagaaaaggaaataaaaggtatatagattgggaagaaagaaataaaactttgttcacaaataatataattgcctatgtaaaagtcctgaaagaactgattaaaaaaaaaaaaagaaagtcctggaactaataagcaattatagcaaggttgcaggatacaaagttaacatacaaaagtcaatcactttcctatgcatcagcaatgaacaagttgaatttaaaattaaaaacacattaccgtttacattagcaccacccaaatgaaatacttaggtataaacctgacaaaatatgtacaatatctatatgaggaaaaccaaaaaattctgatgaaagatcaaagaactaaaaaaaaaaaaactgttccacgtttataaacaggaagactcaaaattgtcaagatgtcagttcttcccaaatttatctatagactcaatgcaatcccaatcaaaatcccagcaagttattttgtgattgttgacaaaatgagtctatacttgatatagacagcaaaagatccataatagccaactcaacattggagaagaataaagacagaggactgacattactgaacttccagacttactataaagctacaataatcaagacagcatggtattggaaaaagcaaacataaatacatcaacggaacagaatagagaacccagaaataaatctacataaatacagtcaactgatttttgacaacagagcaaaggcaatttaatggcacaaacataatattttcaacaaatggtgtagggacaactggacatccaaatatcaaaaaatttatctagacttagacctcattcccttcacaagaattaactcgaaatgtaaaatgcaaaactacaaaacaccaagtaaataacataggaaaaaatctaggtgatcttggatacggtgataatttttagatgaaatgccaaaagcacaattcttgaaagaaataattgataagctagatattaaaattaaaaacttatgctctctggaaaatgatatgatgagaatgagaagacaagccatagactgagagaaaaatatttgcaaaagactatctagtgaaggactgttagccaaaatatccaaaaaactcttaaagttcaacaataagaaaacaacctgatttaaaattgggcaaaaggtctgaacagatgtcacatcaaaggagatattcagatggcaactaaacatataaaatgatgttcagcatcatatgccagtagagaactgcaaattaaaacaatactaatactaacctattagaatggcaaaaatccaaaacgctgacatcaaatgctagtgaggatgtggagcagcaggaattttcattcattgctcatgggaatgcataatggtacagctactttggaagacagtttggcagtttcttaagaaactaaacacattcttattgtatgatccagcagctgcactccttggtatttacccaaatgaattgaaaacttatgtccagaaaaaaaccagcacatgaatgtgtatagtacttttattaataattgccaaaacttggaagcaaccaagatgtctttaagtagataaataaataaataaactgtggtacatccagacaatggaatattatttaacactaaagtaaatgagctatcaagccatgaaaagacatggaggaaacttaaatgctcattaagtgaaggaagtcaatccgaaaagtctacatcctgcattattcccattgacattctggaaaaagcaagactttggagacagtgaaaagatcagtggttgccagggattggagggaggaaggatgaataggcagaacacagaggatttttcagaatagtgaaactattctgtactacaatggcagatacatgacattatatacatttgtcaaaactcatagaatgtacaataccaagagtgaacaccaatgtgagctatggactttgggtgataatgatgtgtcaatgtaggttcatcagtggtaacaaatgtaccactctggtttgggatattgatgtggcaaggttgtgtgtgtgtgggcacagaagacacaaggggactcttgttttccacttaattttgctgtgaacctaagacttctcttgaaaataaagtttcttaattttcaaaaagaaagaaataaaatgaatgaacgaatgactcaaaaggagagaaataaaatgaatgaatgaatgactcactctattcttcatgtgcattaggatggcttatcaaaaaaacagaaaataacaagcattggcaaaaatgtagaaaaattggaacccttgtgcattactggtgggaatgtaaaatagtgttgctgctgtgaaaaaatgcatggtaattcctcaatttaattataaaagaatgatcttatgatccaactattctatttttgaatatatacccaaaagaactgagagcagggacttgaacagatgtttgtacatctatgttcacaggagcattattgacaacagtcaaaagaggaatcaatcctcgagtccatggtcagataactggataatgtgatctatgcatacaatgtaatattattcggccttataaagggaggaaattctgacacatgttataatatggatggacctagagcagcagcccccaacctttttggtaccagggactggtttcatggaagacaatctttccacagatagcggaggaggatggtttcaggatgaacctgcttgatgtcagatcatcagacattagatcctcataaggaatgtgcaacctagatccctccatgctcagttaacaatagggttcgcactcttaagagaatttaatgcccccactgatctgataggaggcagagctcaggcagtattgctctcgctgggcctgctgctcacctcctgctgtgcagctaggttcctaaccacttactggtactggtccatggcatggggtaggggtgtgggggtggaggttagggggggtgggaactcctaacccaggggacattatgctaagggaaagaagccaatcacaaaaggacaaataccgtatgattccacttatgtgaggtacctagagccgtcaaattcccagagacagagagtagaatgggagttgccagggcctggagggaaggcagcagggaaagttattgtttaatgggcatagagtttcagtttggaagatgaaaagagttctggagatggacggttgtacaacaatgtgaatgtatttaacgcccctgaactgtacacttaaaaatggtcaaaatgttaaattttatgttagatgtatttcaccacaattttagaaatttaaacaagtaagactctcaatatcccatactaagcaaatgacagatacagcttatatcttatattctgatcaaaacaaaaagtacatttctttgaaacataaaaaagaaatgtttagctgggcacagtggctcatgcctgtaatcccagcactttgggaggctgatggggaggatcgcttgagcccaggagtttgagaatagcctgggcaacatggcaaaaccctgcctctaaaaaacatttaaaaattagctggatgtggtggcacatgcctgcagtcccatctacttgagaggctgaggtggggggattgtttgagccctgagtgttgaggctgcagtgagctgagatcgtaccactgcactctccagcttgggtgacagagcgagtccctgtctcacaaaaaactacaacaacaacaacaacaacaaaaacccccaaaacaaaaaacagcaacaacaaaaacccacaaatgtttaaaatgcaagaaaaaaagtcctttgcttcttagtccatgactttgaaaagtgacagactagaagattatagtctcatatctgaggcagcatccaacaggataactgggcccagttaaatcaccagccaattttcatattgtatcaccagcgaatggcatggtgccatttgactcttggtgccaggaggagacaatcaatgtggaattttccacagaatgctatttaccatgagtattggcatataccatttaactttcacattgcttggaccacatgaaagctgaaaaatcattgcccaagtttggaggtgcaattgtctatgcctacccccaaattcttcattctgatgaaatcataaaccttagcagtccttagaaaaagtacattggcctaggaagaaaaacatcatttaccctgcagagagtctttcccttttcaaaattccttctgatatagtttcctaaaatctccagaaacatctgccaaagaggtaatgttcataacgacaatgatgatgataatgcagttatccccaagtctgagtgccatttctgtgccagggacagagtgtggcattttacatgtatagaagggttagtttcattgtcccaataacctttccaagcaaatatttttcatctagcttttaaagatgaaaaaattgagtttcaaagaaatgaagtaatgtgtccaaggtaaggtggcaaagctaggatttaaatccagatctctctaactccaaaaactatattctttcctttatactatgctacctttactaatattcctatatcttggatgaataccaccaccttgccatgtcttatgcttgtcattggctaagctagtgaccaggctgggagttatggctcagaatggaggtgccctcagtaagagaaatgagacaggaatccaccatacagcctcccgccctgagcacttcttccaacactctaagccatcaacagggccttgtagcaacaattgcatctgtttatcaagcaactgttgtaccaggcactacagcggagcctttacgtgctttatctctaagccttatagcaattccagaaagcaggtatgttatcctcattttatagatgaggctgagaaaggtaaatgacatgcaaaacaaaacagctagtcagtggctaactttcctcttcttactgtaatgcctaatggcagtaacccagagccagtttacggagaaaagcagagggtggtgcgatgataaactaggctatcacccatgagacaggcaatctggaggaattaaatattgggggattgggtaggatgatgagggcaaagagaaccttgccatcttgaattttttaaagaaattgcctaagttttctagacctatgcaaataaataccgtgtgttattgttcctggaataaactgctttgaatctatacttgaatgcactgagattattgattcacctgcttccagtgtatattattatgcacacagctctaatttactgcatctgaaacagcccctcggagcccgattctctggctattggctttggtgaaagattcttctcagatcatgtatttacattgcaggtgatattatagaaaaggttttgttaagaaactctcactggagagtagagtaatttatacaagatatttggacatcctccttagccccattgcccaaccccttcccattcctccccttcattcttgttctgaatgttaaacttttacacacactgctctaatgatatgataatgcttttgggttaatatgtttttgctgttgaactccagggcaacgacttgagcctcatctattaatttgactatgagacgggttcaagatagagtagttacaataatcctttccactggggataaagggaaaagtgcaagactaagaatagcagcacacataaataaaacacagtttcttcctatctgtcaggaagacgaggcaaccactgggctggctacttgctaacatggtgtccacaactcctgctcaacccatgcatgggtccttaataattatcctggacccactcagccagaaagtgcttcctaaataaccttttgtcaatagtggtttgaattaagaccaagttctagatgcaatagtgttcaatggataggctttattctcaccctcctcccatgactgcctccctaggcaggacactagtgagactctacaaggaaaggaattttactcaatttgttatgagatgaatggtgcctcccactagttcctatgttgaagtcctaacccccagtacctcagaatctgattgtatttggagacagggccttaaaaaagttaattaaggtaaaatgaggtcatatgattgggccctaccccagtacaattggtgtccttataagaagagattaggacacagatacacagaggaaagaccatgtgaggacatggtgggaagacagccatttgcaagccaaggaaggcctcagaagaaaccaaccctgcaggcaccttgattttggacttccagcctccagaatggaatgcaattaatttctgttgtttaaaccacccagtctgtgctactttgttatggcagcctagcagactatatataattctactcatctgcaaagaacagtgtttcagtagagcttgggagggagaaaaactcactgttgtttagctttgcctgcatgccaaacactcactcatgagacctcatttaatccacacaactgctgggacatttgcactttccaaccagtgagctctcttcacgaagggcttctgtgaacttactttctccacagctgcaaattttaaagtcaattgtagataaactatgactctcacttgtcatgggaatttggggaaacaagaaaccgaagactaggaattgagaagagaagtgggagatccaagtctagaaatctgaggatctggtaaaagctataaaacttctccctggcaaaacacattcatggccatgaatccagaatgctgacttcaatttcaagggttaatgcacagttggaaactcactcacagactctgcaggattcatagaccccagcttatgaaccctagagtagagagtttcagtgaagtcctagtagagaggagatgatggaggtgaggaaaagggaaaagagaggaggagaggaagaaggagggaaggagaggagagatgaggggagaaggaagggagaatggaggagtgaggagaggagtcaatggaggagaaaagcaaagaagaaggaagggaagaataaaggagaaggggagcaagcagaagagaagtgaggatggggatggggaagaggagaaaagagagagaggagggaagggggagacgaggagcagtagaaaagggaggaggggatgagaaggggctggggtctgtccacacttgtccaggcagggctaaagccaaggatagggtgtggtgattgcaaatccaagtcttgacctcagaaaggcagtcagtactgggggaccagatgtggggaaatcttcgcacatgttacctgcaagcatgcataataaacatttaaacatgtcactgaaatcatgaaagagggaacctaaggaattcctagtcctcatggaaattattagtatgaaattcacaggtactaaaacaggtgtaactggcacagttccttaggtgggatgcctttcttgttgaattttagggaacgtaaaaacatgggtaggggcttagcaagtcatttaaaatactattttgtatgaatgtaaacacagatatggtatggcacagaatgcaaaatttcatgttgtcataatacatgatcttgaataaggtactttaatagtttcaattcccacattcataaaaaaatctaagaggaactaagaagtgatgtaacacatgtaaaccctcagcatttagtaggtatttggcaaatacaagatcccttccctttttcagaggcagttagccaccatctctctgtgttcccaccacagtctcctgctcctccatcacacaagcatttatcataattatatgatttatgtctgtttctcgagtgaaggagtatgcttcctaagagtagggactgtgtcctgttcttttctggttcccaggccttagcaccatgtcagcatacagtaggtgttcatcaaacactgcaaatgaatcaaacataccttttttaaacactcttgtgatgtcctgtgacagctcttcccatgtcatttagcactactctctctcctagaacgagagccccttgaagtccaaagctaggtcttaatcgtctttttatgctctggatatgtagtgcctgtgtaaggtgttgtagggcctccataagtatttgccaagtggattttcctttgatttgaaatggaaccaaagctaatattgactgaccacagctggcaagaataatagaagagaggcctgagagcgcaacatcagaagttgcccagtcctgctggttttgccaactcagacttgcctgcgcagcctccgttgatggccccactcctgttgtcagatcacagagcactctgggatctctacgccactgacggttagaagaaatgcttcagaggcagtcacctgtaggcttagaggttgcttttccacatgtagcaggatttagatagagatgactcccattctttttaaagggggagccttctggaaccttcagtccaagcaacgtgaatctctcccttctctgtgctcctactgcagcttgaaaggaaaaaagaaatcctctaactttatccccattacagggtactcccctatttgcctgtttgtcttacttggtagacctcaccaccacggcattttaaaagatggtcacatttttcgcttagacacaaactcccgtggctgcctcttgtcagctaccagttaaattgccctgggcactgtgtttatgtctcaagtctcagcttcctcataagtaaaatgggaataagaaggcctgtgtcacccttggtaagaggcttaagtgagatcacacgtgtaaatacgtggccttgcaccttgtaaatggcaaatgtctttctttttcctctctgccctctttggagggcaggactaagtcttatttttctttaagaccttcaagacctggcacaggacttggcaaaggacagatcctcagtatttacttttagaataaatgaatgagagtcaaaaataatacaacactatcccctattccctcaagaagcatcatgaagaccctaatacaggcagcccattcaaacagacatacaggttctggccgaataaatgtggaaggaatcacataaaaatgtaaatagtcaatatgaataggtgatgcaagtcaagaaatgtgtggttttgttaatgttgcaaagcagttttcattataattacagtttaaaaaatattttcgtccctctccctctcccgtctccctctccctctccctctcccgtctccctctccctctcccttctccctctccctctcccgtctccctctccctctcccgtctccctctccctctcccgtctccctctccctctcccgtctccctctccctctcccgtctccctctccctctcccgtctccctctccctctcccgtctcccgtctccctctccctctcccgtctccctctccctctcccgtctccctctccctctcccgtctccctctccctctcccgtctccctctccctctcccgtctccctctccctctcccgtctccctctccctctccctctcccgtctccctctccctctccctctcccgtctccctctccctctcctttccacggtctccctctcatgccgggccaaagctggactgtactgctgccatctcggctcgctgcagcctccctgcctgattctcctgcctcagcctgccgagtgcctgcgattgcaggcgcgcgccgccacgcctgactggttttcgtgtttttttggtggggacggggtttcgctgtgttggccggactggtctccagctcctagccgcgagtgatccgccagcctcggcctcccgaggtgccgggattgcagacggagtctcattcactcagtgctcaatggtgcccaggctggagtgcagtggcgtgatctcggctcgctacggcctccacctcccagccgcctgccttggccccccaaagtgcggagattgcagcctctgcccggccgccaccccgtctgggaagtgaggagcgtctctgcctggctgcccatcgtctgggatgtgaggagcccctctgcctggctgcccagtctggaaagtgaggacagtctctgcccggccgccatcccatctaggaagtgaggagcgtctctgcccggcagcccatcgtctgagatgtggggagcgcctctgccccgccgccccatctgggatgtgaggagcgcctcgtcccggccgcgaccccgtctgggaggtgaggagtgtctctgcccggccgccccgtctgagaagtgaggagaccctctgcctggcaaccgccccgtctgagaagtgaggagcccctccgcctggctgccacctcgtctgggaagtgaggagcgtctccgccccccatccaggagggaggtgggggtcagccccccgcccagccagccgccccgtcggggaggtgaggggcgcctctgcccggctgcccctactgggaagtgaggagcccctctgcccagccaggagcccctctgcccagccagccgtcccgtccgggagggaggtgggggggggtcagccccccgcccggccagccgccccgtccgggagggaggtgggggggtcagccccctgcccggccagctgcccggtctgggagctgaggggcacctctgcccggccgcccctactgggaagtgaggagcccctctgcccggccaccaccccgtctgggaggtgtacccaacagctcattgagaatgggccatgatgacgatggcggttttctggaatacaaaagggggcaaggcggggaaaagattgagaaatcggatggttgccgtgtctgtgtagaaagaagtagacacgggagacttttcattttgttctgtactaagaaaaattcttctgccttgggatcctgttgatctgtgaccttaccccccaaccctgtgctctctgaaacatgtgctgtgtccactcagggttaaatggattaagggcggtgcaagatgtgctttgttaaacagatgcttgaaggcagcatgctcgtttaagagtcatcaccactccctaatctcaagtacccagggacacaaacactctgcctaggaaaaccagagacctttgttcacttgtttgtctgctgaccttccctccactagtgtcctatgaccctgccaaatccccctctgtgagaaacacccaagaatgatcaataaaaaaaaaataaaattaaaaaaaaaaatattttcagcacagagtctgtatcagtatcttgagcatattagaaaaagttttcaagaataacctagacgatatgattattttccctacagggattgtgtggtgacagccttttctggccaacagctcaaagctgcttgcttgtgactctgttcccagcaaggttgtaggcaggggatgtggcagaagatacaggagtagctcaaggagcctcacaagttcctcttggttcttccccttcctctccagcctcccagcgcccaggacccctgcctgagcagtgagaggccctgattgatgcccaggacagcaagctttcccaccagcaccaacctcaccattttctttcagtatttgaggactgaaaagaaggcttcataatgatgggtaccatttctggagcagctcactaaggtccctgttctagaattttactcatcctcttcctcatttgacagatttggaacctgggcctcagacggctatgacctgcccaagacctcacaagtagtgaggtgggcagggcagccggaactcaggtgtcagtgagggaatactgatgttctttccatgtgaaatgctgcctcccatcaggatgacttacattttaggggtttcatgtggtgggatcatttttgactttagtctcttgtattccgcttttccctaggtcctacggcactgtctggtgcattggactgagaatcaggagacaaagcttgtggcccggccggtcatactctgagttgctgcaagtcatggtctctttttgtccttcacctgctgagtgacgagttgggctggatggcttctgtaggaaactccccacagactgacacatctgatcctacaagtgtccatccacatagcagggtccctgacacttaccaaagagtgaagcacagtgccagggacacggtggcctcactcattctcacagtaggtgggcagatgggttcttctctcccaccttgcagggaaataaaatgaaaatgaaagctcacagaggtcaggtgatagtcaacctgcccaaggtcacacagctagaaaatggcaactgtgttgggtttcaggaggggtatgaaggatgggagtgtttggaggttgggggcagcccagctgctgagacatccagacagggccatgggagtggagagcaggggtaatatggtttggctgtgtctccacccaaatctcagtttgaattgtatctcccagaattcccacctgttgtgggagggactcagggggaggtaattgaatcatgggggccggtctttcctgtgctattttcatgacagtgaataagcctcacgagatctgatgagtttatcagggggtttttgcttttacttcttcatttttctcttgctgccgccacgttagaagcgccttttgcctcccaccatgattctgaggcctccccagacatgtggaactgtaagtccaattaaacctcttcttgttcccagttttggatatgtctttatcaacagcatgaaaacggactaatatagtaaattagtacaagcagaatagggcattgctgaaaagatacctgaaaatgtggaagcagctttggaactatgtaacaggaagagattggaacagtttgaagagctcagaagaagataggaaaatgtgggaaagtttggaacctcatggagacttgttgaatggctttgacaaaaatgctgatagtgatatgatcaataaggtccaggctgaggtggtctccagtggagatgaggaaatattgggaactggagcaaaggtgactgttgttatgttttggcaaagacactggaatcatattgcccctgccctagagatttgtggaaatttgaacttgagagagatgatttagggtatctggtggaagaaatttctaagcagcaaagcattcaagaggtgacttgggtactgttaaaggcattcagttttataagggaaacagagcataaaagtttgggaaatctgcagcctatgtgacagaaaagaaaattccattttctggggagaaattcaagccagctgcagaaacttgcataagtagaaaggagcctaatattaatccccaagaccatgggaaaaatatctccaggccatgtcagagaccttcacagcagcccctcccatcacagccctggaggcccaggaggaaaaagtggttttgtaggctgggcccaaggtccctgtgctgtgtgcagcctagggacttggtgccctgtgtcccagccactccagccatgcctgaaaggggccaacatagagttcaggctgtggcttcacaggctggaagccccaagccttggcagcctccacatggtgttgagcctgtgggtacacagagtcaataattgaggtttgggaacctctgcctagatttcagaagatgtatggaaatgtctggatgctgaggcaaaagtctgctgcaggagtggggctttcatggagaacctctgctagggcagtatagaagggaaatgtgaggtcagagcccccatagagagtccctactggggtactgcctactactggagctgtgagaagagggacaccatcctccagacaccagaatggtaggtccattgacagcttgcaccgtgcacctgcaaaagccgcagaaattcaacaacagcccgtgaaagcagccaggaggaaggctgtaccctgcaaagccaaagaggtggagttgcccaagaccatgggaacccagctcttgcatcagtgtgacctagatgtgagatctggagtcaaaggagatcattttggagcttcaaaatttgactgccgctggattttggactttcatgggccctgtaacccctttgttttggccaatttctcccacttggaatggctgtatttaccaaatatctgtactctcattgtatctaggaagtaactagcttgcttttgattttacaggctcataggtggaagggacttgccttgtctcagatgagactttggactgtggacttttaggttgatgctaaaatgaattaagactttgggggactgttgggaaggcatgattggttttgaaatgtgaggacatgagatttggaggggccaggagtggaattttatggtttggctgcatccccacacaaatctcaacttgaattgtatcttccagaattcccatgtgttgtgggagagaccagcgggaggtaactgaatcatgggggctggtctttcccatgttattctcatgatagtgaataagcctcacgagatctgatgggtttatcaggggtttccatttttgcttcttcctcatttttgtcttgctgccgccatgttagaagtgcctttcgcctcccaccatgattctgaggcatccccagacatgtggaactataagtcctgttaaacttctttttgttcccagtttcgggtatgtctttatcggcagcgtgaaaacagactaatgcaagagggcatctcgcaagcctggactgaggggagatagcaccaacctgagcccaacaggcctggctctgagtccaggccctgctgctccttagctgtgtgacactggagaagtcaccgtgtgtctctgagcctgtttcttcaccttggctcatctcgtaggcttgttgagaagatcaaatgggaaaacaggtctgaaagctactatggaagtccacagcctcagcctcagcactgactggttctatgtccccttaagcctcagtgtctctgtctgtgaaactggggtcctaacccgacctatcggggtgttgtggagagtagtgcctgtgtctgaggagtcagcccccggctggtgctgttgatggtagccgtttgccattcctatcatggacaaggtctgtacaggtgtgtgttcagatcagacactgttccccatgtttcctgaggacatttccagggggtgcattctcttcttaacagggcctcagtcacacttgttctcaggcttctggccccattgtgctgctcatcaaacagaacattctagaggctggaagcctcattttctctcctcttccaggcctggagacttgtctctcagctgtgacaggcctgagagcccacctgacccacatttctagaactttccaaccagcctcactgacagagccttgtagcagtagcctcagcatgaggaggaaacaagctgcctccctcagcaaggcttatggatgcgtgttcagcagatggcgcctggtcatgcccagggttaagaggttttcagcaaaaagcaaaaaggctctgagtcctcaatattccatgccagactggggcccttttcccccatgctttcattttacctgagccaactagaatgtagggctggcactggtttctcttggaggcaaaggtgtgactggaaacaggctgggatgttcccactgactcaccacaggttactgagagcagttcgtcttgctggaagggactggggattgtttcttcaagtggtatcatgcccatttgagcggggagaaaactcagaatgagaggggagacaatgaagggaaaggaggaattaagctgagcttcccaaccctggctgctcattagaatcacctggaagtttttttttttaaaaagcccctgcttgggcccaaccccagctcagtggaaccagaaccaaaagctgctcaggaccttttgccggagaggtaccttgtttgcagttaatcctaaagccatgtcagcatgggagcattagtcccaggctggattgaaccaggtccatctgacccccaagttcacaagtacccagaattccagtttaacactctccccacacatcaacagcaaacttcccacctaatcctttccacttccatcctcctgtgatttcatgttcccatttggcattttattttgatgttcagggcataaagggccaatagctttccccaagttatttctcctctgaagcagtgaaataagttagcaattttggagccatttaaaatgcattgttttgctgggggacgtggtggggggaaacctggctttctctcctcctgaaccctagcacagaatgtagcaggcttccaatcaagaatttttttttcagagtcttgttagtcatgaaggtagaagcctttctgcacacactgtgctcccggtggaaggaaaggagactcaaacacctgcaggccgtgcaggccactgctggaacacaggctcagggcatagaggcccaagttcatacctggcctctcccactcctccatgtgtgaccttaacctgggcatcctcttttgtatgatggcaacaccatcaaccacctaacaggcattcatcaggattaggtaagaggcctagcacattgtttactcaacaaataaatagtaactattattattaaatgatgaggatgataattattgttcaaccactgccctaatctttagtttctgtgaggacagcctccttgattaggccgccactgtgtgaagaaccactgagtggggaggactggtctgggtttcctaacaaaggctcttgtcttctctctgatggcctggtctcccaaatacaatctatgaggaccaggccacataaactaaacaagtgtccaagctcaggcaccacccacagaagttcagattccactggcctggggaggcgccaggcctgggctttcaacactcgccaggtgattctaatgagcagtcagccaggttggggagctctgcctgattcctccttccccctccttccaccactctctccttcacagtctttatttcctcccctctaaaatgagagagaagaagttatgtgaagaaacaattcccagcaccacacatgtgctctcaggaaactggtgagttggtgggaatagacccagcctgcttctagagacaccgtggccttcaagaaaaacaggtgccaaccctgctttctagccctgcttccatgcacttaattgacaaatatgtattggggacctactctgtgtcaggcactgagcaggatgctggggacgcagagggaggacagtggcattgtcctgcccttgcggagctttccttctgagtgtgttgagcagggagatgatggcacttgaagaaggagcacggggactaggagaaagattaaaagagggggctgacctgatctgcctggtctggggaaatcagagcagccctctctgaggaagcaacatgaattgaaacctaagggatgaccaggaggtggccaggagaagaagggatggagtctggaggagtccctgatgttagacgctgcaagttagcagaactggaagatggccagtgtgggtggagcaaagagagggggaagaatgagtcaagatgtgagtagagaggtcagatgttcattatacaaatactcgtggagaggtagaataatatggccagggcagttaggagcaagcccactgtacccggtgtgtctggattcaaatcttgcctctctgtcctcctctccaaattggagatgatgataatactacctacttcaaagggtttttgtgaagattaaatttgctaattcatgtaaaccatgtaaaagagtggctggaatacagtaagctgtataaacatttgctgtcgttactattatgtgctaggcattcattgtttcagccgcctcatctgcaagataagaataataatgtccctgactcggaatgtgaagattgaatgagaaggcacaggtggaatacttccattacctgatacgtggtgagcctgcaatacaagttcattgtcattatttatccataatcgttatgtgtgctgagtagaggatatgggactttttggaacaaacttgcaagcaatcaaatacccagaaatgggtggagctctctcagggaatgcccttccattacagatatgcagtcctggggctggacagctcacttaagcagggtggctggatgtggtgcccttgtagtctaagaatccacaattctactcatctgtaatctctattgatttccacccatctctaaaatttttcaggaacatgtcccggagggtttagtcccagacagtaatcctctgctgcctgttttcctgctgtggttgggagacattcaatccagacaactcctcctccacagcagctgacaatggctgtaagaagtgtgccacacaagggtgaaaagtggttccctggggttggcacccagcattctctgcccttgcagcatacaggacagcagtggcctcaccataccaaccaaggtcacggtgaggctgataagcaacttcccaggcagacaccttggaaaaaactgactgagatccagctcaggacctgcagcatctctagaagcatccagtcactcttctcgccttctctcctggggtgccgttcatttctgccctctaaaaatagcagtggttattcagggaaatgcaccgtgctctgtctctagggatgccaacgcaggcctctttcaaaaatagaaccccaatcagttgtgcttcctagctgtctcttcctccagtctcagaatccttcagaaggacccagaggcagggcagcagtccgatgctgggcatcacatagtggggagagctagagctggggcttctcacccaggtttatctccttctaaatatctccacttttaaaagtccacttcaccttactccgcattgaatctagtgtcccccaggacatgccataggttccttcatcagtgctggaagggacctcagagatttactcccagagcaaacttggcccaggaagggcaagggtcatccaaagtcacacatcagagcaatgcaggctgggccttccaggcttactcctcatcactgtgtggccaggcctggtgcccttaagggacacgggcatccattaaaacactagaggcagctgctattttcatcccatctctctttggctcagctgacacatggatgcctttcaattctaggctgatcgttcttgacagaacatttcaaagtcaaggcaggggcaggagaggaggacaaagctgttgctccaggcacaagcacagcctctgaacgttttgcctgtcactagtagtttctgtccatactaggggattattatgccctggaaaaacttctagctggggcattacaagtgactcatactctggttgccttaatacccagagtcatccaggagagatgcttgtcagaccttgtttaatcagtcccagcagaaagtatgcttgaaggatgaacactattataattatgccccacacagctttctgacattattgaaaaagttcgtgctgcagagggtctgcaggaagaatcttttgttccaactggtacagcggggcccatcattaggactcatggacattagtaattccagaagtaggacatcacacaacacagagaatatgatcttggctggaagaaggcagttgggaagtttgggcttggcctcatgctattccatcatcttgtgagtagggcctgaaaactgcgtttctaacagtagtgtttctaacagtagtgttgacactggtggtccagggactgcactttgagaaccacagaaatagccacctgccttgctttcctcatgggattctagtgatgcctcctttggaagagctgtggctagtccagctctgccatatgcctgctgtgtaggaccctcagaccatcacttatcatctctgagtcttgggtttcctacttttaaatggaaataactcctaccatgtgtacttcagagtggcgaaggtcaaaagagaaataaccaggcaaaaaaaaaaaaaattctgaaaatcataaagattactcaaataacacacatttattgggtacctaccataagtcagaagctctgttagatgcaggggatactggcatgaatcaaccagaattcctgcccttagggagcccaggggagaatggggaagaagataaatgaaccactgatatagtcccgtgcagtaacagagactcacagaagcatgaaggaggggtggggcaagtggctgaaagccctctgatttcatctttagggtgaagggaaaccactgtagggttttcaggtaaagtgacccaatctcatttgttttatgggaagatcagtgtgggctggggaatgagtcatcaagaggtgctaggctagaggcagagaggcagggagacactggggaggctgctgcagtgatccaagagtgaatgaatggagggaacttgatgcatttgagagatatgcaggataggattcacacggctttgtgactggtcaggtgtgtgagacaaagaaggaggcagaaccagggtggcacccaagtttctggtccactgactaagatgggaaggactggggaagtgggtgggggaggagatgatgtgagtctgtttggggcatgatgagcctgaggtgtctttgctgcctcctgtagacactggtcacagcactgccaggaacaggacctcgtcccataaaccactgccactctgactgccaggtcttccctgctgtgagggacttttccccttccaccctacccatgctctggctttacagagctgctgttctctgcctcttccacatgcagctgtgcctttctcatccagaggcagctccaaaatgaacaacagtagcaatcagcgagtaatcatcttttttttccctcctatacaatgtctgggtgtgcagatgatgtttgtgattgttgcaaaaatggtggcatgaaaaatttggctcctgccaaagaaaggaaggaaaagaaaaccaatttaaataaactcacatagttcagacccgatttgaagcttcttaacctggagcctgcaaaggttctctgtccctctgttccctgtggtgtttgtttggcggtggcttgttgtttgggggtggcttgtaagaacctgccaggttgggacagtccagtggtggcccctggggactctgagagtcaaggtgatggtggatctgctctaacttccactgtgagtgctggacattcatgaagagcagtgctctgggcttttcactcacacacagcttagctcccagacaactgagaggaggtgctcatggcagttctaggtggctttatgagcaccctagacagaaagaccatggactagaggaggcccataatgacaaactgtcactgttactctgttcccaggacatgcaaatggcatcccacactgtgctaaaggctttaccattgtcttggtttaatttgtcctcacaattgtcctacaaagtgggtattaataatctcattttacacaggaagaaaatggagggaaaagttaattatgatactgcagctagtaaacagcaaaactgggattctaacccaggttgcctgattcaaaagcccatgattgagctataatacaaaaagacatataataacaaatattgatgaagatgtggagaaactggaacccttatacactgctggtggaaatgtgaaatgccacagcctctagaaaacattctggaagttcttcaaacagttaaacacaccatatgatccagcaattcaacacctgggtatttatttgctcaagagaaatgaaaacatatccacaaggacaagtgtttatagcaacattattcataatagcataaaggtgaaaacaacccaaatgtccatcagctaagaaatgggtaagtagaatatgatatgtgcacacaatggaatattgtagttttctccctttatccacagaggatacattccaaggtccccagtggatgcctgaaattaaggatagtaccaaaccctgtatatactatgcttttttctatacatacatatctataataaagtttaatttataaattaggcacaatcagagattagcaataataaatagagaaattataacaatatacagtcagacatctgtatcatgggggattgattccaggaccccctgcaggtatccaaatccaagaatcttcaactccctcatataaagtggcatagtacagtctctaattgtggatttctatctgcagttggttgaattcatagatgcaaaacctgtatgtccaaagggctgactgtactgtaataaaagttatgtgactatcatctctctcccaaaatatcttattgtgctgtattcacatgaaaatgaaattgtggaaagtgaaagtgctatatttggcaagaaaaaggaatgaagtactaacacatactacaacctagataaaccttgaaaacacgctaagtgaaagaagccagccacaaaaaaacacatgttgtatgatttcatttatacaataacatttccagaatagacaaatccacaggtgcagaaaagagatttgtggttgcctagacctggccaaagcagggatgggaataaggtggtgcagggggtggaggcattaggttaggaagaaatctggggtgactgttaatgggtatgggttcttttggggtgaataatgaaaattttctaaaacggattctggtgatggtttctcgactctgcaaatagtaaaaagcactgaattgtacactttaaatgactgtatgtatatgtcaattatgtctaaataaagctgctatttttagaaagtgatggttacatatttaaaaagaaaaaatgaagaaaaagcaactataatccttccaagtaaaagcatctggaattattattttttattcattcaacaaatcttgagcccctactatggcctgggcacctatctctgggagctgtgactagaagtttccagtctggttggggagatacaatgtgggcacagaaccatgcttcatggtagaagaagccaagggaattgaaacagtaggataccatttcatacccactagactggcaaaaactaacttctgatattaccacaatggcaaaaatgcagagccatagataggctgatatactgcttgagggagaataaataggtatagtttggaaggaaatttggcagtgtttagtagagctgcagatgtgcctgccctgtgtcctagccatcctatgcgctcctagggtatagtggggagagtcttacacatgtgcacaagaggatatcagcaaaaaccttcacggcaacacggctcgtgctggatgactggaaacaaacaaccaagtccagcaacaagtgaaaggataaatgagctctattacagtcacacaacgggttatacacagtggtaagttccaacaaaacccaatatatatcaagtttgaagatataccaaacgatagcatctattgtttgtggatactgtacatacatatgtagtaaaagtacagaattgtgtgggaatgagcaatactaaattccagatacttgttgcctcttaggaaggagaggaatgagattggggggcacaccgttatcttcagttgtacctattatgtttcttttaaagttacttgcaatatctttctttttttaaattgatatttgtattgagataattaagggttcacatgcagttttaagaaacaagagagaggtcccttttacactctgcccagcttccccaatggtaacattttgcaaaagtataaaatactgtcatagccaagatatggatatagatacagtctaccaatcatattcaaatgtcccattttactggtactcatgtgtgtatgggttaagttctatacaattttaccactcgcataggtttgtgtgtccatcaccacagtcgagatacagaacgtctccacaggcaaggatcctcatgtgtccttttatctccatacccgcatcccttccacccccagcccaggtcctcaactccatcagccactcacctcatttctaaaattttgtcatttcaaaaatcaatgaaatcagacagtagttaagtttctgagatagttttattctcactcagtgtaattccctggagattcatccaaattgttatacataagacagttcattccttgttagtgctgagtagcattccatagcatgaatggaccacagttcactgttcacctgttgaaggacatctaggctaattccagttttggctattataataactagaatgttttaattcttggactgggtggtaggtatacagattttcactgtattctttattctactttttgatacaaggaacactttataattgaaatgaaggaagagagaaaggaggcactactaatgttgaaccaactccatgcagccaccgtgctgagaagagggtagctcagagtacagaactcagagtgaatgctaaggccaaggccatgggccactggcaggtctggtgttcaggaacaaggccagggtgcccacttgcttcaagtttctaggccttatagggagcaatgaagcctgtccaagtcctttagcctctgggcaagtgcttagggaacctcccctatggtagagctctttcccatgcctgggtatctgggtgtgctgccctgaagtgggaaaatcaaaaagaaggcagaagaaaagagctcccagtcaggacatctagaaatgcccctatgttcccagagaaggcagaagaaaaagccaaggggacagaatgaaatctggcatctcctgaaggccttgagagagatctagaattgcaggaaagtggctgcctgaacagtgctggaacagagactgcctattggaaggaactgagagctttcttctaatttgaggtcaaagctatgtggggcttttgttgccagtggtagataatgaggccctccctgattctctgtgacactcaggtgcaggggacacaggtgtagccctggcttcccatgtacttcttacactctgatatggtttggctgtgtccccacccaaatgtcaacttgaattgtatctcccagaattcccacatgttgtgggagggacccagggggaagtaaatgaatcctgggggctggtctttcccatgctattctcatgaataagtctcatgagatctgatgggtttatcagggatttccacttttgcttcttcctcattttctcttgccactgccatgttagaagtaccttccacctccggccatgattctgaggcctccccagctatgtggaacaattaaatctcttcttgtttccagtttcaggtgtctttatcagcagcgtgaaaatggactaatacacgctcctcaccatgtagctttaaccttctttgcctaaatccctgcaaacaccaattatgaatttcttagtcctgggcaggactaagaatgggacagtgacaaattcatgatataaacatttactgggggccttcgtggtgctcagacatctccctgacctcaagagctcccagtcaggacatctagaaatgcccccatgtgcccagagaatggtgacatatgctgggaaggccacagagactatcggctgtgggacaggggcagaagcaaggcaatgagcctgtggggtcggggcaggctgcctgcaagttcacctccagggggacctgggagaatgagcaggagtttgccaggctcaaggtatccaaagggctgcacatactgagagaagagctttgtaaaggtgcaaaggccaggaagcactgctatgaaagctacaactactgctgctgttgccaagaataataatatcccaactaacacggagtgagagtgttaaccatgtgccaggtggtgtcccaagtgctttatgtgtattatcttatttgaccctaacaacaacattattttgttattactactatatcaattatacacataaagttccagaagcacagtgtggctaggtaacttgctttaggagatggacacactttggaagtagaaaagcccagatttgaaaccagagcctgagctccctgccatctgtgataaactcttgggaaaagggataatacaggtggcggggtgtggtggctcacacctgtaatcccagcactttgggaggccgaggcaggtggattgcttgagctcaggaggttgagaccagcctgagtaacatggtgaaaccccgtctctacagaaaaatacaaaaattagccaggtatggtggcatgcacctgtagtcccagctactcaggaggctgaggtaggaggatcgcttgagcccaggaagcagaggttgcagtgaacagagattgtgtcactgtactccagcctggatgacagagccagactctgtctcaaaaaaaaaaaaaaaaaaaaaaaaagtgggggataatttagggcctcctatgatacagtgtaaagtctgggcttcctctggagagcaacgggaagccactgaaaatcactaactagagagagtcacaagcccacctctgacaggaatgctattccagagcctgctctctgtcactgtaccatatggccttctaacatgcttgcctcttaacatcctggaattcttgctctagaattcctagagcaggagtctctatcaggagtctctcagagcacgggtcatcggcatctcaatggccagcagaggctaacagcaaccagaatacccattccagtggggcagacagaacaccatgaaattaatgatcaattgctacatagtattaagcacatctatgagtaaggcctttgcctattttagaaaagtgctatttatgacagagcaacaaacagtgacagattgctgaggcttgccttctgaagacccaattttggagaattattcatcttgaaagtacttctctccaccctggtttcctcatgtgtaaaatgggggtgataagaatacctactatcactgggttgttgtaaagattaaatgagctaatactactcaggcagatactgaccatgctacagatggtagttcttgatgttgttcttgtgattattttcaacccagtgggaagaagctcggcttcatagcagatgaccttgatccaattccagactcccttacttcctagctgtgtgacttaaagtcattgaccctctctgaggctctgtggccccatctgtgtatcagaaataacaacgcttacctcactgggtagttgagagtgttaaatggactgtgaaatgcctagcacggtggctgacatctaataggcgctcaacaaatgtctgttctcacccctggagtgttttctgcatacttggcttttccactatggccagaatccaaagaggcaaaggtttatgtgcttctcattgctcctttctaccaggggaattttcacaaaggcaatgggaggtggaagacccatttctcagcgggtaagtcaaggcagtacagcgacagaggtccacagccttgcaaacaaccctcgggccactacctcagtggctttggataaactgaccaccgaggtgtgcagccgcaggtgcaattagcaacaggaagcgagcccaatgtttgggaggatttggtaattgaatccaccaaggataatgacactgaccttcccatttggaaataaactagcatttggcttgtaaatggctctgcaatcattctgactgcacacccagcactgtgcagcttccctactccgaggatgcaggataggtaaagaaggattgcatcaaaggggttttggaagagcagcaacatccacagcagtggctgagttcactctgctaaccccaacccggccggccttgggaaagggcagaattccacacttagcttctgtggctgtctgctgctccttcccaaagcatgggagccctgggccagaaggcgttccctcacagtattccttttttaagcaaatcgggaactcctgggttcccagcacaatctgtggcaccttttaaatttcatcttaggttcactgctccttcttcttccctaagcctattcatgtgttcagttagtccaccaggaatagtaatgaagctaacactgggtgctggaagacaatggtggtatggggaggccgcgggcatcctgagtgctctgagtagagactggaggtgcaatcacagggaagcagaagaagcctaggaagatagacatggtctggaaagaaagagctgaaaccggcatgaggttaccagtggccactgcagcactgctaaggaccgctccaacctcaccagtcagtgcatggcaccctgctagaaccagccttagcatttctccctgtgtggggaaagtatggtatttccaaaggacaagacaggcaggcctggcttcaaactccagctttaccaggtatcagctatatgtccttctctgcattgcagtttgattactggaaatggggacatttctatctcttagagccaaaaatatataggtttttatagtgaagataaaacatacaatatgcctagcatagataccaagccatagtaagagttcagtaaatgtttatttatccttacttaacagacataattggcaccatatgggacaatatactcttagcctcataaggtttgtctgctttactcaatatttacataggaagtacggtgtcctctttaggattatttcttcagtctgaccctgagaaaaaatgcactgtcctaactcctttgacttcccagttctcatcgccagccaggatgaacagggcctgaccatgtaataatctctgtcaccagtacctgtatttaatagcaacatggggttcacatcttaatcgtcatgtcttccatgaaaagcaagcaacacgaaagcagggattatggattgtctgctgtgtgcatgggaactgtcatgatagactccaattgggtggaccaaaggagcatattggtgtccctgttcaattttccaagaactgaaaaatatgtctggaaagatacaacagaaacacatctttaaaagagcagcagtacatagcagtaaacactgaaggccaagcaaacagtgccaagcaagcgtggagtcgtgggaaaagcggtcatgggccttgaaagaggctgatgggagtctgcagtttgaatcccagctctggcttttactagcaaggtaacctggggagcccggaggggaggaaaatctgcttatccatctgaaaatggggaaaacaccgccaactgctgcgatgatgacaggaagaatgcctggcacatagtgagtgctcattttgctgctggtttctttcctcctcctttttctcatttccccctctcttctagataacgggcattactttatttgctaatgaattagaattagtagtggatgacttttatctgcctattggtgaccatagccctctgtatacatacatttgtacaccatcaagaagttgcttataaaaatactttcaatggcttcttactttttaaacaacaatcacaaaaagccccacctccttggcctggcatccaaacctttccccggtaggcaccgaccccaacctggaaccacacctgcaaccactcttctgcttaaatgctcacccaccagggttctgggtgaggtggggagtgcagttcagccttgggtttggaaagatggtaagaaaggcaatctgaaggcagttacaccaacttgaccttaaagcaccaagaagattctgctaaacagactaagttgggaaaagcattctaggccaagagaataccatgtgcaaaggcctaaggtctccctacagcagtgaggcgtcattccaggagaactcctgtcccctctgtactgagactgttcccacttcccgtcttctctttactagattcacggttgacttcctcctcactccccgctggactcgggagtatctcaccttttatacccacagttttcaaagtgtgcgccagggatccctgagggtccctaaaacctttcaggaagtctgtgaggtcaaaactatttataacaatgctacaacatcattttcccttttcattctggctttcttatgaactcacggtggagttttcgaggttgaatgcagaagcagatacctctatatagccaaacgttgaagggatttgccaaaatgtaaaacaatgccactccattcatttctgtttcttttggaaaagtcattattcataaaaatatgttatttatgttaaagtaagggtttattattgttaatttaaataagtgataaatgacaattttaacatctttcagtattaattaataatatgtcaaattttgacagatataatccacataaatgaaaaccctttggggtcttcaataacgttgaagagtaaaacagaatgctgaaatgagagagtttgagcacaggtgctttagggcatgctgtgaagaaggcaggaaggcaggggaggacaaggtatattagtgttcttgggcagcctcctcaggcagcaatttctgcccatgactgggatccattttgagttaatttttgtatatggtgtgaggaaagagtccaactttatgtttttgcatgtggacatttagtgccccagcaccgtttcctaaacagacgactcagtctctctgtgccttggtagccataactctaatgtgaactttaaaagaccaccttgcaaggtcttgtgacatttaatgagacagagagagaaaaacatgatgtgggttccctggcatgtagcagatggtcaatgcttataactgaaaaaatggaccatggatctgaaagtgctctgaggcacgggccatcatgattaccacatgaccagagctgttccatccttaaaggtctttagcacccattttcttgtcaccaaggcctgtgccatcctcaagacactgatttgcaacccctttccaggaacccctgtttctgagtggtcctgagaatctctttttcttctcctcttcccttttttgtcccctactttctaccctaagctttttattaaatgttcttggacttaattgcttaattttaaattgttaacctactcaaatcctttttggaaagggggtgggaaggcatgactgaatgaatgagtcagtcagctaaaagacccctaatttgaagactgaaaagtgaagggcctgcagctacggtgactcacaggggtcatcccactgcaggtgtgagaggtgaggccgtgtgaagctaactccagggctctccacagtccccatttcctcctcctaccctggaaacatccttttaaatcacgtctccctcctccacagtgtttgcaacacctcccgatttagttttctctctgaatttcattagtgtcccatttacctcctccccctgatctcccagccgttaagcaggaggaggctaagttggcaacaagtctccgcctcctgaccgagggagacgggaactcacagaggaggaaaggggcctctgggctgcaatgccagatgctgttctggtccactgggctcgagacaacagacagtaactgggtcctatctgtgtgtcaggcactgagggctcaatgaggagctattcttgcctccaggaaatccccaggctcatggggatgaatggataatgtctgtgccatgtggtgaagggacctcaccctcctgggcaggcagagtgagtgcatgaaaagtgagctagtggtgggaggagaaaggcagtggggacattccaggaggaaggaacagtgtatgtggaggctggatggcttgaatagtagcatgtaagcaagtcacaatatggaacctgttcaatgatttgttcttatgctcccattttgaatctttacaaagtgcctgccatgtgccaggcatctttcctggcagaagaacactgcaggggccaacaaagtaggtccctgcccttgtggagcttgtgttctaatagaagaagacagaaaataggcaattaaacttgtctagtaatatacacaccaggtagagacagatgctatggagaaaggtttaagcagaagaggggcccagaaagaactggcctgggaggactgctccatcctgctagactcagattcttgcagcctagtatttttgcaaaacgtctttcctcctccaatttagatgagtttgatgggaccaactacgtggaaggcccccatgtggggatgagcagccaagtctcttgggctgggcgttggggaaccagggagagaaagcccccggtgagagaggggttgaagaggaggaagaggagaccacacttcagatttagatggggtggaggtctagattcaatgacttttaaattttaactttcatgtcactattacaagtgagtatggtgaggttgaagagttcagcttttatcttactatgctgagtgagcattggttttcttaccttaaaaaatggggtcataagaataccttatggggttgtgggagtcaaatgagatgcatcattcaactacttggcacagtgcctcagtaaatgtgaccccactttacctgtccttctaaagaaagcaaaaaataaattttttttttttttgaggtggagtctctgtctgtcacccaggctggagtgcagtggcacaattttggctcactgcaacttctgcctccagagttcaagtgattttcctgcctcagcctcccgagtagctgggactacaggtacctgccaccacgcctggctaatattttttttacttttagtagagatggggttttaccatgttggtcaggctggtctcgaactcctgacctcaagtgatctacccgccttggcctcccaaagtgctgggattacaggcttgagccatcaagcctggccaaaaagcaaaaaatattaatggagctcctcagagaacctatgtctctactgcacagcattgatctcagtttgtagttatatacttgtcagggtgagggaaaagcctacctttgtttttattccttgtgatatccccagagcttaacatagtgctgcactcatggtaaatcttccatatgtctttgtcgaataactaaataaatgattaatcagaagttatgtaaggtccagactccagcactttttatttggaagacctttgacaagacaatttctctaagcctcaattcctttcctataaaatagaaatcatatctactgtggcaggggaagttactgctcctaaaatatccatgtcttcccacacctcctggaatcccagaaatcaggcaggaccacagggctagttctggccaatgggtggtgtgtcacttcaggaccaacacatttaagagtcaatgttcaaccttccagtgatttcctcctctgctacagagaccaaaggggccaatcatccaggtcgtacccctaaaatatgggagagatttcatcagcctggtcgctaagtcactaggtagagcaaagctttctaccaacctttgatggatgcgtagcatgagaaagaaataaacttccgctatgttaagccactaggattctggagttaatttattactgcagcataactaagcctaaaaagactcatatttctatcttgaaagattgctggaaggataagaaaaagtgcttggtacctagtaggttcacagtgggctttcaataaaggccatactccctcttccctggatccttcctgtgtcctcagcctccctcaatgtaaccagttttcacttacaatttcactcctctctgtaccatgttcctcctctagcttgaaacatcttccacttttcccatagaatccaggagtttcctgctgtttttttcattgcttttctgcacagcaatatgaggaaacgcttctagagagccatcttaggcactagacctggcctccagaccacctgccttctggacagccttccactcacctccccgtatcctattccccactgtgcctctgatctcactccagttcagctcaacacatagccaccagactctgggccctgcaccctggtctcctgtacccaagaatgaccttgattggcattgctgcctctctggtcctagaccgacatgtgacctccttgctgccagcacccccatcacatacctgctagatgccccatccttgcccaccttgccctcccaccatgctggctgccagcttggtttccagcaaccgttgccacctaccagtcctactgcatctgttcccggagaaggctacctttactctggccagaactcctctactttctatgctgccaagtcgtaaaagcctccaaccaaaaaacatgcaaatgttcagagtctgagattgcatttctcatcaaggccacaaatttgcagctaatgacagaaaatcagagcagacaaggggactgacctggctccatgtcagcacgttctgaagagtcagcaatgtccgtgggccctgcagccctctctccaaggccattggatcctggaggatggtgcgggatcttttctgttgaagcagagaacacagatccaactgagtgaggtggcaagatgccccaatcctttctcacagaccctccgctccagcagtcattgcaaacacacactatgggaaaatgaggcttgttcctggtcccacagcaatgaagagaagaaagtggggtcctggcaccctgcaaatcccacacagatggttcctctatgcagccttcctgagaggctcaaatgtaccttcttctgttctcccatctcatcttgtgctatgggagtaatggtcttgccttaaaataattgtttacacacctttccttgagtgaactgaagcttgcaggacagggactgaagatctgccctttatacaacccaagcacccagcacagggcttggagcaaagtaggaactgcgtgttatttgcacaaaggattgactgcatactgtgatgggagtagacaaggaatgcaacatggggctaaggtctagggttagtggccagtggcccccgttaacagttctgtcacagattcaccagacaaataagtcactggccttctctaaatcttactctcttgctgctatggtctgagtgtgttcctcaaaagtgttggaacctaaattcctcaatgtggtagtgttgggaggtagggattaatggaggtgcctggattgtgatggctctgccttgatgaatggattaatgcattctcatagcagtgagtgagttatctcaatcatgggttgttataaagcaaggctggcccctcatgcttgtctctttcacatgtgttcacttgcccttccgccttttcccctgggatgaagcagcaggaggcctttaccagatgccagcaccatgctcttggatttctcagcctccagaactgtgagctaaataaatttcttttctttataaactacccagtctgaggcattctgttacagtagcagaaaatggactaaggcacttgatctgtggaatgggtcgatcttcctgtaatataccacatgggagggttggagtcacctgggcagaggtccttacgcagaagagtcctggttctggcccagctgctgattgcaacctctggctaatgacttcccccctctaagcctcagttccctcatctgaaagaaggaaattctgaactgggggacacgtgaggtcctttctggccctagaatcctatgactataaatttgattttcaggactctgggacaaaggagatacccgtacaaaataaaggtttttccaaatgaagaaaagaaattctaccctactcaaaagaagggtaagggggaggtgctaaggttttaggtcatttgcctcaggtcattccaagagaaggaataggaatttgaatataggccctcaaagactcaaggtccctgtacttttcctgccccatactgccacactcacccataaaaaatactacaaaatgccttattatacaagagacctactaggctaaagaataaggcatgaaggatacacttaggcataggaggttaacccccaaaaagccattatttgagaagttccctgaattcatttttcccaaatagatctaggatcctagcttaaaaaacattgctgtttattataaggtgaggaattgctgggaattcccatgaaaaacaaaatccacttaatagtaaaattttgttgtcttcatctacatttactatgtttctttatggcaaattattttaaataaagagtaactctattaggcaggaacattcagcagcctctggccaagtacagagtatcctgttggtactctccagagactggctcttgaactaccttcagggtagaattttttttttttttgagatgaggattttgctcttgtggcccaggctggagtgcagtggcatgatctcagctcactgcaacctccgcctcccaggttcaagtgattctccagccacagcctcctgagtagctgggattacaggtgcccaccaccacggctggctaatttttgtatttagatggggtttcgccatgttggccaggctggtcttggactcctgacttcaggtgatccacctgcctcagcctcccaaagtgctgggattacaggtgtgagccaccatgcctggccagggtaggaaaattaatgggcacaagtaaagttaacaagagtttgggagtaaacctagaaaaatccttataaatcattatattcattaagattaaaaataggcagtacactaattaggatatgactatcattttatgcatttcaaataggcaataatggctattacatctttaatttttattaccctgccttgttcattagaagtttaccccctgcccacccacccccgacacacacaaccccaccccaagttccaaagacagcaggaaattggctgccttggctacaaaaatgggcaagggaaaaggtactttctctggtgttggggctctccccaaatgccaaatgtctggtggcttttaggacacagagctgttagctttgtccccaagggtcctgctggggtcctagtcatgtaagtgatatgtacgttttatgcttggatgaaacactcaaatttctttctcaggctcccttttttgtgtctgggttataaaactccatcatctctcccttcccctcacagcttcaggccaaagcttgtgacttggcttctcacctgtgccttatggtccctcccctcttgaagaagctgcagagctacagtttttactcctcttctgccctcatccttgccaaggcttcagggaaaacctcaactgtttgtcttcaatctttcaatctgtttatttccttttcaaatcccatccctaaattccctttttttcccagagtacctccagtagacaaaacaaagacagttaatgaaactaaaatgctcatttgttgctggaaagtttttaaaagtatttatatgctagcattccgttgaggggaaattgagttaggaagggattatggcattattcattcattcacatattcactcattcattcatatactgaggattgttgctggatagaatacaataatgattcagaagcaaatcctgcttttgggaagctcataggctggcaagaaaaacaagacatagccacggagaactataatgtttggcagttttgtaagagagatgcagacagaacctaatgtgtggacagaggatggagagatcgccatggctgacaaatcatggaagactgccttgcagcagactttgtataaggtaggggacatggagacagggcaggtactccacataagggaggagaggcatgggaggtaaaagcatgacaaagagcaagtgtcgagctcagctttccagcatgtgtaagctgtgcagagggaagtggaggacatcacacccaacaagagatgtgggcctcaacaggctggggaatgtggtcattgttcagtgagtaatagggagcctctgagtgctgttgagcagagcagagatgtgacataattggagatctgctctaggaagatgaatgtggcaagccttgcacaatatgaattggaagtggagttgcctgggggcagggagctcctaattgtgtgccaggcattgggcaggctattaggtgctttgatgttatttagccttctaaataactgcaggaggcaagcattatccttccagacttgcaggtgaagaaaggagactctggggaatctaagctgcttgctccaaatcccctagtgaggaagcaagggagacaagatccaaaccctgttcttttcctctctaggcaagtcataaagcaagctgtaaccctgtgcatgacaccatgtacctgacacaaccgtctttcttctcccagtgcatctcctggctgtccaccggtatgtggagcttgatcatttcctgggctgcctttcaggaaggcccaggtggaattaaatgcagagtgcctctgcttctgttggatttcccccaaactgaccacagatcaaggagataagatgatgccttgagttaagtcaggttccaaaacaacaacactgactgcagagaactgcaaaggtagcaggaaaccaccctcctctctggcaaggagtgttagtttttgtctttcccttctcggctaagccgtggtacccggagcagtggatacagaaacccgggagaaaatcttctggatacccaggaacctgctgggtccctgaagaatgtcagtgagaaactcagcgttcctgtgccctgggctgaccccctgtttagggaaggcagcccagagggctcctaatgcactcagaactgtatcatcgcacctgcagcctggaggagatgaccttccatcaagacgcctgctattaaaactttgtttaaggaaaataaaaagatatcctcattctaaacatgggacacagtgataggtgtgttctgtacttgacaatcaagggttccagtttgctgaggggaagcctggcacagtggcaagaggtggagctttggaagcagagtggggctgaatcacaactcacccagtcaccagctgtgcagcgttggccaaaccacttagctttttacatttctttattattaaataggaataaaaataatggactagagagaataagtacctgacccttagtatatacataataatgtagaataatttcttctagtcttaaatgttcaacatcatgggcattgctttctcagggaggtagctttcctcctcacaaatttaccaattgaaggaatgaatctttagagaaaaaatgctgaaactacagcaagctattcctgtccttcagctagctcttatgtccagtgtcttataattattcatctttacaactttcttttccaccagactgggagctccttgaagacagtgaccactatgtcttcaattctcagcacatagttctttctacctcagctaccttattttgagatctgtacaaactacagagtctgtagttcttctgggatttttatgctcccagcctggtttgaagagtgactttaagcaacacctttaggagcacatccaatcttctgaaaaccatctcattatcacgtaaattattagcacaaaatacttcaccttgttactctgcgaagagctttggtttctaatccaagccgattatatgtgccagcattttcaataacatcttaataatgccaatcctcccaggcctctggacagaatcagaccaggtggagagatccagagttcaaaggcatcctgaaggggcatggcagcgggggaagaaacgaagcatcaaaattggattcaaatcctggctgtgcagttgggacaagccagcatagtgcctgggatcaggataaatgctcagtaaaggttaatacccttctcctgactcctgagaaaagtaaagaaataaaacttgttgcaaataaacagggagagaagatccaccacattcctgagtccatttagaatatggattttttttaagcctttctaaggactggatgaagcaggttatttcactttaattatggcagctgcagctgctgcttgtggactcaaagaccaattttcacattaaaaagggggaaaaaaaaacatccacacccacacacaaactcaccgagaaacttcactgcatacacagaagagcatctccttcagagagcacgtcagtgaggtggaaaaatctggaatgccctgttctagacactcagagcccagtggaaatccctgtgcgtgctcacccctgcctctcctcccaccttgcctcctctctgtcctgaacgtcaaagagcagctcgtgagccacacagcgtaatggaatgtttctcggtgagcagctgcatatttttaatgcacacaaggggaaataaaggcagcagatggttttatgtaatcttcctatgaattttgaactgagagtcctcattcatgaagacttgaaaaggttttgttgttttttttctttttttacacgtcctctgtgggtcaagccaaccagctctggacatgccctggtgaggctgtgtgtgtttgcctctgccagggcagggaagctgagaggagcctgcttgccttcttctggcctggtttccactccgtgttctttcttgtggttctttgtctgtgaacacacgagtggtcctcaacattctcagtgttcacaatggaaaactcaaggcaaactcatgaatccttcataggcataggtgtgctgtgaaaatctgaaccttatgttcagtcttatgtttgaaatgactgaggatctgtgctatggcagggacatctgtcagcgagagggtcaaggggaacaggtggggcagatgcaccagtgtaagagaaaagataacagttcccacttttaagtgagagcatgcagcgtttggttttctgttcctgtgttagtttgctgaggataatggcttccagctccatccgtgttcctgaaaaggacattatctcgttccttttttatggctgcatagtattccatggtgtatatgtacaacattttttttcatccagtctatcattgatgggcatttgggttggttccgtgtctttgctattgtgaatagtgctgcaataaacatatgtgtgcatgtatctttataatagaatgatttatattcctttgggtatatactcagtaatgggtttgttgggtcaaatggtgtttcttgttctagatccttgaagaattgccacactgtcttccacaatggttgaaccaagttacattcccaccaacaatgtaaaagcattcctatttctccacagccttgccagaatctgttgttcttgacattttaataactgccgtctgactggtgtgagatggtatctcattgggattttgatttgcatttctctaatgatcagtgatgttgagctttttttatacatttgctggctgcataaatgtcttcttctagaagtgtctgttcatgtcctttgcacactttttgatagggttgtttttttcttgtaaatttgttgaagttccttgtaggttctggatattaggcctttgtcagatgggtagattgggagctgaacaatgagaacacatgaacgcagggagggaaacaacatacattggggcctgtcagggggtttggggagggagagcatcaggataaatagctaatgcatgtggggattaataactaggtgatgggttgacaggtgcagcacaccgccatggcacacgtctacctgtgtaacaaacctgcacatcctgcacatgtatcccagaacttaaataaaattaaatatagaaaaaaaaaataacaggctctcatctgagaaagatcgtgtgtttagaggatatgcaagaactgcctgtaaaaatggcctaacaagaagcactggcaggggagaaaactgttctcaaatagccacaagtgctaaaaagcagcctgatgaagtttatgctatctgtggagaattttatcaattttctgaaacttgcttttatttaagcaatgtccacctttaaccccttcaagcacatcatcaaaaattctgggatttaaaagtgcaggactaacactaagtctagttctcaaccactggagttgtcccagacctctgggcctctgctcagaggtcagtgctatttctaaaatgcaaacctgaccctcctgttcccggctcaaagcccttattgctcccctattgtcactgggggagaagaaatccaaactctcccctatagcaagcagttcttttcactgtccagcctggccacctttccagcccagtccctggccattctcaccccagaccttgtatgctccagctaaaccacagtgtttttaacaccccactgtcttccatggctcttcctttggcctcagatgcccctgtagtgcttatccactagtttccctgggcagcaccccatcatattctggtgaagcatctcccctctcctgggaaccctttttcccactgctcccaccacgtgggttgtgacagtcataggtgctgtgcgtcaattatttctggctctctactttccaggtacactgtgagaatgtccaccctgatagggccatgtcactaactgtggtgtgagttgtgagcagaagtgtaccactttcaggtgttagatttaactgccaatacaagaccctccagagctctctttcagcacagttgggatggcttgtcagtctgggtccctggggactacaataagcagaaacccctctcctctcaccatctctattgcccatagaagatgtggagtgtaagacaggatgaactccttgttgctatcaattctctatgatttagaggatgatttgtacccagcatggactgactgatctgacagattcatgggtcccatgacgattgtcatggtcttaaacaatcctgcctcactggctgtcattgattggttcagggctgggcaccttaacaacgccgagttagtcatcgttccagacccggtttcttcccttgaggagaccagaacctgatcaaagatgaaccaattagaattcttccctgggatttctgaaatcagtaagtgaaggaagaatgtagtatctagtagtgcaaatggtaagatgcaaaaactgagagcagttggtggccatgtgggtgttatgggttgaattgtatcctcaaaaaagaaaatatgctggagtccaaacccccagtactgcagagtggggccttatttggagataaggtctttatagaggcaatcaagttaaaatgaggtcattagggcaggccctaatctaatatgactagtgtccttataaaaaggggaaacttggccaggtggatggctcacgcctgtaatcccaacactttgggaggccgaggcaggtggatcatctgaggtctgaagttggagaccagcctggccaacatggcaaaaccctgcctctactgaaaatataaaaattagtccggcatggtggcgcatgcctgtaatctcagctactcgggaggctgagacaggagaatcacttgaacctagaaggcagaggatgcagtgagcaaagattgtgccattgcactccagcctgggcaacaagagccagactctgtctaaaaaaaaaagggggaggggggaaattaggacacagagacagatatacacacagggaagatgccaggtgaagatgggattcacgctgtcccaagccaaagaaacagcagaaagaaaagtccaggacagattcttccctggcaccttcagaggagcacggtcctgctgacaccttgatctcacactttaagcttccagaactatgagacaatacgtttccagtgtttaagccactcagtttgtagcactttgttccgtcagccctaggaaatccacagagtgaggaaagcacgtctgcagtgagagaaggaagcttacacgcctaagaaaagcagactggagcagcagaaagggtcagaaaaaatctaaacagaattagagttccaattacaattctcctgcatctctgccttttctctggctggagggttcatctgcttcttggattcttgagatggtattatgtcctcctgcttttttttgagactgggtctcccatgactcccagactagagtgtggtgccatgatcttagctcactgcatgcagcctctgcctcctgaggctcaagcaagtctcccacctcagcctcctgagtagctgatgtgtaccaccatgctggctactttttttgtaattttagtagacatgaggtctctactaaagaccagaggcatacaccaccatgctggctatttttttgtagttttagtagagatgaggtcttgccacattgcccagactggtctcgaactcctgagctcaagcaatccacctgtctcggcctccctcccaaagtgctaggattacaggcgtgagccaccgtgctcagtcctttctgttttgagtatgatggtttggagggatgatggttctgtgacttcaagccaagaatcctaatgaacatttttataatatttaataatgatcacgatcatcaccttaaagttacgaaaatgagtaatatgaatggatccatgtactggtgaatggactagaccggtagctgatggacaaacaggcccactgcttctaaatgctgtccaaacatgtccccagaagacagagacaagatccctcctgtctggctgcaatagccttcatacattcacacagtttgatcctcctggtgttttctttaatctagtaacagtcagaataaaacctgaaaaggattttcttctgcacagttatgcctttcttcccaatccaaacacaactgcatgcctggccccttgaaatgctccaaaacaaaacaagaaagcccagccaaatccctcatcgtgttttatgttattttcttggctgtacaaacttaggaaccctttgtttcttctgctccgtccttggacttttccttcccacattcacctctgtccagagctgctatatcagcagcaagggctcccagctagcagagggggagaggggtactctgagggaacgcaagctggaactgattaaccatctcagacttcagctgaaggccccctgaagcaatttaccagcctcctggaataaccattgaacacaggccctcacgggaagaatgtggctggataacagggtatggcttataggtttggtcttgcagagcagaagatcattgttcaaggtacatttgagcctctgggacagccaccatagtatgaatgaacagaatcattataccttgatgatctgtaaaaggcaagatcctagctcttctctgaaggactagggacagcaatgatactcctgagcaagatttgatgactacagtgttgtagactttaccgccccctccccaaagtaaaacaggctcttgatttttcctcatttattctattcaggagaccttataaaacatgatggtttttatcaagctgccagctggctgatcagagaaattagaaaagagcaagagttttctagaacaggtgggggccaactcagctttgaacaaaagcgggtgggtgggagtgcgcaggctgaatggacgctttgccagacacttgtctatttgctcccagatccactccccacactggcctgctctgctgtgctctgcagggagctacatttctcaggttcccttgctgactggcttccgggtaggttgggctaaagaaagtccctgacagaagattggagatgagcagacagcagccagggtatcttcacctcttactttgtcttcgacaacatccctggcagtggccacataacccccgtggcttcaggtcctgacagtcaccctacaaaatgattctagctcctgctggattatcccagcttctgggatctggaactatcacctcctcttattgtccctccagccttggttgctgtcattggttgctgtcattggtgatttctgggctgaaatacgtactgtttagcttcttagctgttttgtcaactgtttgaccagttctttacattaaattctctcaatggaaaggtcgagaggggtttcttttttcctgcctaaactctgactgataaacgtgctgagaaagactctgcaggcaggagcgtcactctgtagcctccaggacagtgaatatgcaaagactctcagtgcttgggctgggataaagagccccttacagcactgactgctgcactgaagcccaagagggaagagtgataggtggggccactgtgagactggggaggcagccctagaaggagaaatgggggacacaaaagcaggtttttgcttctttcccccgtaggtccagtcagcttgcatgggactttttttgctgttggttgataaactaatgtgggagaggccatcagtaagtcagtgaatgccaaggatcctggctgtgacacttcagaaagcttggtcaggttagggtgtttgaggcactgcaggaaagctggagtctaatgaaactgaggcagaccaagaaagacacctgtcagtagattggtgaaacactgacatcttaatgggatgtgactttctttagtcatgtctgtgtagctacctgcaactgtagagggtagcattgtccttctaaacccagtgggtggggaaagtcattctttattgagagaagaaggggtcaggaatacaatgagaagacattttagtgactgctgagagacagggcatcctttgtcagtgagaaagaatttggatgtgaaaaaaagtatctataaacagaccgacacaggccgggactgagaaagagacaagggcaaaataaagcccactagaaatgaagggacaaagacttgcaagctctccatggagcaggcccctcgggtggtgggccagcttcccagcagaggtcagcttcccactgtcagaacaggggactctggaatcccagagccaggacacatttgctttttgcttctgctcaggcccttgtcacaggtggccttttattgactgacccaagtgtcccagaccaatgtcgcccacaggaactgaaaggaccaccaggtgcagaacagcagggctgttaatgaactgccgcatgcctcacctcccgggaaacctctcttggttccagggaggaaaccaatgccgagactccagtgcagacttgcttgccacctcgccatccccacccaccttctcagacctcacgtgcccacccacgcagacacacgtgcttatttctaccttggtgaagctgaacgcatttgtcaggggagaagccaagttggaaaacaaagagtcctttctggagacgaaaaaaaaaacaagaaaatttggaggttacatatgttcccccacttcatttttttctaattttaaaaaagtctcctgttttttaataaaaattttaaaccagttagagattatagaaaaattgccacgatagcacagacctgctatacctaacacctagttttccccatattaacacctttcatcagtatggttcatttgttataatgaatgaaccaatattgaaacattattattaaatgaagtccatgatttattcagatttctttcgtttttccctaatgtcttctgctctggaatcccatgcaggacacattacatttagtcatcatgtgtcctcaggctcctcttggctatgacaattttttagatgttctttgtttttgatggccttgactgttagtgtgagtattggaaaggtttttgtaggatgccccactattggaatttgtctaatgttcttctcatgataagactggggttgtgaactattgggatgaactgtcccttatgtttttaaccattttttggttgcaaaagccatgactgtactcctactgggcccctggccaaaagctcagggagcagccttggtagacaggttctgccatcctggcagcatctacgcagtctctgctagcttccaccttcagaagaccaaaaagccctcatagtctatccacaacctacttctccagcatcaagtcctgaattttctttctatcttccacaccagatttgcttgcagttttccaaacatgcccatatcctttcatagtttcatgtctatacttttgctgtttcttctgccaaaaatgccattcttccccttggctaacttaaaactcccctcagaagtcagagcctagcacaaaatcctcctcttgggagccttctttgatccaccactccaaatgtaattgaaccctgtcttctctgtgccaacactgcacattcctgtccattcttaaccaccctgcttaccaccctagcacccttcagcattggacattgtatgttcattaacttgtttattgtttgtctcctctgccagaatagaagcctcatgacattggtctgttttgtttattgctacattgaaaggacagtgcttgacacacagcaggcactcaattattaatatttgctgaatgaatgagtgatactgctggagcatttcctacacttttttttttaacagacaaagtacttgctctttaatccaggctggagtgtagtggtgtgatcacagctcactgcagcctggaactcctgggctcaagtgatcctcctgccttagcctcccaagttgctgcaactacagctgcatatcaccatgtttggctaactttttttttttttttttttgtagtagagactgcgtcttgctatgtttcccaggctggttctacatcctttacagttatttgggcatgtatctgtttcttcaggtagactatgaacttctcgaggaaggaccagatatagatcctgtttaatgaaggaaggcttgacaaagaagctggcattttagccacaccttgaagaccatttcaggacacgctggtcatccttagccactgttccttctttcaggacatcaccccacactctctggaggagtatctccatgtggctggaagagacatacggtgtattatgcaaggtcttctccagaagtttagaatctaagagcttcgaagcagtggcaaggcccctgtctttctagactagacttccgatcttgaacactgcccctgctctattattgggtggtcagggccatctccaagaaccgtccccaataactaatttgataaggcagaaacagcagcagctctgaaacccaaggagtggggtccagcctctgcctgtggctagcttgggaaccatggacaacctctctgagccttagttccttcacccgataatggaaataacattaatacttacaatgctattagaggcttactgtgaggacctactgaaaaacaaatagcaaatcactttataaaagtcaagtgtgatctaaggcattttttactgtcatcagcagcaagtatcccaggcctcatgttttctgagccctgtgacatttggccaatgacaatggagacaggcagtgggcagggagatgagagctaccaggtagagttttaaaggcaagttactgggcctttggactaagatcaaaatcaagtgtgtaatacacacatataagccaaccacatgtttatggtacaatagctttgtcttctggctgcctaacaagagcccttaggctgagggctgcacatccaccttggatgtttctgtcagcccaccggactcactggggttggggaaaaggtatgtgttacctggggaaacccacttccaaccttggctggggattctgcatgctgattctataacttaacaaaaatgaaagttaattttattttataattctgcataacataaaagaaagaaaataaagtaaaagggacatggaactggcaaaatatttgtagcatggaagatagaagagggttaatattcatttgataaatatttggtgcaaattgatgagggaaaaaaattcaggaccacagcaaataaattgcaaacagacatggctgggttattcaagaaatatgttaagtgaatgcacacatggaaataatgttcagtttctctagtaatcaaagaaatacaaattagagcaaaaataaaataccattacacctaaattagtaatttttttttttttaatttaaagggctgagatgatggggaaaggtcagtgtgcattgaaggcagtcattgaagagtatttacttatcacctatcatgtaccagccatgacttcaggcattctggataaaataatcagacatgatccttagcatcagggggcttacatccagggcatctactttctggctgcgtgacctcagccaagttattcaacatctctgcgcttctgatgtccttatctgtcaaatacagatcatgatacccaccctcagagcagttgtggcaatttgtgacaattataaatcttcttcacctgcttactcatttgattcacccagctctgaagcctaagttaggcagggaacattagtcctgagtgcaactgaatgtgaaaatgaatactccaagagggggccaggcgtgatggctcatgcctcataatcccagcactttgggaggctgaggcagggagatcacttgaggtcaggagttcaagaccagcctggccaacatggtgaaaccccgtctctactaaaaatagaaaaattagccaggcgtggtagcacatgcttttaattccagctacttgggaagctgaggcaggagaattgcttgaacccaggaggtggagattgcagtgagacaagatcataccactgcactccagtctgagggacagggtgagactgtctggaaaagaaaaaagaaaaagcaaacaaaacaaaacaaaacaaacaaaaaaataaataaaaccccactactccaagaggggaagttactggtccaaggtcatagagccaagggttccaacccagttcttcagggttctgggtcatgctttctgtggagtcagtaatgtgtaaggggccctgaagtgaagctggtgaggactgtttcagatagtacagaggctagcaggacgcatgaagaaagggcaggttaaggccaagagagcatgctggggcagagtcttcaggcgcagaaaccctgcacgggcagccccagcctgtgcccctccttttccttacttctgaacccaacatgcactgaccccatctgcattcagcagtgactgcgagtgagttttccatttctttgacagatgattagaaaagcaggaggtggcagctggcccatttattatctgctcctaccaggcactccaggatgatgggcagatgtggtgaggcaggagctgctgagtgcatcccaaaacaattcgccatccacacactcaacaggcaccagtccagtgaattgtgctaatattcaagacacattgtgtccagaacacagggagaatataaaggaatttctccaagggtgattccgaactcttgtgggtgagcagtgtctgggagaataaaattgctgtttggatagatcctcagtcagccagaaaaggaggtgaatcagtgatctggttggaggttggaacctgggcaaaagctcaccaggacacccaagtgaggtcaggagagtggagtggtttagagctccctgcccatggcactcccttggttaaaactgtccggggtgtaccattgccaacaggtgaaattccagattcacagcacaaagcacttcatggtttggtctctgccttgccaggaaccacccttccctctaggcttgttgggcatttttagctccccacatgggcaatgcagggtcaagcctttgtatatgcacagttgccctgaccccatgccagcccctctagaagcctccgctgaggctgccagactgagtcagacgccatgccttgggtttcccttcccaaacaatgttatttactaacatatctctctccaccactacagactggtctatttcttatctagctctgcatcccaagtctagcatgaactctgacacatagcaaatatgcatatattcagtaaacatgtattggacagatggaaggttgggtggctggttggatggttaaagtacatgtttgacaaagctcatctataattatacagaagatgggggcagaaagggagctatgaagaccagggaggaggctgctgcaaaggtctagattgtggaagaggcagggggacgggaaggaggaggggacttgagtgaggatggtagatgaacttaataaaacctggtaagtgatggcacagaaagggtgagagagctgtgcctgaggctgacccctggtttccagatggagcagaatgtgaggcacttaggcaagacagggagacacggacccaggtgttagtacttcatattggtggggcaaggcggggggctgtgaatggggagaggagatcgccagttggggtagaagcaggcctgtgggccagtagagccctggtatgtattcctaccccacctccaggtggccctttgtgaactttcagtgggcaaaccttggttaagatggctcagaaatagagtttacatgattccagcaaatagaaggctcttctggcttagccatggtctggatccttccaatgagcgaaaaggaagaggccctttcaataggttgtactgaagggtgacatccctgaactcacctcccacatggctgtgtgaggggaagcatgcagttacctctgcagtgtgatggatcccaacggaggttgttcaatgtagtgcaaagagcacagagtttggactcaggcagacctgggttcaaatatggcgtttgctactcaacagccaagtagacttgggcaagtcccttcatttctctgagacttgtttccctatctgtaaaagcaataaaacccactttgtactgtaaatgttaattgaaataagcttgcatatgcctggcactttcttccctttgaccttcttttcctctgaatgcttcattcatcatttgaacaatggggagaaaattgctataaagaagcctgtcaagtacttattgggtatttgatatgtgctgggcaccctgaaagctatagaaaaagcgaagggaaggtttggccctctatggacctgaaatgatgaatgatattggcatgcattccctgtataggcatgtgcatcttatgtcagttcttactggctaagaggcctcgggcaattcactgcatggggctgagctcaatttctccattagctcacaaaggcctgttaacctctgtaccaagggctgccctcaggctgggatgagatcacttatgggaaagcatggtgggtggagggtgagggcaaggaaatgctcagggaaggtcccatgtgctcccttcttccacctctgcagagtggctttcctgggagttctcagaggctcctttctgctttctcatttaaacacttaatgggtctcatccttttaagtgacacctgctggaactgtaattgtgcacataattgctacgtgggaatggaggtgggtttatttcccagcgctagtgcttcccttaggaaaagaaacagtgtacccatgaatacgttgcctgtgtccttggagtggggcccgcagtgagccttttccctggatgcggggcacctggcttgcggggtctggcaaggtaagaagaaaatatctactgaagcattgaactttccagaaaccaaatatctggcattgggctcagtgaagccacagggccttgttaaaataccaagagggaagactaaaaatcccatcagaagtctccctgactggccaggcgcggtgactcatgcctgcaatcccagcactttgggaggctgaggcgggtggatcatgaggtcaggagatagagaccatcctggctaacacggtgaaaccccgtctctactaaaaatacaaaaaattagccaggcgtggtggtgtgtgcctgtaatcccagctactcgggaggctgaggcaggagaatcgcttgaacctgggaggcagaggttgcagtgagccaagatatcgcgccactgcactccagcctgggtgacaaggtgagactccgtctccaaaaaaaaatgaagtctccctgacaagcattccagtcaaattctgagagacagggtggcccccctgtagagtacaaagtgagagatgcagggttgagacctgggacggatgaagctcctgctgctctcttccctagtcatgcggcctgacacaggggaggtgctcaagatagggaccctaggacctctgtaataacactaatgataatcgttagcattgttggcaagactgttgttaatgattgatcaaatggaactcaagacaggaaggtttgggaaggcagagaaatgggaactaaaagctggaccaggggacaagaaaacaggccttagtgtcagcctccacatagctataaatacatcaacgtatgactataaatagttatacaagtgcataaatgtattttgagctcttcaggttcaaaaactgatcactggtctgtggctctatggaaacgactcttttcctcataatgaacactcccttctccaggcccccttgccctcctttctttgagctttcctagatttatctgaactctggtaagaatgaggacttttttttttagctgaacttgttttgcttgtttagatggattctttcgtgccctgatgcctgaggttcaagctcttccttctgtgcattcatacaatgcataggagaaagccgctgctgccctgtaaacaatgcgctcctcttccaaaagtgtctgcatttctgttttcgggagacttgattcctgtaggaaggatactcagggttcacggtccctggcctatatggtactcatttggggagtgagaggcctctgatgctgccatgaaacctccattacctgataccgtatggaaaaaaggtatataatcaataataacacagagtacatgagtccccagatttccacgtctcagtcctgtagcacaaattgtaaagggaaaatgcacctcgttatttgtggaaatccttcggatgcctgtttgagacattcctgccttctagtcgaagtctcctgaatgcaatctaaactttccttgatggctaaggatcacgcacagctattctttttactctgctctattacgctgatgccctttgtgactaccttctgcagggttatttgctcctaaatgaaatggccccagcatcatttcatgcttttgaagtttctgcgctctctctttctcgcgctgtgatcttctccctgactgtcagcactccagtatcactttgtgctcgctttgttgtgcttgtgtcggatggtgagcgaaccctcagaacacaactgtacagcaggacttggctcactggactctcattatctggccacatctgcagcagataccaaatacaggctttctcaacacccacttcaacctccttccagtgtgctttcttttccacgagcctagacagctggaaacaatatactgactcccttgcggcgagacccaagttctatggagcaaatgcacccacaggattgtagagggcggatgttgttacaggaggtggtgactatgctcgggtgcactggatcttcccacccacacagtggtggaggtgtttgtttatctggacagctgtggcgtaggctctgctgtctggttcccggaatgttgagtcccaaggagtgagacaaaggggattccgttaaaggagccctatgccatgccaggtacttctctggttctctggcagccaagcttgagtccctggcattcctgaaaggtttgcaggccatctaatatcctgtattaaatccttttctgtttaaactagacagaatagattctgttgtctgaaactaagaacattgactgagccaacacccgtctgtcccaaaactgtaagctccttaaagagaagagatttttttatgtctttatctcccctatgccccaaacatacattgcgccttaaagacctgtattaactggatgactggactaagacagggtggagagacaagctcctccggaggccccacccaccactgccctgatgccctgctacagttctgctaatgcctgggaaatcagatcacctggcttattaaactctggtataaagtaaacatagggcctggcatggtggctcatgcctataatcccagcacattgggaggccgaggcaggcggatcacctgagttcaggagtttgacaccagcctggccaacatggtaaaaccctgtctatactaaaaatacaaacattagctgggtgtggtggcaggcacctataatcccagctacttgggaggctgaggcaggagaatcacttgaacctgggaggtggaggttgcagtgagccaagttcgtaccactgcactccagcctgggcaacagagcgagactccgtctcaaaaaaataaaaaaataaagtaagcacaaacaaatcagttgtgagtgtgggttgagaggatttcgtatcacaaaaatctgaagactgcagtgcacggccaaatagaaatgtgttttgtcggctcagaggctctttttcgtttcctgcttggctagctctctgctgcattccaaatagctgagggacttccagataatcaaagttctctaaccatacacactgttagtaactcctttcagcccccttcctgtccagatgtacaaagagaatagcaaagggaaaaaagcccaacacttcctcgctacagccaccgagctgctaaatctcagcagttctgaatcatcacatcttgcatttctcattaactgcccctcatatgcagcattttcaattaagctgggagcactgctgtactaattatgttatgatatttgtccccgcagattaatatgcactcacggtttgggagtgctgtctgaattgtatttctctatttacctgtaaggaagcccttccttgacttgtccagctgtcctggacttggggactcagggggatgggacctgtgagggttaatttcatgtgtcaagttgacagggctgaggaatgcccagatatctggttaaacattatttctggttgtgtctgtgagggtgtttctgggagagattggagacccccctcaacaatgtgtgtgggcagcactccgatcccttgaggacctgaatagaacaaaaaggcagagggagggtgaatttgctctgtgcttgtgctgggagatccatctcctcctgcctttggacatgagaactcctggttctcgagccttttgactcaaactgggacatattacactggctcccctggttctcaggccttagggtttgggccagaactacaccactggctttcctgggcctcctggaaggtggcagatcatgggtcttccaagccctcataattgccaaaccttcataataaatctctttctctctctctctctctctcctgttggttctgtttttctgaagaacccagactaatacaggactcaagaattaggtgcaggccaggcacagtggctcacacctgtaatctaacactttgtgacgctgaggtgggtggatcaccataggtcaggagttcaagaccagcttggcgatcgtggtgaaaccccgtttctcctaaaaatacaaaaattagttaggtgtggtggcacatgcctgtaatcccaggtattcaggaggctgaggcatgagaatcgcttaaacctggaaggcaggggttgcagtgagccaaaattgtgccattccactccagcctcagtaacagagcaagactctgtctcaaacaaacaaacaaacaaacacgcaaaaagaattaggtgctctcagttgagctctgtctgcagagacagctctggttgcagaaggacatgatgccatcaagtcacaggtgaaacatcacagggccctctaggtggggccacattttatgtttcctctgcacctccacagagccttgtgctcatcagatatgctcagttaacactttctcatcaaaccagtcttgaaaagtcctactgaagaaacacgacaggaagcaatatgctttttatcaaaaatatgtctctcatccacgaaaaatacaaccagaaggaaaagggagtcatatttgctgctgtatattctgagtcagacacttccaaaataccttggctcatttaatcttcccaagtatcttgtgaggcaggtgttaccctcattttatagatgagatgaactgaggttcaggaaggttaattgcagagtgtgggaccaacttaggagatggcagagacctggatgcatgaactcaagggcccatgctctgtccagtgcaccatcattcattaactctgggatgatggtgcattgatagggatggtgcatcacagagaaatacaagacatgtgtccctgtgctcaagaagaacaaaagaaactaacagtcgtttgctactaataatcactaatcattgacattcattcagcacctactattcctggggcactctgcggagtgttctacatgttttgttctcatcctagacctgtgggctaaacatcattaccccatcccaggaatgagaaaactgaggcttgggcactcaggtataaaagataggaaagaccacgcgcagagctaagggaccacgtgactttgggtaagtcacttcagaactctccaggcctgtttcctccttcaaaaggtaagaacaaccgattgttgcagcaatcaaatgagcagacatatgtgacattatactgctgattatcaaagcctttccaaacgcaaggtactcgtcacagaaaactatggtggtaaagtgctctagagccaggctgcctgagtttcgatcctggctttgctatttaatagctgtgtgaccctgggtgaggcactctctgtgactggctttagcttagtttccttgtccctcaggagggtgataacagcacctacctcacagggtcattatgaggactgaatgactgctgcccatagaatttaatgctgctgtgcctaagtcaagaagcaacaatgggacttgtggattctcagcacttccatgacatggactctaccctaacattggctgggcaatgttataacttataaacttataagtttataagtccatcccttgattttaacaggtctgagcaataatgtggaaaggctactggtagccactgccaataaatcaaatccatcataggccacctcctccagaaagcccacctggactatgctgtcttattgtgactacttccttggctgaatttctatgggatttgaaattcagagaaattaagtaactcatccaaggtcacacaactaataaatggtaaactggtttaccatttagtaaccaggttactagtaaccatttactggtaaatggtaaagcaggatttcagtccggccatctgaccccaacgcttgtctgctatgcaagcatgggaatcttatgttttttgctacctggaaagtttcagcattgaatcatcttagcctggggtcttttaaaaataaatgattccattaaaacctttctcaacgggccctttgcatataattttttttctttcaagtttttctacttttttgggagtcagtttgactaattttcattttcccggaaaatcacctatcttgcagagattttcagatgtattagagtaccacagcaccttgtattggtgcaattttaaatcacatcagttgctttatttcttttttcatatattctcttcattttaatattagaagtcttccagcgctgtatttattttgcagcatacagagcaataagaagcacacacacaaagtagttttaaaatgctggccccagtgatgctgagtggcttgaaaagaaggcagaatgtatctttgataaagcactcttttttttttcaaggaaaaataccatgatgagtttgtttggatatgaaagggaaggcctcctgggtttagacaaagaagagttatgttgttctatctaagaaagcaatgaatgaatctgacagtagactgctggaagaggggttttgtgtgtgggagggagaaacctaaaaggaggaagacagggaaggagggccaggcagcaaggtggcaagcagggacgggctggcagtgtgacttggagagagtgggagggcctcagcatcctgtagcctgtgtgttggggcctgcatggctggcttttaacattaagagaattcgtcactctgaagttggaggggaccccgatgagaccatcaggctcactcccaaaatcataggagctgcacatgccagcagaaggaagaatgtttgagtctgccacactctaaagtgaggcttgatagtacttaaatcacagagtcgtcatgggaattaaacaaggtaaagcactttagagacttagcatggtgcccactcattgtagcctgtcactacacgcagcatgcatttgtgcagagggacagaatcaatgatgatgtgttcacatgtgagcgtgtgtgtgtgtgtgcatgtgtatggtggggggcggaggttggtagggttaaggagtgaatgctcagccaccagccttaagaatcccctcaagcccagatagtctcaaatcaacccccactcatccctgagctggtaaaaaactagcaagggggcggcaggaccctggagtcttatatggaaggtggcaggtggaatccggaacagagaagtaactccagttagctcctctgtgacctgggattgtgcagagtctctttggcagcccagccataaggcaaccagcccgaatttcatttctgatccttgcatttgggccccatctcaattaagatcagttagaagtcaatttcacagtggctggttttttaagatccctgaaaaatgataagctggaagcaggcgatcgcttcttttaggagcagaggccttcctcgacaggggctcagatgctttatttattttgatttgattttaatttggtaaataacgtttatttaattttttctctgatttcaaaagcaatgcatgttcaggagggaaaaacagctgtcatatccctcgccaggcctcagactaatggtgatgtttttttccttcattgcctgtgaggcttaaataaatacccaacaccgatgaccaatagtttccaaatatagaaaaaaataaaaataaaaaaccagaaaggtggaaagaaaagaagaaaaatcatccgcaatcctaccactcagagacaactaccgttaacagtttgtgtgtgtgtttttccttcctgttatttttctgtaactgttttacatggctgagatcacaccgtgtgtgattttacatcttgcaaaagacagggtataaaatcaccataagcataccataagcatttccccatgtcattaaaagctctataaacatcatttttaacggctacaaaatattccactctatgaatgaaccataatttacctaaccaattccctaaagtggagcatttagtggtttccaatttttcactcacataaataaagctatagtgaacacccgtgtggattcatttttgtctgcatttcatattattttcttaggacagattcccagaagcagaattactgggtcaaggcatgtagacttttttgaggctcttgagtcttattgccaaactttagttcccaaatctgccccttccacagtgtgtgaggtatccctccatgcaggccttgatctgatgcatttttaaactctgtaccctggggagggagattgccacttgttcggggcctgggggctaggaagggttttcattcctctagtgccccttgggagctccaggaagggtcagtggatttccatccccctttctgctcccctccccttgtctggggctccacttttgttcctggcttcagtgactttcatcggggcactgaggggggccttgtgtgctccttgtccccatcacaaattcatgacacggtaggaggcagggaacaggggaggaggtgtctgtgtttcgggggtcatttttagcacttttcagtcatttatcagactccaggtattgtgttttctccttttgtgaggcaccacggtgtgcatgggctgtcttgtcgttgtactcggacacatctcggcacagtggattttgcggtccattttgaatggcactggagcaactctctttctgaatttgtgctataaagtcactggatgtgccccaatcagagggcaatgctgaatttaaacaaacaaacaaaaaatgaaacacttcaaaggggaaaccctgtgagctttccaagagtaaaacagaaaatgacaacaaaacgctgcaggggatattgaatcatgagaatcaaacagaaacacaagaggagggagggctgcaagaacacagccactgtctccagggtgggccagtgtcagagggggcagaaggtcacccgctcaccagggacaggcaggaagaacagtgccgagagcctcccgtggagccgggactgtgggaggcattttcctaaaccaggagagcaaatatttccaatgcactaatgcagggcgctaaccaagacgctgaggctcagataagtcatgtgccagccaagagcaggcggcaactgagaggcagagcaaggactcaactcaggaccagaggtggcccatgtcccgcggtgcctacagcagtgttcctcaaagttaatgtggacgagattcaactgggagtcttgttaaaatgcagactgtgatccagcaggccttgggtggagcctgagagtgcatttccaacaagctcccgtgatgctgatgctcccggtcccaggaccgccctttgagcaagtcctacgatcagtggttcttaaaccttagcaagcaacagaatcgccctggagagccccttagaacacaagttgctgggtcccacccccagagtttgtgactcagaaggtgttggatgggcctgagaacttgcattttataaaagtcccaggtgaggctaatgctcctggctcggggaaaatgttccaagaatcattgccctactagactgtggctccaccgggggtgagcagggagcagttctcggcctgctccagtgctgctgcttaggcctttctgtgttctgaagaaggagttagggccttgttcttgagagggtctggaagtgggattgttcttgtccagagaccctcatcttttggatgtggcattaggagggacagggctgtatgtgtctatgtgtgtgtgtgtgtgtgtgtctgtgtggtgtgacgagtctccaaagcccttttaatctccgtgcagaaccaggtggtgataggagaggccagagaatttctcaagcagcttgaggactcacccataaaaaagccgcttgcagtacatcagttatattatgttgtcgaacagagcttcctgcttgttgggtcttggagtttaataaaaaaatatattatgactcagtccaaacttacaaaagtccttggggaatctgaaatgaatcatgttaagctcttgttataaaacaaacagtcatttctttcacaagcctgtatccacagcagactagctgtagaggtgggagaaagggaaggtggggaaaagactcagggcaaggggtgaaatttttgcccggagttttcttaaacaaccagagaccttcaggctgaaggaagacagagcccaaagaggctgtgtgtgggggaaaatgcttctttaatggtgggctcaccctctaacagcagaaggtagctaaggaagtaaggatttagaggttacctccttcagaaagccttccttgatttctccaggaagaatggctctaaacttcacagccctttatctttgtcactgagcacagaaacccagctctgtacatgccaactgtttatggccatggtgctctcctactggactgaatcttctgagctgactgaatgcaggcacaccttatctcccaagttgccatcctgcacgtggaagcctctgagaggtagcagaagccctgcagccattgcatgtttgattgactgactgacttgacaaagtttctcagtctccctatctttcttctcatactgaaggaagaaacttcatatgttgtcagagcccagattacagtaacaaaacttgaactaggacgtggatcagtgtgcagttgtcaatagggcattagccagcatcaaaatacattttttcatgtagagtcctggctgggtgccctccctagagggaaaagtgagcatatcatccctggctccactacctacttaactgggggacctcagactgtcactttccttctctgtgccttagtttcttcacctgaaaagcagggataataatggaaccaacattgtggcattttgaaaaggttaaatgagatgtcacgtgaaaagtacctagcatataacactttatagaaaaagaaaggaagatagaaaaagaaaacaattggccgggtgcagtggctcacgctcgtaatcccagcactttgggaggctgaggtgggcagatcacctgaggtcaggagttcgagaccagcctggccaacatggtgaaaccctgtctctaatacaaatacaaaaattagccagccatggtgacgggtacctgtaatcccagctactcgggaggttgagacaggagaattgcttgaaccagggaagcggagtttgcagtgagctgagattgtgccactgcactccagcctgagtgacagagaaagactttgtctaaaaaaaaaaaaaaaaaaaaaaaagaaaagaaaaggaaagcaaaacaggagatcctaaatctaaaagagagagtgagtgagagagaaaaagagagagagaaagacaaacagcgcaagtggtaacgtcctcatataatttcaggctgaaattccaggatatatgcactgaaaggggaaatgagggggccagaagcatggcctacatttatagagtgctcaataagtgttagctgttattaagaacctattctgtgctagatatatgctaagcacataaacgtcatttcactccatctttataaaaccttgggatatgacttatttctcagattttataggtgaggaaactggggcctccctagaccagactggcagagttgtttccttacagcataagttaatgaaaagacaagtcagcaaactttggaaaataatttggcattatctagtaaagctagagataccaggcctatgaacctctaattcctttctgaggtatatacccaacacatcagcattctcaaaagacttgtacaaaaatgtccatagcaccatcatttgtaacagtcaaacacgggaaataacccaaacccctcttaacagtagaatcgataacttctggatacctggatgatggggtatcacaaaggaacacactggaactatccacaatttggatgactcttaaaaagatgacattgagcaaagagggtcagatacagagagatatgtattggatgattctatttgtatgaaaaatgaaaacaggcaaaacagctgggttgtctggatacatatacttagatgccaaacaataaaggaaaggaatgatgaggttctccacgacatgagtgtgttactacgaggtggaggtgagggaagagggagagggttgtttcttgggaggagcccaagaaagctttgggaatattaccggtgttctattttttgccctgagtagtggtaacatgatgttcacattgcaattatttgttggacagtacatgtatgtgttgtgcccttttctggatgaatattgtatttctcaaaaaaaaaaaaacacccccccacccccaaaacaaaaccaaaatgataaggcttctcttctagagggaactcctgaatatccccagagtctaaagctgagacaattaagaacaggacagatggaattcagtgtataagaagaatatgctggccaggtgcggtgtctcacgcctgtaatcccagcattttgggaggttaaggtgggcagattacctgaggtcaggagattgagaccagcctggccaacatggtgaaaccccatctctactaaaaatacaaaaattagccgggcatggtggcaagtgcctgtgatcccagccactcaggaggctgaggcaggagaatcgcttgaatctgggaggcggaagttgcagtgagctgagatcacgccactgcattccagcctgcccaaaagagtgagactctgtctcaaaaaaaaaaaaaaaaaaaaaaagaagaagaagaacgtgctgattccaggccttgtgcaatgacctggaggcggggccttcccttttcgactgcagaaagggtcttcatccacagccactgcctattgaggacccagcagttccagaccccgtgttgggagtttaccttcattatccctattcctcacaacagcactgcaatgcaaccattaataatttattctacagcaacagaaatatgtgaacatcctcaagggctcccagccaggaagtgatggaactggcattttacccatgtctgtcccaggacagtgctgctagtgactacatgctctccttctatactagacttaccttctgcagtaaggttttttaaaaccaaaagacaactcagttgaaggaattttctggacttccaaagcatttgagcactgccttagagttatatgttctttcctctgctgtttttacaggagaaggagaaaccgggggaaactgaggtaaagggcaatacacatagagtagcccttgcctgtggccagatctttgtaggagggcatggaagccctgtctaccctgatggcttgtcctctggtcccttataaacacgcagggctggccatccatctggtggaaggtggaagagcccaagatgacgtggctcattgggagctttgtggtggcctgccttaacttaatgtccccatgtgtcctcagctcctctgaggctcaggcccctcagaatgaagagactgcgactaccttcagaagtaggtgagatacctgcgcaaagctccccacaaggtacctggcacaggcaaggcatgggatacatacagagtgttcactcaatggcctacatgattcaggagttagaaaagaggtcctgcaaacctctccttcctgaaggttcacacagttctgggcattagagtgagtgaaccccttccttgttggctagggaccacagtattacagagttcccattagtgccagaaagcaacattttgctggccacacagagtaaatgtatggagaatctttcataagtgtcccccacactttggggaacgtctattttgggcatctcaactgtgtcggtaatttcatccctaaagtcattttgcacatcttcccaaggattcaaaaataaaactctgtcccataaaggcagtaaaaggattttcagggggaaaaagtcttcaaatactatttttaaaaaaccatacacacctttctgccttctcctcctgcatcttcacaagagacctttgagttatgaagtgcacttaacaccattaattgccatggaaactacagcatcttctgctcgatatggtcaactttttctgcagagacttttttttcccctagcagagactttgaataatgggctgtttttgctccatttgagggaagacaaagcttccctcccccacccattccttgtaatgtgttacttcctctggccacattagtgacagcagacactggttaccaggtttctagaaggccaggaaagaggaagaggaagagaggaagaagaatattttctgaatttcagctttccgatgacactacctgtgggatccaggtgttttcacctgatcttcagcaataatttggtcttcaatttttatttagcatcattgacacaaccctagtagcatgcagtaacaattactaataattcttatttgtttgagtgcttacaataaaaaataatagcttttatctagtacttactacctacagggactattctaagtgcactgtatgtgttaacttattaaatcctcacataaactatagagatattcatcattcccattctgcaggtgaggaaactgaggcacagaaatatttaacctacctacccatgggcacagagctagtaagcacaaaagccgagatttgaacataggtccctgtaattccaaatctagcccatgcattttccatcatgcttctagtctaccttttaaaaggtatgacagcataacccctcaccagcaagtaaatcattaatgaatagattgaatcataaatatttattaggcctctgctatgtgtcagggacagtgctgggttctatttcaaattcatttacccaccaaactcagccatctgaaacttttctgagaaacaggaattatgccaaaaagcctctcagcaacccaaaggtatcgcaatattcacacgcagtatttatgtgagaaatactacaccaactcctttactttctctatacacaatgttaataagctggtcatttaaaaccagacacttggatttgaattccagatctgtcactccctagctatgtggccttgggatttatctaacaactctctgctggtttccccatatttaaaataggagcaatctcaggaagttttgaagattaagtcagaagatgtatgtcaggtgactattccagtaactggcaccaaataggagctgaacaggcaatttctatgagcagtagtggcggcattactcatttattacgtaaacttttattgtgcatcagtgattcccagcacactgcctatttgtgccctgcactaattttcttttctttttttagatggagtcttgctctgttgcccaggctggagtgcaatggcgtgatctcagctcacttcaacctctgtctcccctgttcaagcaactctcctgcctcagcctcttgagtagctgggattacaggtgagcaccaccatgcccggctgattttttgtatttttagtagagacaggttttcaccatgttggccaggctggtctcaaacttctggtctcaagtgatctgcctgcctcagtctcccaaagtgctgggattacaggcgtgagccaccacgcctggccggcactaattttcttttaacagagtgcctagaaattcaattgtgaggctaaatgagataatccacatataaggcaaagcaggatgccaggctcaggtcaggcataggtaggaagtggcagagctagaatttgaacacacatctagtgactttgaatcctgcacctgggaatgattagactgaaggcatttgtcccaaatggggaagaaagccacacattctcaatcactgaaggccaaccccactgttctatgcacctttttaagaaaatatttcaaaagttctgctgtaacttttgctattctaatggaggatgcctggtttccaggccttaaaaaaaggagcgatcctagcaaatattgccttctattaacccaacattagacacaattcaatgtcttaatggcatttataatcatcccatgcttctagttaaaaattaataattgaaattctgatgatcacagatgtccacggaaggcaaatttagacaacaacttgctaggcgaagcttaaactttcaattgctttttaaatcaaataggtgtctggctatacaattacttcacaaacatgcatttctttgggctgtatccttgaaagaggtttaaaatgaaaggatccactagtggtgcttcaagaagctataagtgttgaacttctgtttctggcaacatagtagactggttttatggatctctcttcccaccaaaactatatagaaatgtggttcaaaatgaattgggaaaaaaagcaattaagaaacatttaaccaaagctttaagtgaaagagctgaagacatagtaggccagaagtatatgagacacaggcacacgtcttaatagctagaggctagagttttaacatccacgtgggggaaaaaagatgtagctctgggccatgtgaggcagagttgaaactaagctctgacaccctgaataaggtctggaccttggaagggtttcctccctccatgtatgagatgtttgcccatccagctgcataggaaaccaagaagcttcattctgctcagggctttggacagaaaaataaatagcctatgatgtataaaaactcaaacctgcaccacatgcaagcatgaagttcaaatttatatcacccgtgggttgctaaaatcctaaaccaagaaattaatgtaaaaactgtcctaggacaagtaggacctctaagttgcttgctcaaatcaggcacgaaatagctctttagactctgtagggtcacttttatcaccttgaatgcagggaaatcccactggaaaaataaaacaatatcacaaactacatcacctgaaaatgagattacaaaaaaattagaaatcacccaagaaaacactctaccagcagagcaacaagaaggtttgacacccttgacatactaaaatactctgatagattatacatgtatttaaattactaaaaagataaaggaataaaaatcatgttaaaataataaaattatgagaaaatataagcttgaaaaataagcaaataaaactcgaaaaaatgaaaaaaaaacattatcactaaaattaaaattcagaagctgaatgaaacagcagattaagtacagctaaagagatatttagtaaaataaaaaatagacttgaggaaatttcccataatgcagcacagggaactagatggaaaatatgactgatctgtcaaaacaaaagagggcaaatcagaagatctaacatacaactaatggaaatttcaaaaggagaaaatgagggagaggaaacaaaactatggaataaaaagggcaaagaaaaaattgtaaaagctctcggagtgttggttttcttttgctttctgaaggtggccaatctttggaaggctgaggaattatgaaataaacagaatctgtgaattgaaagcagcacacggtttaacagtcatccctggggaaaaggatgctgcgaagaagttctctctttttcttttttgagactgagtcttgctctgtcgcccaggctggagtgcagtggcgcgatcttggctcactgcaagctctgcctcccgcgttcacgccattctcctgcttcagccttccgagtagctgggattacaggcgctcaccaccacacccggctaatttttctttttttgttaagtagagatggggtttcactatgttgatcaggctggcctcgaactcctgacctcgtgatccgcccgcctcggcctcccaaagtgctgggattacaggcgtgagccactgcgcctggctgaagcagttctactctctagtttgtcggccagaaaactagggcaactactgggtgctgtgaactatctatagtggaagattgaatcattgctcctaattcttcacccttctcctcgtgccctttgccctggacttttcagtacttcctactacaggtggagtgcatttccctacccactagggagcttgacctctcccttctgctgccatgaaaagaatgtgccccagctctcctgtgggtccaaggaggatgagagactcatggagcagacccggatccacctgctgattggagttaaaccccccagagcccagtttagatcagctgaccccagctcactcccagacagacgagtaagagtcaatgattgttttaagctactgaattttcaagtggcttgttaatgcagcatgattgtgacagtacagttgcttaatacatatattatatcaacagattttagaattctgagatagacattgttacctccattttacggtgaagaaaagacaaaggctccaagaaggaatgcaacttacccagtgtcacacgaaagtaaactcaacaactaaggcttattctgtctgtgaagccccaacttttaacttctgtaccaaattgcttctcagcaaatgcttgttggattaatggatgaacagacaaaggaataacagcccatccactggggccaaaaacataaactgcactcactcaaactcacactcagggcctgaccaccgtaaggcctgagcaaactcatcaatgttcccaaagaggctattttccttttatgaggtgtctgctgcacaaagagcttgccgggaaaacaaatccccttcatgccaggaaacaaacaaacactgcactggagtggaaaataatcgcagcctgtcagactccttggcatgctgatgatcttcatggtccagcagatgatgtcaaggatgtgacctccggaggctcacaataggcagtcgaggaagccctcatctaaatggatgacacagagtcccacagctgatccgcgtcttagtgcctggtactttagcagctgctggggaactgtctgattggtacagcttctcctctgaaccgatgggatcctaaataattaatcgccctgttttctgtggggtgggaatgggcagaccgtccaagaggctacagaggtttccctgtttaagtaagagaggatgaagacgtttagaccttcatccctccccatttgattcagaatctcaaaataaactgaaataaaatcgatgatgaacttcttttggtttcataaaagtaccaaacttatctccaatccagtagaaaaaaatagacaaagaatatgaatattctatttacagaagaacaaatacgaacagctagtaaacatatgaaaagacacttggtcacactgatagttaaagaaatgcagatcaaaacaacagtgaaattacattcttttccctatcaggttggtgaaaatggaaaagcttgataattttccagtgtttacccacaggaaaggggcatcctcatatgctgtcgatgggagtgtccactggtgaaactattttgtaggtcaatttggcaatcaatacctatcaaaatttaaaactttttggctcatttattctattattagaaatttactctccacttacacccatcccccaaaacatgccaagataggcatatgtcacagcaaaaaactagaaaaacgtaagtgtctttgagcagagactgaggtaaacgatgtatggcacattcaacaatggaaaaatatgcagcagttaacaagagtaattagttttgtaaggactgatagtgaaacacctcctaggtacgttgtcaaagggaaaacccaagaacagaggataaatgggctctttggtataaataaaatatgagcctacactttcttttacggaagaatagcagaaaactcttttgctgtggccacccttggagagaggcagctaaggagctaagacaagtcacgcgttcttttctgactttctggactctgtactttctgatcatgcacatccaattttttaaagtcaacaggagttactggggcaatgagattaaaggccattttgttttccttacccttgcacacatcaaaaatcacttatattaagtgctgcaactgactataatattgtgttaatattatataatgtgttcaatgccacgctggtgaggtgagagtggaggagagtcacatacacaagcagctggtgtacaggaaaggatctggaaggaaagatagtgtcaatcaccccagtgggtttatttgacaagcttgagttgttcttccctgggaataatcagaaaaataagaaactggggcttgggaggtggaaggagacagtggaggtcgggtagaatagaagcttttccatgcatccttgagagccatggaggggacaaaggaaaagtcttcccagttctggaagggcgtcatatgccttgcagatgatgggaagcccaaagtgagagggtcccactgggcttgtgggggcatgggcagcagccccgctgggtgaccagaaaggtctggaattcaccgcagaattgggggcgtggtgcaaatctccccacagttagggaggttgaagaggaaaaataaagatgcctatttttccatctcaagtgtccaagtttattttcctgtgggactaagctgcagagtacaggtgacccctctgtctcctttacactctgcacccagcatggtgcccagtgcacagaaggacctgtgtgtgaaatgcatgggatgctgacacagtcttttcagtccggcctctcatgttcctaacgcctccgtgtcttacatagatccctgcaagcctgcagccaggtatcctttagagcctagagtcggctggcagaagatatttatacatgcaaagaagctcaaagaactcctcttggaaagcctgacctatttcaccagttagtgatatctgaacaataaagattcatttgactttattagatcaaatgtaaaactgaatttaaaattaattaaaaatgacggcatacagctccttacaaaaacacctttgatgtgcattcaacacattgaatagctaaagttagggaagccaatgagttttcaattatcccagctacaggcagaaagagataacatggataaaagaaatccacagataatcaaaattaaaaatcctttattctttctttccatttcaacttttgtccctaacacaatcttgttaagactctaaggaaagctcaggtttgttcaatcttctcttctgtccctttctctattgaagtagagatgtaaataaggtaagagaaagtggcctgtcctgagaaagcactgtgtgtcagagcagagctgggctggacagtctttgctcctccagctcttttctctacccttcgctgcccttttctgtgccccaggaggctgagcttttggggtgatatcaatggaattcttttccctttgacttccggttagggttaggctattggagccaccagcctcagaggacagaaaagagagaggctgggttgtttattcccccaactcttccctgctaggctatagttgttagtagtggcttctttcttctacctaaggcatggctgctgtccagcatcttctcctgtagccatagctctcagtaactactcctgccctttcctatttaggcctagtgggtagtaacagtttcctggtgttgctaatcctggggtgctgcgctatctcaccggctttctgaaaccctgctcctctctcaaccctcctcagttactccatttgagtgcctatcagttccccacacttgccatgtattgtagcatttcatgtcctcattttccagggaagtggagaggctgaaagagggtaactgctttgcctaaggccacatcaccaggcactggcagaaccagaatcccaagccaggactgcccagtgccaaagcttggagatctgacaactcgatttcaccagtgggaaaccaaagcaatcagtgagaatctgcaaaatggtgtcacctacaagagaaccatttgagtttccatctcagagttcaaagggttcagaggctggatctttaagactgtccatgtcaggtttgtctggacctgttaggaatcctgctgtttatcaatgactttgtctcttggattttaacttttaaaggtcctgtctcatttgtggctcctggactctgagcctcacacaggagactttcagatttcaggctttcattgggtgatagggctttctgggaatagggcttgagagtgaggtggaaactcagttacgttactaatcatgtcctcattcatccatccatctggtcactgtgcaattactaagggcctgtggagtgaccaagatgagcaagacataacagatggctcctcatctagtcaggatcagtgacaaagtcttcctgtagaaagcaaccactgagctgcaatttaaaggataagcaggagtgggcatgttgtggatatgagagacagagcagtgaatgaaggaaggcaggagcattccaggcagaagaggtggcctgagcacaggatgcatgcaggtggtaggagatgggctggaggggcacatatggaccaatcatggtgggcattgttcagtgtactaaggaactaggcctcaagtatcagactggggcccaaggtctgggccagcctagtagcctctcaatctgaatgttgtgtcccaaagggttgttatgccacttcttaaagaattaaaaaaaaatttcccaaacctatttagaagtagagataatagttcaatgaactcctatagactcagcattcaggatgctgttccttaatcacctccagtttcaggtaaagactgaatctagtgccaggagctcaccaaggctgtggtgcaaatgtcctcagctagagggagaggacaccagccagaggtgctccttgagcctaatagaaacaatggccagcaaatactgatccacttgcttcttttcatctgcatcttggaagggtggagggtggaggggcccacagctaatgcaacaaagttaataaactagaaatagttgacacgtgtctttgacacacaggctgccaaaccatctgccagggaggttgagagcctcctctagtagaggtttctggagtaaaaaggaatacacaggctatcagagcaggtcacacagaatctcacactggcccattattaaggccaccacattgctgctcagaaggggaaatttcaaactgaacttgagaccaaagagcatcctgactccacaaatgctatcattaaggatcatcatagataatgtggttttaactagaagggctgaggtactggcaaatgttcaaaagacttgtcacgtgagaatccaccagcaccatggtgaaaacagcctgcagaatgagagtctgctcaggtgcaagagtttaagccttcttcctgcaaacacctgcgaggtgaggggttcactcaatccatggtacagacaggttgggtggaaaacttggtgttatcccccttacattaatggggagaggagaggggtttggtgtcttgtcatgtgctgagatggaaagggttttagagtcagacaaataggcctttggagtcagataaataggcctctctattagttacgatgatgagaccttggacaagatgcataacctttctgagccttgatttcatgtgtaaaatggagacaactacatctacattctgcagggctaaccaaaggtttaagtgaattaatgcatctccacactggtacaggtgactattatacaatggatggtcagaaagcattactttcttccattttccagcctccccaagctagtaggcagtggggcctccattcaaactcaagtctttgtgaattctaaggctggcccccttcaataactctatacaacttctcatccttccttggtaagggccaggacagggctttatttcacaaggtcaagtgtgcagtaagtgaaagtggccttgacttgtaatacaccagtttccaaatgtgagaagtttcctgcctgcatctctaaatcctatcagcctcctgcaccagggaatctttactgacagtgaatgcattaaataccaatagatggctgggcttctgagcacatcacataatccttgtctgctaacagagccaggggcttaagcggatgcagttatttcaaccagggaggctcaggcaaagctgtttgtctctttttaagcaagtgctcccccaccggctccctggctcactagaatgatgtgtctgtcatttattcatgcaagccgcccacctctctaggcaggcaaatcatctttatgctcatctgaagaaaaacatgcccgagatgagcaatctgaagctgagttccagtcctggccccccccacctactagctgtatggccagggatagtttcttcattcttctggttcattccaaaatagtgaagatcacacatatttggttcacaatgcagagaattacagtgcactaggtcacgtgctcagtgttgaattagctcgtatttctcaaaggagttggagggtgttcctaggacagaagtaggtgtgccataatgagaatattgcttggccaaaaggagggtttcatcagttatgtacctacgcagactactttgcacagcttggtcaaggatcaaataagatacagaatgtaaagtgtaaagtactgttcaaaagtaaactagtatgaattcatctatctgtgcatctacccattcatacactgtttcctccacctatccatctaattcaacaataaatatttactatctgttacatgttaagtcctaggcattggacatacatcaatgaaaaaaatatgtaaaaattccttccttcctagaacatacattctaatgaaatctacctatctatcttcatctacccagccatctgtccatccatccatctatccatgcatccatccatccatccatccatccatccacccacctacctacccatatactcactcacccatccactcatccatgcatctatccactcatccatccacctatccatccatccatccctccacccatccactcccccatccatccatccatccatctatccatccatccatccatccatccatccatccatccatccatccatgcacacccatccatccatccctatacccatgaactcaatcaccaagtatccattaaacatctactatgtactcactatggcgctaggtaccagcaagcaattaaaagagaaaaaatctcaacaactctcttttgttgtcatttactgtagtcacgcaagatgggttaatatcacatcgcttgctgacaagatccctgggctctgagcatcttattatggccacttctcagacctaccagttaaagagctatgtgatgcaggaaactgttaataatcaacttagtgggatacagtgagcactgccacctggagggctgtgggtggtggagagaagtggctttttatatggaggttacaatttttttgtagaatgaacaaacattgtgcctcaaacatagttgtacatctgtttctcatgtgagaatagatattgttgtgacaaaatataacttcatttaagggcatcggtgagccgatagtcactttcaatcattacttaacatcagagttgtgactagggtaaggtgagcgaggcaccaagggtaaaaattttcaggaggcactgagtgctgaccctgtgatggctccaccctgattgcgagtgcttccttaatttctaccccaggatgcctcacctacatcttatcagcagtatagtaagaacatccctttaatgaacacattccatatgtctggacatgtgctatgtatacttggcatatattatcttacttagcttttacaatcaccttaaaaaatagagattgttagctccactttacagaagagtaagctgaggctaaagaaggcatatgatttacttcaggtaatggaaccagggaacctaggtctgtctgttttctgaccagagaactcttcaggggcaggagatctgccttgttcttccctgttgcccagtatgcggtagagggactcagtggactcgtgactgtggactccataaattaccatttgctttaattcaactcccttcttcctcctcaagcagcacgcctccggtgccaactcaaggctctccaaggctgtacctcattactgccaaaagggccctcccacctgcccagtattccctactcctgacacagactggcctgaggttcttctggggatccaaccccagataatgccaaatcttcccccaacccacttcattcccctctcttacaactccttgaccaaagggacaactgggctatgaaaacgatgtttcctgagctcagaatttcttcttggaaacagagcaaaagaaatagatgaaaatgaggcaatttagagagatcagccaagtcaatttgtgataacctgggttctaaagtggccataattgagtgacaatttgccatgaggcacagggggcagtattcctatttgccttgacctggcaggttggagagggaggctgtctagtgggtaatttctgacctgagccatggagactggaccttttgtgtggaaagttcactgggaagtacgaccccctgaccctgggtccagacataatttcatacctggagatcgacctctgcagaaaaactgagctgaactagcagggtagcctccatgcttgtgtgtggggaaagctgatagatctgaccccacaaacctgtaccaaaccctgctccaggggctgtggaatggacattcattagacacaaactctgttcccggtcccatgctaggcctgttcctgtgaattccttcaagaaatgcttgctgtgattccatgaaatgctgggggaagcatcctggtttcttttggggatgatggaaatgtcctaaaatagattggcttggcttgggaatgagcccccacagtatcttcggctctatatggaaccccacaccaggaacccctggggacagctcttcccaccttccttgggtctggaggctgggctgggaatatacagagagagagagctgtgggttttgtaggacgtgatggcttctacaatttttttggtttgcttttctttaggaggaggagcgctatgtgtttggagatgaaaccatttaaaaagcacagatcttgacaaaacaaagccagtggcttcttcctctgcagcctctcaaatttctttcctgacccccagagacaaatactggggcaggcctctgagtccctccaaagaaagatgttatgctgccaacatttggtttcttataacctctggatggatgaaagcaagtcatatgcatggtccatggggatgccaaaggggcctgcggaggaacatgagatcacagccctgtaaggattttcttatattttgaagaaatagccttcgggatagattacttttcttgaggcagagaccataagatggaagacaaaagcctcagagctaggagtctgaagtttcaatggtgtgtgagtacccatcacgtgccaggcgccacctgcatcttctgagacacgatgggtcccagctctgcactggacccaggaaagtcttggaggctcagttttctcacccacaaaatggggtcaataatgacgcctgcctcactgggctgctgtgagagggcatggaaaggctgagaggttgcaaagtgctgtgtagtgcacagtttatgggtgcttttcctgtgttctttcacaggctctattcacagagcccagccattggtctgacactccaatctggactcttctttgaaaattaccagattcaacaaaaaacatctggctcagggtagggagccccaaaggaagtggacgccagtcttgatgactaaattactactagcccttgctagaactgaaaacaaattttataactgtaaactgctcgttccatccatttcccctagtctttgaagatccgtctctttcccaaccccatttcctcactacagcaagaagagatgcttcagaaatgagacctcaagatgtaactctgaaaacaatttaaaaaggaatgtgtgacccagcaagtggcagaggtgcttggagaagcagcttggtgtattaggtttaaagaacaagacttagagtcaaatcccggctaagccttaggctggctgtgtgatcctagacacatttcttaatatctctgagtcttttaagtatcttacctgtaaagtgaggataatgacaattacatgggaggatatcttcgaggaaaaaaatgagatgatacatataggtgactaatagaggcagtgcttaataaatattccctgaattgagtcgaattgaatcagtgcatgctatctctctcccttccctaacacctttgctgaaagctcagcttttgtagctctccctgaccacctgcccagcacaacattcttttccaatgggctcagtggcgagaggaagatggaaagcatttggccagaacgcagacctcattaactcccgtgtctctccatctgctatctatcaggaacccaatgcatggaggcaggtgaccaataaaagccctcccgtttccctttgtctctgggccagtgcatgacagtgcaaagctgtccacaactgtgggccccgtcagggctctgctctggccgtctgactcctagcaagagcagagactttgctgggctgagaagaaggaagctgagttcacagccaactcagaggcagcagctgggcccacctggccttgtctgtaagtcaagggggagtctgaaaaaccagcaaatggcaccgcaaacatggtgaagtaacgaggtcattatgtacagcacaaaaatctacaattcaaatgagtttctttatttcccaagggcattgagaacattgcttgttttacaaaagtgagacgtgcactctagtttttccagaaacatggagtttgcagaaagaaaggtgcaaagagtccatgtagacaataaatgctcagtaaaatgtgagctgttgttactacagaaaatgtctgctgagaactccttcacacttgttgcaggtggtatgcaggtttgcccctaaatgtccaggtagccaatggaaagtagtaaacatgattagttttaatcagtatcacaatttccaatgtctaacagtaaccctagtaacccaggaccagcaccactgttaatgctactaaaaccagggacgaatacagctctcccttggtatatatgggaaactgattccaacacaccctccagtttattgaaatctgtgcaaacttaaccacatatgagaaaagtgggcctagacctccctatgcatggcctacggggcttcgcatcccttgaatatggtattttccatcaacatttggtttaaaaataatctgtgtattaagtggacctatgcagttcaaacccactttgatctagagtcaactgtagtatcttccttaggtcttccagaatggacattgtgtaatgagaaaaaagagatgttcaagtaggaactgcaagcgccgttttgctgatgctgaccattgctcttacttatcagtgtccgactgtgaagaaaccaggctatccttctcactgagataccacgggagcagtgaaaacatggccggcacgggtgctttacaatcccaagctacccgggctcaacatctatcttttggccttcctgttttgtcactagtggaattagagtattattaatcaaccaatcagccaaataaggctcattaccattaaagaagagaaagtaagctttatttatgcaattataaggcatttacaaaacaaagggattattattaatacttgagcctggcaatcttcccagagtggtaaaccgacaagggctttgttcttgaagaggcaacacagcagtaacggattcccgtccccctgctctaagctctgggtgtgtggcaatacctcctgaatattcaaggaaggttctgagggcctcctcttcccctcagtgttgtttggggaaaacatcagtgggttgggattaggaggctggtgtactacgtgaccccagcccaaacaaacaaaatctctgggccgtggtttcccagcagttacacgttggaaatgggactaaaatcacagggtaggacttgtagaaaatacttggatcccattcccatttcaaaccaatggaatcagaatctccgacggtggggtcccaaaatagtatgttcaaaaactgttctaggtgattctagaacataagcaggggctgcaaaccacgacttggatgccctctaagtccattctgtttatacctctggtcttgtcaacacttaggatttctcagagacacctgttcctgggttatcaaaggcaaatgtctgcagagggtctgcaggcaacctaatgagtggaggcagccaggtgtggggccaaaggtgttcagctgcctgtagacgaagcataacacctgcctgggtagaatgttttttgagatacagtacaggaaaaatcaaatggcacacacagcctacagccctcagtttgagaccccggacaaactgacagatctcagttccttttagatggctagctcactgccttgtaatgcatgaaactgcatgctccctggtgacacaggccatttcttgtttgactttatatcagaagccctaggcacatgaatgaaggggtgagtgggtgggtctcggacattccttggttcttcagtttcacattgcgtgataaagactttaggagtctaggcctgcactgttcaatactgcagccattggccacatgtggctatggagcccttgaaacgcggctcatccaaagtgtaaaatacatatcacatttcaaagacttagagtgaaaacaagaatttacatttttcttaaatttttaaacaaattacatgtcgaaatgatattttgaatagattgtgttacatgtatgattaaaattaatttcccctgtttctgttcatttttttaaatgcaactactagaaaattaaaaatattatatttccattggagtgtgcggctctgagccattttgctttcatctacttttcacatatatatccatgtcagccttgtgtgtgatttttttttaacatttctctcctatcaataaactctatctttctcgcttctcatcttccagtaggattataataaaacagcatgagagatggggaggaaacagggctttggattaaaaacctagtccttctctcagcctaggaggttatgctatctgttcccgtctctcaccttctacccagggtattttcttgtaaatgaccatggcaactgtctcagctccctcccacaaagatttcctctctctgatgcctttcttctcatttcctactctcagaactcttattcatccttcaagacccagattaaatgctacctccttctgggaagccctatctgatttcccaggtggagtaagtagcactcccacttgcctctccggcactcagctcttactgctgttgtaacacttctcccaggaatgactgtgatcctttgaccagctggcctacgtcataagacttactgagtgcagggctgatctattctgtgttcccaaggtctgactcaagatctgacatgtgctcagtaaatgttagatgaatggatagatctcacgcatcaagggaagtatctttatacattccttaatcttctcaacaaatatctactgcatacctactaagtgtcaaccataccaagcacactctaggcacagggaatactgcaatgagcaaaatagtcaaaaatgcctgcttttatggagctttcctgcttctgctaaaaagtaccttgcatcatcctaatgcccagatgttcaataaatattcactatgctgatgttgaagaagaggaatgatacaggcaggaggagctcctgtgccccagagcccatccttctgaaaggcacaggcccttatctttgctactggtgtcagtaggcccttatctttgctactagtatcagtagaggctcccttaacagagtctttacaaccttccacttacgctgtgcactaaagagtttaagaggtgcaataacattgcagcagcaggtatttattggttttgatagagacagaggcagctctgaattggccaaagcatgacttttgctttttttagaggcacactagtagtgaccaaggagactgataagactttcagaattgtctagaagagtaaccataaaaaacaaattgaagccattgcgtgcattaaacaaaggatcattaagcagaaggatctctgcccttcagtaccacagagttttatgggagagacaggcatatatataaattatgagatacaaaacacgttgggataaaggttaccacattcacaagtgagcattttggatatcttataggagtttcattcttcacccacccaaaacaaagctcctcatcttctctccacaatcgcttcttctctggtctcatgattggccccaccatctacctagttactccagccacaaagtgagacctgtttgtcaccttcctctccctttctcaccatccacatgtaatcaagaactgaatcttgtcagttctaattctaatcagctctacaacctacacatgcctctccaaactcactaccagcaccagagtccagcccatcatcatcacatacttggcctattgcaaagccttcttgtcaatctccatatgtctactcttgacatagtccctgcacctgccctgccccactgttctgtggaggccatttaccctgttcaaatccaaagatgaatgtcctaatatgagaagaatgccagaaatgcctcactgttcagcccatagttctaattctgagatttggaaagataaaggttgatgctaggtaaactatatagaataatggagtatatagtagggactaaggtttagagtcagacacacctggctttaaatttgaaatctcctatttccttgctttgtgacctagacaaattaaaacatctctggtccttcatttcctcatctgtaaaagaggataatcatctttacctccatggtatagactctcttaacctatacaatatattccttagagaataaattatataaggtatgactagcacttaaggccagtatctggcacataataaattcttgataaactgtagtttgttgaaaacaaaaagattattcacagaaagtaggtatttgtctcattagggaaaactatgattcttacagagcccaggtcctgccccagatgtaccacttcattactgaaaaatcccagacacctgtatcacctataaattgtttgagtttttgactgtgccaaaacaatctaacatcctgctagtgtaaccaaaatggaagatcctttctgttcctatcaagcgagtgctaggaatctgcagttttactaggctttaaacttcttaacatcagtgtaaagaaggaaatataatcaggtataaaattcccagtgttcaagagggaaagacaaattgccagggaaaagcacaaaaaattctggtattgagacaagagagaactttctcaactgtgaactcaaagagaaaatctggagtactacaggagtcaacaaacttttccctaaagggctgggctgtaaataatttaagctttgtgggctatatgacctctgttgcaactactcagctctgccattgtagctcaaaagcagctacatagacaatatgtatatgaatagactgtgtttcagtaaaactttgtttacaaaacaggcaacaggcctgtgggctgtagttaactgacccaagtataatataatgaaccacatttcagctatctgacactggacaagtcacttcttctctttaaatcttactttcctatatcaaaacatgagagttttgggcatgagtgagatgtaaatgaaataaggtagagtcagtccttattattcatggactacctattcacaaaattgtatttgtgaattttgctattcccagaaatgtacttgtaaccccaaacccaacactatcatggtcatttgtggaccatgcataaagaggtgaaaaatttgactcatcaggtgcaaagttcccagctgaggttaaacaaaacaacactctgccttcttgtcccaactctcataatgtaaaaagtttcctttttgcaatctatttagtactacacttttcacatttttgtgctgtgctttttgttggtgatttcattgcttgaaatgtccaccaagcatagtgctgaagtgctagctggtgttcctaagtgcaagaaggctgtaatatgtgttatatgcaaaatgtatgtgctagataagcttcattcaggcatgagttataggattgctggctgagagttcaatgtcaaggaatcaaaaacatatattagataagatgtctttaaatagaacacacacgaaaccagatgatgtattaatgagctgacaaaaatgttttgatcagaggcttacaggaacctaaccctgtatttcccttaggagcaaaggttccacactcactaattcaggattcccacctactttatataacataactactgtaaaaaatgagaatcacctgtacatgaacatgctgttcaaagtagtagctaaaattactgttacaaaattcttagttaaaaactatgctgtgatagtcttatctcctaatgctgcaataaagctataactaattcaccattttcgttttattctgtttgtattatttaacaagagtgctgtgttactgctattaagtggttgtatccaaagttagccagagaatgtgtctactttttctttttcccatggcttcctgaagagaataaaaacaaaaataaagccttcctacagactgtctcccaggggcttctacagacagaaagcagaaataaagcactctctagagccacaattttaggcaaagatgagagcagcatcttccaggaggggaatagggagctgcgtgggtggggactcgaggctgcacccctacctgggagagagcagggctcctcagggctcctcagggctcctcagggccctcgcctgccccgatggccaggcagactctgaaaagcagtgcccctggctccttgctgccctagttaaaatgccagcctggcatttatttgttttctcccagacagatgccaattacagggggctggggaaagagacaatggcccagatctgattgacaacggctgctgaacaaggggcctctgtggcatgcttaatgaaaaggcaactgtggttttatttcatctatttgattttagagtgtcttttataaaaacaattcaaccagcaggattaactacttctgggctttctcttcaccctctggctctgtagatgtcctgctatccctgacttcccctcttcctccctccactcccagcaggttcctttccagggcctcgcagagaagcacaggcctgcatgcagccccactccaccaagactcctcagtgattgctggatttgtccccaggttcccatccccctagcaccaccgtcctttcgcccagcatctcctcctgcctggccacctgcaggagccttgaggcttagctccctctgttgttctttcctccctggaggctttggaagtgtgtggagccagtttgggttgttaacaatgagggtgtaactggcacttagcacttatgggtgtgcacaaggcatgtgccatccaaaatgatccccagtgattttattcccttggccactttgtagccaaagtgactttgcctctagtcccacaacctaattaccaaattgtatggcatgtgaattatattcaaacaaatctgctatataaaattttaaaaatctaattaccataattatctactgaaaactcctaaatgatttgggatcatctgtactggatcaaattcaaactccccacatggtacctaagggtttctcagacctctgggccctcctatctctcccatgtatctcctctcactgcttctcactaaccatggctctcacccccatcccagtgaacttttcatttctattccagctctgcttgctgttcacattctctctatctagagcaccctccacttcacttccttccatgacaaatgcttactcaactttcaaagctctatgtaggcatcacctccttcaggaagcccaccatgactcctcccagcctcaggctgcctctctgtgtttcccttgtataatttgcagggcagttactcaactatacggccccacgatggcagggaacaggctgaattcagtccttagcagagggctgggctcacagaagagcaaatcaggtgggagaacagctcccctcctcccaaccagaagcagctttgcctcttctgttctatgtattaggacatcacaaaagactgaagaaaattcccacagtcacaaaaggtttggaaactctgatctaggtcattgagtttgtctgctggggaaattgatgacttctgaagtcatttttcatgatgacttctgaaggctaagaatggaattagtcagtctgggggtaaaagaccaacaggtacttgtatgcctttctgaccccagtgaagatctcaagatctagggtaaaagcaagctgcaaggggaacattcaaactgaactcaacagccagcgttcctgagccgcccgataaagcttcttccccaaagggttatgtctttgaagagatcatcgaatgctaatcggaaagacaaagatgattacagagactttttcttgtctttctaaagggctttagagacggcaaagccacttgctcctctaggttctcttgccatttatttgcacttttcataccaatctggagtgttctatttataggtccataatccataagagaccatggcccctccatgatggggctgaatcgtatttgcatttgtgtccccagggccacagtgggtaaacagtctgtgtttgctgagcttacctccttaccttccctcatgaggggaaaggcagggccagccctcctgagggccttacctaaggcaccagctgtttaatggcggggctgggtggagcccaggtcttcaccttccactcttcaaccacaacactgaacttgccagagtggtcctggcacgggctcttcagcccacctactcccccagctctctcccacagggtcctggggtggcagtagaggaagtggtggcctctggcctgggactacctcttggcaagaccacctagtaatgagggctttttgttccttaagtgaccaaactctcccactccaggaaaggagagaaggggaagcaaacatacttcccatgcactgagcacctgctgtgtaccagagactatgtcagccacacacacagagctcatagttaaataaaatgagaacatagatgatctcatttggttcctgtaacaaccctaggaggtagtgatgtctgcttccattttccagatgacaaagtcaaattaagagtaaatggcaaaatagggattttcagcctcaggcctttgtgactctaaagtcacaaagtgctttttccacctcccacatcccacctcccagagggactcaaccagtcctggattccactctagcattctcacaagtttctagctgctgcaagctcctttccattcaacagtcattgcctggaagctgagtgtatgtggctagagggattgtttagatcataactgttttcagaacagttcagatctgaaacctgtgtgattttaaattttctagtagccacatttaaaaagcaaaaagaaaaaaatgacaacaattttaatgatgttacatttatttcatctataaagaaattttatttatctaaaatattataatgttgctacctaatatagaaaaagcactcatgggacattttatattcttttatttttcctcccaagtctctgaaatccagggcacatctcgtattatatctatggtacatattaattcagactagccacattccaagtcctcaatagtcacatgtggctgttggctaccatattggtagtgcaaagctggatctttcagtttctccaaccaagccacacacactctggcctcttctcacatgttcttccctctgcttggggcatgctccccaccaccccaaacccactttgctgggctgactttcaaatcagaggtcacttcctcctggaagcttcccctggcctgagttaagggccccctcacatgctgccatggcattccatattaaatggattgtaattgcttgggtttcttggactttaactccatctatatcgtgtttaccactgagcctccaatgcctaggatgtaccttgtacatagcggacacccagtaatgtatgcaattttgcttgctaaaataaaacatcctttaggccctggacattgatctgctcagggatggtcctaagaagcaaagagaaaccagcctctctctttacacttacccaaaagagcacaggctttggagtcagtcaggccttggttcaaattctgattctaccgcttaacaaatctgtgtcctggccaagttcctttacctctcagagccttagtttctccatctgtaaaatggggctatcaatctgccatgcataattgttgcactgagaaaagggaacaataacctccaatgacaatgccagttgaactatgacatgccttcaactgtaagatgcatcctaatttcagagatgttaaaaagttaaagtaaccatcttaaactcaatgacatttgataagtgattctcccctcgtctttctccctggagagttactggacagaactcttaggtagaggatgctgacctctgacctgtgtcacatcacatggagccatgggacttgggtttcatgaggtgctctagaaacgataaagaaagaaatggctatttaatgaattcccaccacaggccaaccactttccttacattatttcaatcgcttcgcaaagcaatcttatttggtatatttctcatttttaagagaggttaagttgtgtagctagttcaaagaggttaagttgtgtagctagtacacggtggagccgggcctggaaccagggcccatgtcatgcactgccccactgcctccacaaaacccagtttctaaaggcctgagatctcgaggttggctggctgttctgaaagcctcgttagcagcatcctgtaaatgcgctgtaaatgccctgaactcctaaaacaagctctggatcaaaccatcagccctgagcttattagatttaatgccaggaacaaaccttgaaacaacaggttaaggagacccctgcaaagatctgagggagaatcagagcctggccctccaggggcagcgggctggcaagacaaggctgtgcacagcttgccagatccaatatcagtgaaagggaagaatgctggcctcctcctcagcatctgcaagcttcagcactcctccacggcaccccactgtgcgagggggaaatgaggaagagcctgagatgctgaaatggccaggggtgcaggggtggtaaatgtggagcaggaggatgttaggagggaagtcctaatgtggggaagttacccaagcttgtaggtgcctgcaacataaacatcaaatgtaaacacctagatgggtggcagggactaaggacagaaggcagaaggtccctttggttacatattggcgaccaaatttgctcacaaattctcgtgaaggtcttttgcagaatgcatcccgtttttcactctcagatttgcaaaggctgagatgacatgctggtcctgcaataaattaagatacaggaatttccttacaaagttcagtgtctttccacaaaatcaactaaatcaagttgctgatttgatcatctgaggaagtttatacttcatgggagtttctcaagcttcttctttgtttaaggtagctccctgcatcttctttatatttttccagatgaaatcttggtaaaatggttaagagaagacctagtatggtgaagtggaaggcagggctcaccaggccacccctcctctcctatcccctggtgaaaccccagcattgggcagaagagagattaaaaaccacggagctggcacttccagctgtggcatttgatgagtctgttataaattgggggggaaaaaggcttaaacatgtaacagtggaagcctgttgtagtagagaggatgctggtttggttcaccaagaaagcagcattttcaacttagtttggctgggaaatgagtttccccagggtttggctttggcatgggtgctgggccccacccttcacttgccatgtgaccttagccagaagacttctccccgggcctcagtttcctgcagggagttgggaatgctcagtggctctcgcacagtgctcaggggaatcctggaagcaaccctccctcacttcaccactttatccagaacatctctgcttttctgtattttatacactttggatccctgtaaaacttcctttgaagatgtctttgtggtcagtaaaagttggaactctgacagactgaataatctcctacattccttccagccctaacattccctgactctaaaaatcaccaagttaaaatctattcatgggaataaacaatcctcaaagaagttagaaggtgctgggtatgtgtgagcggggtgtgtgtgtgtgtgtctgtgtgtgcgcgcgcatgcgggcatgtgtttgtgtgtgtttaatccttcaacatttatgtgtgtatgcctgtgcttctcagacgcaagccacatgcaaacatttcccctgcaaagtttggtgcttttaagttatttatgtgcaaaagatgcctgtaggcaaagcagggcaagcatgtttctgtgccagcccagaaatgcgctttgcactctgcaggtgagaagacactgctgccctgcggcctgcaaacaagcaaaccaattgagagcaacacaactccaccaggcaggtactcacacccttggtttcctcattttcctgctagccttgtctccactccccaggccttccctgattcctgcccatctctccaagatagaaaaaggaagacagaaaatgcagcccagtaaccgtttcaaaacagtgacatgatgctagaaaacagtcattaagtccactgcagacttgttcaagtttcccaagtcttgttgggttaaacttccagacccagggccatcatagtgccacagctgcagatgcagcttgagggcaaatagaagttggttctccctgggtgacaggtaatccttagcatcctgtatagacaggcctcctggtccagcctaagaccctagcagaagggagcagataacagcaacatcagaccatgaataaatcaaaagtaatttccatttctctttggatcatatgggttttatgtggggggaaggtagagcacacatgcttttctgattatatcttcattatgccgcctaaaaacgagcagataaatagactgtaaagctgaaagagaccctggagggcatctcacccaccctcctcattttaagggcaggaaaatcaagacctggtatgggaaggatccttactgagaatcatcctgctatactacctaggagactggacctcaggccactggccatttcattcagccccaaagctgttgccaagtatacttatacagtatgctgtggccttcacttgctaatggcatactgtataagacatgaggacaggagggacctcagagccagctcacactctgctcacccagccttgtgccccggtgccgggctatgtctgcctggaggaagggcattgtcttctaacctgcacagaagggctagcagggtctccaggaggcaggaagtgttcacagagggggacactggagccccaagatgagtttaagagcagagaaagaaagtgtagatgtttggaggggggtgggagaatgtgcaaagagctgctgctagggatacatccggcatgcatctttctcctagcgcaggcccagcgccccctgatgcctgggcctttatccaaggcctctccaggaagacacagccagaaacatgctctttggatcccatcttggagtagaaggttacagaacccacccctccaggactctctacagctaggttccaatggccctgtcatccttacaggagactttgggggcctctaccactgccatactccttgctgctttgggggtaccatttgcagcctcccctctccctcccagcagcctttttcctctgccacccacatcctggggagaaggaaatcacccaacagagagaaggggagacctagcccagctgctctgcccaatcctggcaataaccccttcccccatccccccaacttctgctgcctcaggaaagggctgaagacatagattccaaatataggtacacccccacccccaatcctcctgcccagctaatattagcccttttgtagaatccactgacagcattattctgtttttttggctgtgctggtgggaattcttctgcttacagtaaggagtgaggcaggctgagccagcaaaagactgcagaacacactgagccagatacagagagagctctgctaccaggggctgtgccaggtgatttatggagctccttttcagacacgagatttatgattctgcaaacagggagttttgggaaatgggcagggcattgggatgaggatgggtggttctggttaattgaatttgtcagcttccagatagagggggcactaacagttgttgacgatttactctgagccaggaacactgctaaggattttgtgtacatgatttcattgtatctttacaataactctatgagaggggtagaattatccctattttacagatgaggcattgaggctcaaagaagtgaaagtaacttgccccctgacaatgtctaatcaacgcaaagatgggatttgaacccaggtctttgtgactccaaagccctggcttttcaccatgtcatcaggcctgtttgtttcaacactggcagaaaatcttttgaaaatggtgtgagtgtgctacttctgcacggtccatagttaggggcagggaagcaaagtgctgattttggagtgaggggatgtgaactgggggcctgctgctgtcaggcagacttggagtaacttattaggcctgtctgagccttggtttttccacctagaaaataggggtgcagacagagaaaccccaaaggtgcttttggccctgactcttggagtctgcatagttttctgagggtcttctttattttgatggctagttctcaccatcttggcccagaaatgcagcttgaaatgagcacagtggcatgaggtgagggcagagagcaaattgaacatgtactgaccagaaggccccctaagcagccttcctgctgagaactcactgtcttgcaactcctttctacaaagtgcaaaagaacaaaaaagctaattctgcctgaggcagcatagcaaaaacaaggtcctcctggtttctcaagttcactcagagaagaaagagaaagcagatttgagagagagcgtatagatctggagtgactggtaatacatgggggaaacagtaggtattgatttcattccattgcttattttcccaccttgttccgatgaggattcaaggcagggggacttaggagttggtgatgcctaaggggttcacaaggccattcactgagaaaggaatagactcaatgaatatagctgattgagtctagaaacacaacgttgtaagcttgtctccatcaggaaaatgagactggccggacaaatggactgatttgtcaatttgacggctgtcctactggcttaatttttggcacctggagaaatgcagcctttggggcagtccaccttgctgtcagcattgtgattaaaggctcaggaggaaagacctgggcctgcttgcgatggggaagccagcaggagccgctgagaacctcttgaaagaactctcttcccagactccagacatcggaagagctttcccatcaaagcagcatcagcagaagcacccgaattcttgccacttcatctttgttgtattttattgacgttaaactgatactgaaatttcatttccagaaacctttcctggaccatttctctgaggaaggaagctagcccattagtgagccactcaagtggcccgtggcagtctctcaggaattctcagagcttgcggctcccaagtggtgctgggtatgtgtgtacatgtgcacgagggacagacaagcgcaatgacactgtcactatcaggaaatcacaaacaacaggattgttttcaaggtgaggcctgggctcttcatcctccagaaaccaacagagcctaaagggaaatctcacaggcacggccacgtgtccagacccagacaagcgcacagggcccatgacacagaagcacccaacatgcacctctgagcccagacacacgtctgctttcaggcacgtgcacaggtgtttacacctttagatgcctgcagagtcctcacatcccagacaaacaggcacacactggggccacggagggtggtctctacaagctgaaagtttaccacattagggactccttggctgagcaccagctgtggaggatttccaatctgatgatctcagaactccctaaagtgtcaatatgttcattttcacagctgtttcttcatcaccttcttcccagaaggccttagagagagtactccaggcagaagatgagtaacacagtcctttgggagcttacaatcttctgagagtagcaacaggtaagatggtgttaaggagagaggcaggcagaaagggagaggaagtgtaaactttctcagggtcaagtctgacttctttactgttggatatccagagcccagcaaggtgggagcacctagtatagcttcataaataattatgtaatgaattgattcagggctattgcaggccaaccttacttggtctctctatatgcctctctgccacccagagtaccaggtccacactccttatagcctgccttccagggtcagaacctgtcttcccacctcatgtcctatcccactgccccatagctgcctctctactctttattcctgttccactgagcctctccccatttctctaggactccagggccttccaggtctcagggcctttatgaaaactttccctctgcgtacttttctgtctggtgagctctttttcaccctttcagatgcatatcaaatatcctcttgctatggtttgaatgtgtcctctccaaaattcactttgaaacttgatccccaatgcaacagtattaagaggtgtgacctttgggaggtggttaggttatgagagctctacccctgtgaatagattagtgccttataaaaggggtggagggaactagctcggcccccttttgttgcctcttctgttccctctgccatttgaggacacagtgctcctcccctctggaggatgtggcagcaaaaagtgccattttgaaagcagagaccaagccctcaccaaaaatcaaacctgtttcatcttgatcttagacttccagtctctagaactgtgagaaataaatttgttctttataaattacccaacctcaagtattttgttacagcattattaatagctgaagataccagtcttctgtagtttccacagcttttccttctccttccctctcttctcaagtcagagttcactgcagcctccaaagagctccaaaaggcctaccttcctccttttgtggccatctccccacagcaagtggctccagtgggcaggcatatcctactcattccagagcctgccacccactaagtgaagttgctggagacctagcaaggtgccaccacagctccagggcctggctctgggctttgtaagtcccttagctggccccctcccatttgagtgggaacaggagaagcagtggatgccacacatgggaaccacacagggaagaagcgagccggagcacagactatactacacctgctttagggctgctgtaatcacccacgcctggccccgggacacataggaggctgtgattcccatctctccgtgtccctgcctccaagcctgtggctcctgtagtcacctgtcccaattaaccctcctgaagctcttttcttgagaggcccctgggtatgaaacatcattaaggacatatctctcccaggttaaactccccagtgcgaaagagatgctggtctacctttcagctggaaaatctgggacagccaggctgggttagtgggagcaggagctgtgggccctgcctgctcccttagggaagcccaaactaattaatacctggttggcccactcggcaaaataaacacataaaatgaggtggtttaacatcttttttcttcattgatttatttagatttctaaaaggtcacagtcaatttgtttttccactggacagaaacctggaatgagtaaagggttgagagctgcaaatgaattcaactacaaaaacactgggctgtctttaggcgtcaaatgatggcgttacgctctgcatatagagatgaaggagatgcacctcagccttccgggagcttccttgttcacattcagactcaaaggcaactccttagcacctttgatatgcccaggaacagcacagtgattattatacttactcctctcagcaatccccatagggaggtattatgatcatttttatttcacagaggaggagatggagactcagaaagttcactgatttgtctacggtcaagcagccattgggagagttgggctttgaacccaggtctgtgtagctcccaacattgatagtcttattttcataagagatgggtccatctttagtccagtggagattgttgaaagtttttggagaatgcttttttagttttaatttatcacgacaaccctaggaagtaggcatcaaggtccttattttatcactgagaaagtgaaattcagagttatctgccccagcttggaaatcatagtcaagatcagaattaaaaacttttagtttgacctcttggtgatgtgggatggctctctgtagggccatggagggaaaataaggctcctagcgggggtatgcttgatgacaagtccccaggaggcctgcatcccatctaaggacaattctgcaagggctacaatggcctttgtcaccaaatctcatatcaattctgcctctctggcataactgggttctagaaaaaggtcccaaaccattaaaacctttaatgtcccaggataaagttcagactccttcacaaagcaggtcctttaaggtccgccttctggggtctctccaattcagcgctgtacctttgagcccttgtgaatgtctctgaatgtgcagttagactcttctcactgaactgctggttctgcttgggcctggaaggccctgtcccacaggcccactaggcagattcctatgcatctttcatgattccatgtggatcacatttcctctgacattcctctgaacatgtaaagatgctgaatatcattcatcattagggaaatccaaatcaaagccacaatgagataccacttcaaacccgcaaggaaacaaaaaagacattaaaaagtactgaaaaggatgtaaaatgatctctcctttctctacatttctgtggccccctttatgcctacattatagtcttgatcatgtttggtagcaattgtttgtatagagtccaatatccctcatcagattgggtggcccttaggagcagagacccagatggatttctttctgtgtgacccgatactccagggcctggcacaggaaaggagcttcataaatcgttgctgaatgaattaatgaagtgactgctgaataaatgaatggccacaattcaaaactctcttttagacatgttcagggactcacatcattatctttactgcagagaaactgctggcttccagggtgcaatctcatactcttgcttctctgttctaaccaatttcagccagtaacattctttcctcatttttacgtgttaaaaaacaacaaaaacaaacacttgattcttttgttaacctgaatggcaagctattaatacttgtggatattttgattttctaggaggacaggatggattccaggggagataatggtgtaagcattggtcttgttcagcatgtggtccagaggccaatctcttatctgttatgaaggagaaagttttgcttcaatggagtatttattcaggcatttgtgtggaaatatttaaaattggaaaaaaaaaaactgcaggaaaaaggcaggaattatagcattctgtcccaggctgggtccccagtattaagcaccttgcctggcataatggccagagactcactgccctgcccgtaaggaaattttcaggcttcactgcagtgttgtttctggcatttgtaggatgttgttgttgttgtttttctgacacaagcacatgataaggcatgactattagctgtagtaagccttgttcttatcaccaccttttaaagttttccaaaatacagtcaagattaacacaaattctttataaaactcttacaagaaatacaaaaggagggaatccttccaactcattctatgagaccagcattattctgatagtaaaatcagacaaagacatcacacacacacaaacacacacacacacacacacacacacacacacacacaagtacagatgaatatctcccaaaaatagaaaaatacaaatttttataaaaatataaaaatcttcaataagataacattaaattgaatccaacaacacgtaaaaagaactatacaccatgaccaagtgggatttattaaggaattcaaggtcggtttaacatacaaaaaccaatcaatgtaatagaccacattaagaccataaaagacaaaaaccacacgattatgtcattagacatggaaaaagcacttcacaaaatctaacatccttttgtgacaaaaaaacccaacaaactataaatagaagaaatacttaacttgatagaggtcatctacaaaaaactcacatctaacattctacttaatggtgaaagactaaaagctttccccctaagattagaaacaaggcaaggtgactgctctcatcacttctttgaatactgtactggaggttctaaccaggaaaattagttaacaaaaagaaataaagacattcagattggagaaacgaagaaataaaactatctctactcatcaataacaaggtcttatatatagaaaatcctaaggaatccacaaaagagctattagaataaacaagttcagcaagtttgaaggataccagatcaatgtacaatcagttgtatttctatacactagcaatgaacaatccaaaaatgcaatcaagaaaataattccatttataatagcatcaaaaaggataaagtatttaagaataaatttaaaaaaagaagtgaaagacttgtatactaaatattataaaacagattaaaaagaaattaaagccgccttgaataaatgggaagatatctcatgtttgtggattgggagatttaatattgtttggataaaaatattccccaaatttatttatagatttaatgtattccctaccaaaatctcagctggattctcttttgtagaaatttactagtgtatcctgaactttatatggaaatgcaaggaacacagaatattcacataatccttaaaaagaagaacaacgttggaggaaccccacatctcaatgtcaaaatttactacgaagctacagtattcaagataatgtggtactggcatatgagtagatatatagatcaatggaatcaaatttagagtcttgaaataaaccctcacatttatagtcatttgatttttgacaagagtaccaagacaattcaataagaaagtcttgtcaggaaatgatgccaagataactgaatatccacatgcgaaagaatgaagtttgctccagacctcacacaaaatacaaggattaactcaaagtggatcatagatccatgtgtaaatctaaaaatataaaactcttaagagaaaacaggaataaattctcattactttagattaagctatggtttcttagatgtgacaccaaaagcacaagtgacaaaagaaaaaatgtagatacattggactctttcaaaatgaaaaagttttgttcttcaaagaacattatcaagagagtaaaaagataactcacagaatgggaaaaaaattgcaaatcatatatcagacaattgtatccagaatatataaagaactcttataactcaacaataaacaacataaaacccaaattaaaaaataggcaaaggacttgaataaatatttctccaaagaagacaagaaaaaattgccataagaacatgtaaagatggtgaatattggccaggcacggtggctcacgcctgtaatcccagcatactttgggaggcagaggtgggcagatcacgaggtcaagagatcaagaccatcctggccaacatggtgaaaccccgtctctactaaaaatacaaaaattagctgggcatggtggtgggcatctgtagtcccagctacttgggaggatgaggcaggagaattgctttaacctgggaggcagaggttgcagtgagccaagatcttgtcactgcactctagcctggcaacagagaaagactcagtttcaaaaaaataaataaataaaaaaaaagagagatgctgagtatcattcatcattagggaaatccaaatcaaagccacaataacataccacttcaaacccacaaggaaataaaaaagacataaaaagtattgaaaaggatgtaaaaaaattggaaatgtcatacattgctggtggtattgtgaaatggcgtagctatatttgaaaataggttggcagttgctaaaaatgttaatcatagtgttgccatatgacctagcaatatcactgctagatatataccccaaagaactgaaatttatgtccacataaaaacttgtccatgaatgttcatagcatcattattcataatagttaaaaatggaaataaccctaatgcccatcaactgataaatggataaacaaaatgtggtatgtgtgtgtgtgtgtgtgggtgggtatgggtgttggtgtatcaagaataaagtattgattcatgcctaacatggataaaccttgaagacattatgctaagtgaaaaaaaccaaaaaaaaaacagacacaaaggcaacatcttgtatgattccatttatataaaatgttcagaacaggcaagtccataaagagggagaaagtagattagtggagtggttggcaagggctagggggagcagggtatggggaatgactgctaatgagcaaagggtttcttttttggggtgatgaaatgttctaaagttagattgtggtgatggttgcacaactctgtgaatagactaaaaaaatactgaaatgttactttaaaagggtaaattttatagcacgtgaattatatctcaataatgctgctacagaaaacgtatgcaagaaagaggctatagggaatgtggaaaaaatggaaacagctgatttgctagaagtggtgcaatgaaaggtgattgtatttctgttttcttttattattgtttccatgttgtttgcacaataataatgtgaaaaaaagagaaagggagcgagagaaaatgaagtagagaatatgagcactcgctctggagtccaggagtctaaggccatcatcccttgctctactagttactatgtattctgggtaagtggcttcacgtttgacctcaatttttgttttctataagtagaaataggatgggcacggtggctcatacctgtaattctagcactttgggaggtggaggtgggggggatcacctgaggtcagaagtttgagaccagcctggccaacatggtgaaaccccgtctctactaaaaaatccaaaaaaaaaaaaaaaaaaaattagctgggtgtggtggtggacacctgtaatcccagctgcttgggaggctgaggcaggagaattgattgaacccaggaggcagaggttgcagtgagccagaatcgtgccacggcactccagcctgggcaacaagagcgaaactccgtctcaaaaaaaaaatttttttttaaatagaagtggaaataacacaaacctttaggactggcgtgaggattacataagcagatatgaagcaggtactcatcattctaattttctttcatcttcatttatttcctcaaacaattatggagcatctattacataattgggaaatagatgaattaagattggacctcattcttaaacatcttagaatttagagaggaaaacaaacacataaataaattttaaaagttcatcaggaaacttgatagccacaaatagcatgttggataagctgtctgcatagaccacatacattcaggaacttgtgttgggagctattggtgaaggggccagaccaagaaataaaaactcgtaggagatagaattttacatttgcatatgtttgttgcgaagtgtgctttcatgtgtattatcacatgcaattctcagagaatgctactaaggaaagtagtattgccctactttataaacgagaagactaagtcttggagggatcatgagagtgttctcgttttataaaaccagcacatggggcaggatgactttcactctgccctggtggcctcttctgaacattcttggttacatgccattagaaaggaagatggaataggtgaagtaccagaaaatgaagaggaatcttctccacatcatggctggtagaaagtattgggtacggaacctagtctcctcagggtccagtgagaaagcgtgccagatgatgacccccagacccatccagccctgggtcatccaacaaagatttaatgtagtccttgagaaaatatccatgttctgtagatcatgaatgtctagtaaacacttctccagagacctcactaagtaatgagttgggggtgaggaagggaaacatccatcatttatagagcacctatattatactcctggttccccaacaagtagggtgcttgatgcattataatggccattttcaacactgacactgaggtaacactgaggaccagaaaggtcaagtgactgtctaagatcacatagcaaatctgtagcaaaaaagagagtgaggactcaaatcagcccatcttttcactcatcatgaggattctagattcttccctaggcaaaaaagtaattgtctcaagggcagagggtattatcaacaaactgtcagagctcagaagtcacactgcatcaggaagctgtggggcccatgtctgctatttaagcaacaccaaaaacacatcagcccacaccttaagggtgaaggagtgggatgcttagctgaatatctggtacagaataggggcctcagtgggaaccccaacagcctaattgatctttggtttcaatggaactggccctcagctaaaagcaaaagacctctctaccaaatacctcttccttgaaggagaaggatggtagatataggcacaggcattcagcacagaaacccaggttggtccccttgtgaaactgctaggcttttggcacctggccagctggactggccacagttctcatttatcaaaagccataaccagccctttacttggcttcagtgtctccccaacccttagaccctgactgtgagtttgtgatcccaaagtctccttaccactggaatatcttcagaagtaaatgaaacagtaagctagtagacttaaaagccaggctgtgcctagcactctatactctgttcagtgaaagcagaaatgtccccagctcacccactggggtgaagtaactcttatcactctgcagttattcacaatgacctgtgggattgaaaatcaaactatgtaggcttctccgctgattccacagggaactctggcaaagctcagtaaagagaatctggattcatgaagagatcatcccaacaaatatttcaaaggtacggaagaaagagcacaggctttgggagacaacagacctacgataaatcccagcttatcttcagatccatgataacacccggctccgtctcttgcaagacgttacatcttctgaaagcatcttgagagagctaagtgtcagcttctttcctggctaatgtgaatgtaatttgctgtttgtatggaggctagagaggctaagcaggtggacagatttagtggatgattggaaatataaaactagggggaaggagggatgtctaaggtgggctgctggttgaaataagaatgggtgagatgacaagatagtgtgtggtaaattaaaaaagagaaaaaaaaaatgaaccatagggaaaactgcatttactagggtaaggggaaaataagtcagagcttggatgaagtgtggtgagaggccatcataaggaaaaataagagaaaatcttgtctcccaggagacgtacagggaattgtctaaggtttgccaactgtttgatcttgaaagagcaatcataacactcaagacttattatgacaccatcaataaatgtttcctacacgtgtagagggcaaaggtagcaaataggatcctttttcatgagcaaattccagatgattgataatgtttatccaaagtattgtgtttgaaaaaattctgagccctcatctgaatgcagtggtaaagagttgtttcaacagtggtgtttgcaggggagtgggagaaaagaatggcagcccacaggccaaatgtagttaatgctgtgatgtgccaccctgactaccttctttgggactgagacactcattcctccagctgcagggactgttgctgttggctgctgacaggtatcagttgagtctccaggaatggccttcagcccaagagagctgtcacctgtgggcagtccacagctgtcactgcagtgggcaacaaggccaactccctttggctcaatgtgagacatctgaagaccatcccagctccagagttccctgtggaatcagctgacatttttgctgtgattgctttgcagctcaactcctccctttcttcccttactcccttacaggtgctgatcctaagagcatgctccaataaactttctgcatgcaaatctctgtcctagagtctggttctggcgaattcaacctactacatcaagtatttgccattcctgcacaaactatacctctctctgcttagctaatagcttgtcatctatgtttacttactcctcaacaaaggaagactcaacgttaaccaaggggaataatttgtaatccattagctttctctttttcccttggtggcaaggtaattcaaagataagttatcaattctttcttctcttttgcctaggttagaggtaagtttctaccttttttctttctttttctttttctttttttttaagtagagatggggttttgccatgttagccaggcgggtcttgaactcctgacctcaggtgatccgcccacctcagcctcccaaagggttgggattacaggcatgagccactgctcccagcagtttctactttagttaggcttggaggctctctaatctataaatgatgggttggctctattcctctcattctcagtcagttctcctcccagcctccaactctagaagagatagcatttatccgtgactcactttttaaaatcattttagatcaaaggtgtcagtaggaggatgaagaatatgtgctaataactctcattggcataatgctttcaatttatatgtatgtaatattttataaacatagcaactctttaaggttattgttatttcttttgagcaaaaggaagagaaaggctaaatgatttcccaagtcacctagaagacttattgcagaacctagactagaatctgggttttttggcatccgatcaatccagtcacaggcagaaagtgtctacctctgctgctttcttagaaatcagtgtgtgatttctagaaaacaatggaagtggcttgggaactcccctcaccatcgctccctttgtaccactgcagtatccagggatctcggtggtgatcagatcctggaacaagcactgatgagcatcctgtaatccagaagatgatctaaccatccagtgctagaatccctgataccaccacaacaaatgactgtcttcttcctctttggaccattttattgatgggaaactcattattgagaaagtggcttattctgtgttccctcatctgtgcaactggaatgacaccaaacagggaaagatgtgacatttaaatgggagaatgaatgcaaagtacatagtaggtactcataaggaatcctcccagaaaagctggcacatcctgctcatttagagctgtttgtttgtaaaggcacagctgagtgaatctgggagccaggtccacaggcaggcaatgaagcatgctatctgcctcctgaagagacatgccaggggctgggatggaaaagacaaactccagctttcagatctgccactgcaagaaaaccagggtttttgctgtggtggctctgggtggagtggtgatggtggtgggggcagatgggcagtaaacaaatagccaaaccccacatagccatgtggattggtgacatccaggtgactctgtgaccctaggatgcacggggaagcacagaaaacccttctcaaagacaaaaaactgctttagttctgtgtagcagtggcttgaaggttgatcactggtatgatgtgcctaagttaggatgcagctggcatggaacagcacggttttcctctgtccaaagaaggtttgcaaacaagagtaaaattcaaaacatttaataattgctgtggtacaggcacactgccaatgagaatggagatcagctacaaccaaacagcatggtcatgggggggtgtgccagccaaacatccaccctagcaacaaggaagcccaccctgcaaacagggagaagaggatctgcagggtgggggcctagaagtcagcagaaaatctgcctatctcctatggaaatcccagagaggatttcattaacctctcagggctctgcagagcatgatttaaaagccattgctgggccgagggggtggaagtggggaagtaagtgccttcagtgtccagcttccaggcgcagtattattactccagtgtacagggccagcctccaaaagggcaaagccctggttccacccaaagacaagtccatgaaggctctgacaggtcatcatgctgttaatcagcatacttctccctctgccaatgagtattcatatgtagtctccccaagcacttgttcctgttctagcttttatagatgagggcactagcacccctcactgcagtcccaggacttagaacacagccttgattcatgcaaattgagccctggtgctggcaggagtcagggatcagaatcctagtcctgcccaggtcgtccagagccactccaagcccctctctttcccagctcatatgtgtctcccagctgctgatctttcactaagagcacatgttgctgctaccttctggatgaagtcacaaggggtcaattatcttgcagcaatgaaaccggcatactgtttcttcagcttgcataagatgaagctccacatgatgaaacaagtcaacggtccatgaggtcttggggaaggcactagaagcaaaagccctcccttgagagcaatgcaccaagacctcccctttctcctgccctcgaccaccaatgagcatgctgtagtggacttgccaaactcaagaaatactcacagtaaatgccactgaaacatttccccactgttttccatggagctcaaacgactgtacctcttgaggctgattttgcccctacttgtgtcttacaaattgggtttgttccccaggaagtcacccttttcttgctaattctatcagtggcttttcatgctgtctttcatacataactacagcttcctagccttcaccagctttgtctcttctaaatggaaacctctcatagccctgcattagaaggcaatggatttgaatggtagcttcccagtaattctctgaaggggccatgggcatcggctgtggctagggcacatgcaggaacacctgcaggaggccagtatatctgggtgagacattaagcaccaagctttcatgtcagtcaagctgggtcccattcccagctcagccacttaccagctatgcaacctgggaaagttattcaaaactctttaaggtcttttctttagtgtaaaatggctttaataatagtatctatcttatagggttgctttgagaattaaaataatatatataaggcacttagcactatgcttagcaaatagccatgtagccattttcaatattgttagtcattcacttatcaatcagttgctataaaccctgtaccctgttaaaggctgagactcccagtttctgccctcagaaacctcacagtccaatgggaaaggaccacaggagaaccagcagttaggatgcaggatggtaagtactttattaataatcactttttaaaacactatcactaatgggtgacaaccattttttgctagccactgtgtgctacatgctttatgtaagtcaagtacataatctttctagtctaaatatgtgagttcaaatcccagcattaccactgaataattatgaaatctttggcatatttattaactctttgacacttggttattcatcttgtaaataggtacagaagtcagaaaaagtaggatgggcacggtgggtcacacttggcaacatagtgaaaccccatctctactaaaaataaaacaattagccaggcatggtggtatatgcctgtggtcctagctacttgggaggctgaggcaggaagatcacttgagcccagacgtttgaggctgcagtgagctgtgatcacattattgtgctccagcctgggtgacagagcaaaacactgtcccttaaaaaaaaaaaagaaaaaaaaaaagaaaaaaaagtgttagggaaaaattgtatgtaagatgtcaccagagtgtcttgtatatggtaggtgcttcataaatgtctgttggctagagttgaagtgcagcgactaaggggtgtttggaaaatgcatgcgagatggctattgttcctcacccctagagagtctgtctgggtggctttgaaggcccaggcaacatgtccacctaggctgtgaggcaggactctgatgctcaatggcttacccggtttggaccccgttctgagccaatgactgcagccacagggaccagaggctagcacaccaatggggtttctggcaagaaccaggcagaatgttctaaatagggcaggccctctaggaccaaggtagataatgggcatggacctgtaggcagaaagaggttctgagctctcccaggcatccccagttttgcataccttgacctcacatcattgccaggatggcttatgctgtctccaggtcaggccttcaggggctcacagtaggcaagtcacatcatatttctctttgtcccagagagagcaatcctagtcctgtctttaatgcatggctaatgaaataatcaaatacaaaagaaccttgcaaaatataaagtactacaaaaataaggcattatcattactgacatcattactactactactgctgctacaattacagctactaatgaccactatgatttgtcagtctctatgtgtcacttatactttatggataatcacaaatcatccctaaagcctatttaggtaaatgatgaagaaattgaggctgaaagaaacaaggctactaccagccccgttattgactttacctgaatttgaaaaagatgtctcttcttctgggcagatgtagcccctctgggacacatggcttggcaggtggaatgcaggctggtttttagcctccactagcccttgaataagcaggcttgtgcaggacacaccctcaacatcagttttctgcaatctcacagagaatgtgagtaggctcgttcagtaagaagctaagttgggggccaggcgcggtggcttgtgcctgtaatcccagcactttgggaggatgaggtgggcaaatcatctgagatcaggagtttgagacaagcctggccaacatggtgaaaccctgtctctactaaaaatacaaaaattagctgggggtggtggcggttgcatgtaatcccagctgcttgggaggctgaggcaggagaatcgtttgaacctgggaggtagaggttgcagtgagccaagaacccatcactgcactccagcctgggtgacaagagtgaaactctgtctcaaaaaaaaaagaagctaagtcaagagttacatgcaggtgtgttccattatacaaagcatgggtactccaaatgggcatttgctgcctggagccagcatcttctatgtagaccacaaacactggctggccctctgcacactcatccctgtgctgctactgtgggatgcacaaggatgacgcagacaggagcccataccccagggagtgcattgcctctgagaagcagcagaggtactcctgctcagaacacaccagccccagaactgagacggtgcccagagaggaacaaaaacgcacaaacccagtcctgtttaggcgaatgaacattcttgtagcagggcttgataagcctgttgctaagcctacctttcttcctgtcactgagcacctggctcttggctcaggaaagataatcactctgggaaccagctctcctcaggagacctggcagaatgctggcagtccagagcaaaacctgcctttcaacagagcttcgcctcctcccatgtcagacaaggggaaactcaacctgtaaaggaaagggtttgcacacacacaattctgctgagagcctgcagtagtaagtgacccccgccccgggaaaggaaggagccccagctctcccagctcaaagtgcttcctaaacaaagaccctaagtgtcctgccgcaacaactcaagacatgggacactcaggttccaggagcacctgcagctatcatctgtcagtcctgacaccagcactgtctgtgctgaggttgaagcaaagagatcagacaagcactggggtgggagtgggggctgcagagggcaggtgaaggggaaaaggctttggagagaccaatatgaatagcaggcatttttgtctgaccccaaagaagagggcaagggagagctgtgatctgagccaagatgaaagagtgattggcctcccctagtaatcaaagagtttaatgaggcttattaaaagcccatttctaggtcttgttgaaaaattacacccgtaagtgttttttttttttaataagaattgcctcccagggattaaacacacacacacacacacacacacacacacacacactcccccaaaatcccataccccacacattcacagtcacattcccacaaaagctgcgtatcatgtacattacagcattctaggtgcatctacatcaaccatggtcataattcgcaacatacacatatattgtaagacagaaaagccagatcactgaggtcattcgtgcaccttttgaaattccagacattgagggaaccctagagcttcatcctcaagaagttgtgatccatataaacaaagagcatagcctctaatccacagcattctctgtgtcttgcctgaggcaagacaactcagcaaaagcagaagctaccatgcttggagtccaggatcattaagctttggtaaaaaagcagcagttttacagcaaggtcactgcacaagaagggggccggggggctgtgtcactccttccacccatggtgaattctctctgatatgctaaatcccagccacttggtagagccagccctgggcctggagcaggtttcccttggttctcagcttactgcgagctcacagctgccttcactctcaggcggagaaaacattgctttctggaagaatcagctagatgcagaaaagaatcccttgcagaaaattatcccaccaccagagtgctgctaatctccccaacatgatactcactgccaagtggtagaatgcaacaatgaccattcagatgctacaactaccaggtggaacagtctgctgttattagaaacaaatgttttagatttagtaaatctgggtttcaagcctagctctaacccttactcaaggtatggctttggcccactctttcagccatcgttttctcctttgcaaaatggcaggaacaacttccttctacgttatagagttgtgggaaagatcacaaagtacccttcaaactgtataccccaaagcagatgctagaaagtctcataatgagacaataatgggaaaatggaggaactcactgattgggttgtgaactcctcaaaggcctatgtggtatttatcttgttctcagtgcccagcgccgagactgggactaaataccctgggaaaaacagtgtgaaagaaagaaagcagaaagagtgaatctgtgagttaagtggcttgcctaaggtcacagagcaggtcattgcaggacttgagcccagaacgcttgaccacactagtccagagctctctgttcttgacgtaccaaacagttgggtctattgaagggagagtgagtgtcacaacaactgcagcatggaccagttttcaataagccccactattcccagagaaagacccaatgttggccatgtatggcctaaaaggacttcacagactcacctgttaaacatgtcaactccacactgggagcaaacagaagccacaagtgcaagtaatactcaaatgcctcaaactggctcatcttatttactgactcgtgcaatactgacttgaattgcacaaaacagaaaagtcacaagcctgggacaatgggcctggcaggggttaggttgtgcagactagaagcatatcttgttttgggttcactttcagcatcattacttacctaccgaccaagtgtctgagagatcactagccctctctgattctcagtttttccatctgcaaaacaagaagacaaacacaattaatgccttgagatcgctggactaaaacgcatcatcggttttatgcctggaattggttaccaactacttatgattccaggtaactgggaaaactgtgagtggtcaggggctgcaaaataactaaaaaatgaagtgcaataataaattacgcatgataattaatagttatgtgtcaagcaggacgctcgctgatggtgcccaactctcagcacagaaaattcagccttccaatcatttgggcactttttatttttcatagatgtcaaaatataaaagaccattaaaaataccaggagaaataaagcaaagaaaagggccacaatctcaacacattcatgtccaacaatttgggcttttttttttcttttttttttccttctatacatagagtttaccatttttcagagcagaggctatcaagatatcccatattaaaaagcaccacgccagtcatgattttcctctcttgccacctgtgttaggccgtgacagttgaccattgcccttattaactcattttccttcccatccttttcatcagtttctccaaggcctttccaggtgtgtggtcaggtctctgacaggcactgtccatacctgagcccagaagagtgagaagtgagcaacttttggagccctcagactggtctttccctagtctaggttcagttacctcatatgaaaaacaggaatcccagcactttgggaggccgaggcgggtggatcatgaggtcaggagatcgagaccatcctggctaacaaggtgaaaccccgtctctactaaaaatacaaaaaattagccgggcgcggtggcgggcgcctgtagtcccagctactcgggaggctgaggcaggagaatggcgtgaacccgggaagcggagcttgcagtgagccgagattgcgccactgcagtccgcagtccggcctgggtgacagagcaagactccgtctcaaaaaaaaaaaaaaaaaaaaaaaaaaagaaaaacagggaaactggaccggctggtcacagataccctttttaacttgaaaaagcaaggctaaggaaaagagaaggaaactcctatatttgagtccctactatgtgacagctattgagctaataatatctacagatatgatttcatgatccttataaccaccctgggagagtttacagggaagaaaactgcagctcagcaaggctcggcgagccgtctaaggcctgatgctgtaattttggtaccccattcatatttttgccatatccatgtgtcacctctactatcatttactaatttttccaaatcaattcatattttttcttaactatatttttaaataattttcaaaaaatgtttctgcagctctctatttctgccctttctctcctatgaaaagcaaccttgcaactaagataggttctgtaacaacgttgctaacagcgtaaaggaatttgtcattaaaaccattcggacaatatctaggaagtcataggtgtgaggtgctgtatccacacacacacacacacacacacatacacacacacatacatacacacacacaatttattaaaataaattagttttggagttgaaagcgctcatccatgtactatgccaactcccagtggtgcccctgctacactttggggagctggtctgaagtccttcaatgcactgtgacttcagaactgaagtctttcatctttcaaagctgaaatcgtaaaaatgcctaacacttagtctatgtcaagaaagtcactagggtcacacagctagtaactgaaggagccgggaccaggcctctgcttgcctgcttctaacccaccccagtgccccaggagcgcactcagtttctgtccccatcctcagaccccagatatgcaattctgtgccatctggccaccaattaagttgttttcaaatccaggcagggtcatcctcttttgttacattgtcctcagcttttccgtaaagtgactagattatatcgatacttatttacattcccaaaagagcgctttggtataaaactgcataatttctaaaaccacattttgaaaatatgaactgaacgtgattctttcttcaacgatccaaaatagtaaccgaggaaatagaaaaggctgataacctaatacccaggaatgccattgccaccgcaaatgagtataaaatcccaacccggtcaggggaagtggaagaaagtggcaaagtgactatactggacactaatcgaagctgttgtctagtgtctttctaaagctctaagcttccatttcctgtcatctggttttaaattaattggcatgaattttttatgaccagagagcaaacaggttgaatgtcccatagaactgggttgggcttgctttctgctgagctccccatttctgcactgaatatgagctacaaactacgcagaaacaggaacacaaatggacccctgactattcattctctgtccaatgacacctcttccaggaaggcttctcccaccaacctgagtcagaattagtaccccctcctctggcttccctcagggcaacacttcttgcagactctgttacactgcagtcatgcagtttgttttctttttttaaaaaaagtattttctttctgactattcactaaatacaataaaaactcacctaacaccatcaatatgattttagatatacttccttttaagcttttttgtatgaatactcacacagacatccacacaatgtacattcagatgctttacaaggtgggatcataccatacaagctaattttaatctctctttaatttagtaaaatagcatgcttttaaatggttatgtagatttataattaatctcctactgatggacacagcattatttctaatttttcactagtgtaaatactctaatatctttgtacatatttcttgtagggttgtttgattatatgcttatactgtattgcttaacattttaaaaaattatagctgctcctcacccgagtgtatcacttgtcattttaccagcagtacatgagcatgccaattcctctcactcccataaatattaggcattagcatactttaaaaaatctctattgatgtgataggtaaatggtacctaattattttaatctgcctctcttgaatatcagttaaacatctttctctcagtttcttggtcatcacactttttctttgggaattgcatgttcgttatgctttactcattttgtgtgttaatctctttccggttgctgcataagggtttgctatttgtcttttaccctgattatttttagcttgcttccagcatgtctaatcacagaaaagggcaccaccagaaatctgggtacctgtttcctaccagaaatctgggtacatgttttgacacccccctgcatgtcactactactcacagccaatcaatcaccaagtcctatcagttctacctcctaaatacaccttgatttggctcctttccctccctctccatctccatgccctcattcatgacaccatcatccctctgggggacttctgcagtggcctcccagtagtctcctacatcttctactccaattctctcaccacctgaagccagaagtattttttaaatgcaaattgggttatcttttctgcctaaaactttctgacactttcctattctactaaagataaaatccaaagtccttcatgtgttccttttcctcacaaggctgcttccagaacctggcttctgtactgctcgggtattgcagatacatccatctgccccacagtctctgtaattgagccacactggccccctttcaggtttgcgaatatcaagaccctgggtgctgctcccttgggctgaaaggttgtttgctttcctctctgcctggctgacccaaatgaactcttcaggcttctcgactccaatgccatctcctctgagaagccctgaacccctaagttaaataagcccctctgactatttactagggtttcctttgcagcacatctcacaactgtacttaagcactgtttggcatggttggtttaatgagaaccaggctgtatgctctatgaatgacatggtttggatccgagtcctcacccaaatctcacgtcgaattgtaatccccaatgccacaggcggggcctagtgaaaggtgattggatcgtggggtggattctcatgaatggtttagcactatcctcttagtactgttctcttgataacgagtgagttctcttggcctcaccccccttgctccctcttcttcctcctgctccagtcatgtgaagtatcggcttcccctttgctttccgccattatggtaagtttcctgaggtctccccagaagcccagcagatgctgtcatgcttcctgtactgcctgcagaatgtgagtcaattaaacctcttttctttataaattacgcagtctcaggtatttctttgtagcagtgcgagaacggactaatacaatcaggacagagacttggtctctcctgtctaccactgtctatccggaatttagcatggtacttggcacattctaggcactcaataaatacttactggattactttctttaaaaatatatattaaaaatatttaaataacctatctacttcaaggatcaagcaatcacctctaggttttcataagaaattaacacaggtcttcacacagaaagcagctccagtgacaaaccagtcctgtcttcaaatgtgcagggtctaatttaagcctattcaagaaggactgttccatttctctccatgtacaaaactcaaagctctggcttgggcaaccacaagtacactagggtgaaagtatctcaagaagtccatgtctcatgcttttctgcagctccttcctctctccaccctatgttttgcctccattcagtgaatgcctcttaagtggacttaatttcaaattatatattatatctaatatagtataccaaattatatctaattcactgccttctctcccaacattttaaaaccaatttgcattattagcattattgacttgatggttgtctatagatcaatacctgtatttatgaatattttctgaagttactttcttgaattgattgttggtcagagaggctcagtacttctctagccacatctcttccctgttccctgagttcaccttgtcctcaattcagcatttagttcaccgaattaactgaaattgtatttccccactttcctatagggtctccaggatgtaagtcagagatcaggctgcggtgtagagccaccatttccttgacctaatttggactcttctcaaactcaccacaaagcaccttaggcataatgatcagttgcatgtaaggtgttgatgccctcactttggtcatcttaggccactaacatactagttcaaggagtagaaggaggtcagcaggtcagatatttgctggggcctattatggagggcttaggaactcactcatgccaaggaggcacaggataagaataaaagctcatttcctgccctggaagaaattgggttttagttgggaagacaagaccaataggcagtaaatggtcttggccttgcctgtgtctgaagcctcctctcttcaagattctgcttcaagattccttttatttaagcatccctctatatagctgaagattccaggaagaggaactggaataactggtgaggtccactaggtctttgttaaatgttgcattggctatggaatcagagtttgggttttacccctggttctatttcctcctctctgggtgaccttgggtggcatatttaacctccctaagcctctgtgttttcatttgaaatgtggggatagtaaaagtacctacccctgggttgctgcagtgcttatgtgtctatgacctagtaaaggctcaacaaatgttggtgaatattattctaattgctagactgtgataatcttagctaacaatgaagtatttactgtgtgccagacattgtcctaagcactttacaaatattaactcatttaacccttataaataattcagtgagttaagtactattatttgcctcgtattatagatagaaactgggggtagtgagaggctaacaaaattgcctgaagtcacaaaataaatgctggagacaggattttgaacccaggaggtttggctccaaaagtcatgctctaaaccattagactatcaatcatcataataatcatttaatgagttactataaattttagttactaataatcatgatttatttttattaatgatggatggctggcctactcaaataggtccccgggcagctagggtgattgggatggggtttgggctggtagcgtgttaagaagccatccaagctcactgaagttcaaaagagtcttccagttccaggcaggaaccaaagatctaaacaggaaaccagggcagaagcccagttgtgtgtgttgggctaatatggtaggagtgggaatggaatatgagatagcctggtaagccctgggtactttgggaaaagggttggaagaagggcatctgaacctccaggcttcacctaccaggagggctgaggcttccactgggtgtctcactgtatcaaggtggactctagggctaagtgggtcacaacctgcaagggaaaggtcccagtaacttggcaaagaagggctagagaaggtgcaagctaatgtcttctttctggaagtctctgctctccctgctcacaaagtcccaggaatcctaaggctcagagatgcttcttgagctggacgtatggctcagagatccttcttgagatggaagtatctactcttgaggtgcgaaagccaatttcaggaaagtctgttgatctaagctgagttgcttgcattgccactggatgtctgagtaaagatgagctctcctccagggaccatggtctgtcaattccagctttatcattaattatcaggccttggatttttccccctggacatccactgctgatcaggtccttgaaacatgctcactttggttttcttcagagtcaaagattttgtcctttctccctccctcttgtttaggtatcatttttgagagcagtcatggtggtgtgaagcaatttaggatgagaacactgtcctgcagccacaggacctcagcctcaacaacctaccaacctaccgtggcttagtggggccaaaagtgaaatcctaatgtattaactggcctccaaagaccagctgtatcctcctctgggtgctctcatcacagctgcctccgctgcaggtgctccccagctgaagacactctgcatcaacttcctttcagagtgagatcgttttctgtgttgtgcagcagaaataacagattttcttatttacctaaaaacatggaaagtctaagaacaatctaagaggttgcctcatactgtcacttcttttcagccaggcccacagaaccatgtgagaaagcctttttaatagaaaaacaaaaacaaggaagtcagctcttcttgaaagagaaacttctccactcagcaactttctactcaccctctttcatttaacaagcaatgttgattgcttactgtgaacgtcagactcagattacaattggtggctgggaagagtgaaaagagcatgggcctgatccatggtcaaatcccagctctggcttatgtaagttgtgtgacactgagaaagttacttaactcctctgagcatcagcttctttatctgcaaagtgaagatctttatgccagcctttcagagctgatgtgagaattagcatttctcaaacatctagctgaggccttcaagtcagtccttaagaatactcactgcttttaccatttctactactaatcatggttaataagacatgctcactgcactaaaaaggtccaaagtgttactggtggatgggaagcctgttatctatagtgggatccagtgaggaagaggtcaactctaccgggatggaatgggcaagacagacttcaagggagactcatgagcacaatcttttcaaaacaaaaggtctgtggcaagaggcttaaaacgtagatacatcctgagaagtacaagctttagaaggagatgcggaacctctgaccgagcacagggactacaaagggctcaggggccagcttctagcaatgcggtcatccaccaaaggcttttaagctgggtaaagagaaggccagatttgtccttgagataatcagtctggctgcattcgagacagactagagggatgaggctaggagggaagctgggacagagctgcagagccgaggctgatctaggcccaaggaaagtgtccctaacttcatttgtgaagccactggtcacccttgccagcaacttctagcagcctggccacagcagcccaaatcctgaaggctgtgggcctggctgcctcagagccgacctgtggagggtcctttcaggaaccaactgcaaaaccatccacccaagctgttcctctctgactctgctggcgcaggggctcctctgcttcaggccctctgatccctgcaccactcaagtctggagccacggacagggtgactgggctgctgccctagcctgtaccagtccaattaattcaattccatgcagttaaatgatgtttttgtgtggatcctgtgctcatctttgagggttgtatgacactgtaagagacaaggcacacgagctttatggtaaaagagacacagctgttctgtaacccaaagctgagtgctggaaaatgctcaagagagggctgagtgacagtgttccactcagggatatgggagacagggccagggatcctccttggcagcatcagaaaagctttatagaagaggagcacacttgcctgggcctggagactaagaaggcccttgatagtcaaaggatgagaaaggggcatttaggccgagggaaggtgtgtggggaaagtgctgttgcctgtggtggctagaccacagtaaggaaaggaggtgagagaagaccagggcaagataggtgggctgaggtcgtgctgggaagggcctgaggtcactttctattttcttccctaaggcaagaaatggtcacataaggagcaagacagtaattttcattcagtaccaactatgcccctggtagtgtgcattatatgaactctacatgcacacatttagtctgcattttataaccatcctcagaagcaaatattatcaccatgcccatttacaaccaaagaaaccaaggcttagagggattatgtggcctacctgaggctgctgaggcagaaatggaactcaaattatgcattccagcccaatgatgccccctctgtacaataccaactccctaaatggtggaggcagatgtatgtccttcattcaaacagccaagaaaacctagactcatcatcaccaccactgctgccatagtcgtggactccaaattttatttcgtaagggagaaaatgtaccagatgtgcctctttgtaaaaggatcttttaagattcctgaggatatatgtttaagtaaaatcaaccactatcagaccacctgtgctcactgatgacttaccatgtgcaaggtgcttccactccatgttcataataaccatcacaacaaccctataaagtcggttttactcccccagttttatagttgaggacatggaggctcagagaggcaatgtgaattgccccagatgcagagtggcagcgggaactagaagcacgtgttgtggtgcttgggcccacctgttcacctcaaactcagagcgccaacaacccaatcctcaccgtttctctccaaagggtcctcttctgctgatccccatctcaataagtgatgccaccttccaccggccgcacaagctagaaacctaggtcactcctgacaccgctctctcctgcactgaaccccctagatctaagccatctttgagtcctgctggttctaactcctcaatctctcccaattctgtccacttctcaccatctctgtttctactaccctattcaagccatagtcatctctcaactgagcttccacaatggcctcccaaccagtctccctgcactcgtcctcatagaagatgtgaccccagccctggtgacaggccccagcatggctcagccactctcagcagccccatttccttttgctcgccattctttcctttcctcaaacactccattctgcgtgaccctgggctttttgctctctctgtgtctcagctgccttctctgcaaaagaacaagaattgcccaggccccccagatccaagattccccaccaaggatcttccaggtggggaggatgaaaactgagaggatatggagacctagagatctgagcagcaccgtgctctcccacatgggagacctcaacttggagccaaggccagtgggatggcaggagcctgcactccctctcctcctaccccatcctgggcttctcagacagcttcagccaccaacaattgggagatgttggtctgatgtaactgaatgccaacaaggctgcacagggcccagggaattgcctcagaagctgctactggtaagaaggtggctcaggctgggtggagaggccggaggcagagcttggcactgaatgaggagccacgggcctaatcctcaaggagtctggagtcccaggagtttgggcagcctagagatcaagggccttcgcctttttgtcccatggacctttttgaaacttacaaaccctttctcagagaaatgtttctaaattcataaaatgaaaataagattacaaagaaaaccgattatattcaaatagctatcaaaatgttaaaatgaaaaatttgtgagacagttagatttttcttccttttttttcagtcataacaagatctaacggcaggtctattaactatcataaccgtgaggtagtgatgagtgtaagtgatattttgaggtatctgcaacaactataatgggatacaaaaatatctgattcctcctggtaacaaagtcccagagactgctaatgctattgtggtttattacccatattcacagtgggagaaaatggtaactttcagttattttttcccagccacatgctcacattaccaacctctaattgacagcagtgacctcactttacagaagaggaaacttgaactcccaaaggggcaggggcttgcacagggctacacggcacgttagagttaactcgaggctagcacaggcccctggtgcctcccaggccatgccacccactctgcagagccacctcctgagtgcgagacccacagaacaatcatttcacttctctgggccttagtttcctcacccgtaaaatgggaataaccacacccacttttgcaagctgctgtgaggacggaatgagaaaaggagcaggaaagggccttgttacctggacagtgctctgtacttgggtatatcagtaacaggcaagtaattattatgcactatctgatgagaaaccaaaggatatgaagctcagagtggcaaagcagaatgcctatagagataagataataaggaggggtggggactatggtaaactctagaactcatgcccttctgaaaaaaggagcatccactcaccaccagtggaggatggcgagcctagtgttaacaaatctgactttctaagagatggtggaagtccacatgtttggtaaaatgtccttgtttctatattaaattctttggtattaaaaacagaatgtgagccccaaaacatatctatatgctgtcagtttgcagccccttgggtttacaggtaggcgaatttcattgccttgggaaggaaaagatgaagcaggtcagtgtttttcccatacaggccaagagggtcctcatcccatcctggccctggaggtcagatggggcccatacagggtgggcattcttgtgatagccaccaaggcctcccagacaagaaagttagctacacatttgtgctccagcccttggcttctgggggaccgcctggttttattaataaccctggatcgtgctcatagcacatcaaggtaaacagagacattcccagggtgtgtactgtaggcaattctaacagatgaagaagaagcaggtttccaaatataaatacgaagataagataagcaggcagagatccaagtcggcttcatactgagttgcaggctgtgagccatagacttagagaatcgtggctcactggggctggaaggggccctcatttggaggatagagaaacaggcccagagaaaagacaagacttcccaagattcattagatacttctgatttcttatagcatcggtttcctcacctgaagaagctcacaaatccactcacagtttccagaatgtgtcatcctctccccatcccagtgctgctgcccatgctgttcccccatctctggccatgtcagacttgactgccaagataatctgggtctgcctgtgggagcctgtcctgacccttccaggcagggctggatgtggtgctgctcagcacctcagcccctgtgtctctggctccagcaacacatgccacatggaattaccactgtcggtgtgtctgccactcccaaacccctgacgcagggtcctgccttagccagctcagtctacccagggcccagcacaggccccggcacaaaggaggtactctagaaacagatgccaaatgaaacagaggccaaataaaatgaagaacaatgcctgatgtcagttccctctctcagtggcataaggaggttgcaagcaaagactgccatggaatagctcaccagacaccatcttgatattaagttaacatgtcaaatggtcccaagtctaagataataagactttggcctatcataccaaaggccagccaaaactctgataaggatgatatctatcttgtgaataaaggagagcagcaaaataagttgttttgggggtccaataggtgccaggctctagcctgaatacgcactcatatggcctccctgaattccctagcttctgaagaagatacgatacacctattttagaggtggctgaataacacccatggccagaagaagagaagagaaggcaggactgaatctaagccacataacttcagagttctttccactcaatcaaagttgccctgtagttaacaacgggcagctttcatcctgcctgttctagaccatggcttgtcccaggcatggagcagctgaggcaggggagcttggaataaattatttccccatccccttcactctgagtcctgtttttccagccctgccactgacacaggtctggggcttgggaagaggggatgattatgggggatggctgatgctttctaggaaaagaaataaaatgcaaaaacagagaagcctgaagcccccactcactacagcaactaagtgggtaggagagggttctgttcagccttttttaaaaaataaattattatttaaacattatttacatttctgtgttacccctagaaaactttggtttagagagtgactgcttggagatgaaagtcttcaggttaattcattccttcatcagcctaatactaacgattcaaatagcagcaagatgggacaagacgggtcttggcgaatgtcgtagctaacacaatggaaaccattctgattgctcagagtgtacatagggcatttctagcttctgaccggacaaaatcctgcatccaacaataattagtacactgaattcccccgtatcctaaatggatgaggcagaggcttggagtcagagacaatgaaatctcaaacccacctaacctctctgatccttggtttctgtgcctatgcctcacaggacttctgcgatgacagtgacacaggtcaggtagctagcacagtgtctgcccattaagtgctggtctccctggttccctatggcactcacctcagagccattggaggctaagtgctgggggcagctggggcattgaggggaacagacacagcggatgtgctacttgtttcctcaggctttgcctccatcgtactttgtgaatcctagtttgcagattgggctgatattttacaagcccacaatatacagttttttatgagtccataaaaatcttcaaagtgaaatcaaatttatgtgcctctttctggtttacagactaaagcccagcccttgagcttaaccttcatgactctcccatgaacctccctcctagtgtgtacatggtggccaccacacacgtctgctcacccttctctagacaggttctgcccatccctgcctctacacctttgctcatgctcttcctcttttggagcaatccaaacccttccaggttctacccctgcccacctgtgtgaaacattgccctgcaacttaagcccttgcagccttcttggaattccgtgatgttcagataaatggccataattttgattttctttttccctgggatggttttatttgcttcagggtcctgaatgagtctctgaactgttcaaggcctccacatactcacaaggaggagagcctccaaggcagggctggtgcggaccctcaccctgctatcttcatgtgaggagttcctcctagccttcaaaacccacaggaagagctccctcctccaggaagcttccctattaagctggccttgttctctcccatctacagctccccacaggactccatctgaatcattctcagaggacatatcacttcctgccgtgtagagtagtcatttatgtggcttgcccctcaacactgtgagccaaggagggaacggactatgtctgctcactgccatggccctggcatccaggaaagggcttgacataagggagatttcagtaaatatttgcctgattcataaaaataattgcaggaaaaaacaggtatataatgcttactatgtaccaggcattattgcaaatgctttgcatgcattagcttacttaataccatacatatattagcatatttaaggtgcacagcctccctatgaaagtatgtcctataatgattcccattcttcagatgaagaagtcaagtcatagagaggtcaggtgacacatccaaggttgagcaagtgacagagcttctgcttgaatccagaccatgttgttctagcaactgtgttcttaaccactgagcaataaataccacctctgaatttattcacctttatagcctcagtgcctagcaaagaaccaggcagctagcaagcactcaattagcatgtgttcccaacacttcttggttggaaggctgccaccagtcgtggtgaggtgcaagatggaatggacacctgcagagtggatccaacccctgccaagcctgccactagcatattctgaagtgggctgttcctttctcttaatgagatgcacaatctccactccacagagccttccctgccagggcaagctactcactccattcttagtagtaagctgacacgggaaggctgtgtgctttgtttccatcaggattcgctgcccacctaattctacattcattaaggcttccaggaaaccccatccctagtcactgtcagaaataatcagcttgtctgtctggtgatgctccctgacctaaaaacggaaggcaaggaagtagatcttgcatcatacttctccgacttcagttgtttttattactctaagacccattttcaggcatgcaacattcacttttcctcagattacaaaatggaagggagtttctagtgtttgagaatgctattccaaagccaagtgaaattaatcctttcacttatttattcccagaccttgtgcaaagggagcagggctgcagacaaagacaactccagctgagggttctgaagattctcatccaggtctccccaacaaagcatgccaaaacacacgcatcagactctcctttcctgccaaaatacatcccatgtcatgttctccaaaaggataagcctttgctaaatcctacacaatcatttccaatgtttgctggtaatggacaccagaaagctagtgaacttcccttagctctaaatacacttgctaataactctttcacagaaagagctccattcctgctgatttcaaggatctggaaatcagactcctaacaaatttcctttgactttgtttcacataatcctgcttctgtctgcttcatgctcttctccaagtgtgttgggtcccagcaggccattgtcctccatgaatgatggcttcagactcaacaaatggcctccatctatcatcaccgagctccagcagtgacaacagaggctcttctgtttccctccgcaagcaggcagagtaatggccctgcctcggactcatctccccactgtcttgggacagatactaagattactggagttctggggaggggagtaaaggcagggccatttccagtttcgatgtgaaatccttctggtctgtggagaccccatttattttctctactccccggtggccaatcctttctcccatccatcctccactctgcagcccaagcctttcttctaaacccgtcattcatctccctgttgagctctgagaatctaatgagataatcatgtttgcaagtacagaatgtgcagagctgttaaggaggactggatttgcagtcatgaaggcctgggttcaaatccagctcagccactttcagaatgtgtggccttgcaagagctacttagcctctccaagcctccgttttctcatctgcaaagtaggaatgataatgcctgcctcgtggtgtcaccatgaaactcaagtgaattataaaggcaatggatactaatcactaagcatagtgcctggcaaacagaaggcatttaactggggctgctgttatttttagaaatgtatgctataataatattaataagaattttatgtcttccctgcaactctagaaaaatggatggtggagataaatgaattgagtttacctgtggtgttgagtcttgctgaccggaagttggggccgggaagcctggtggtgccagttccaaccagctccagcacaaccctggatctagcgcagaccccaacaggggaaaacaagatctacctcacagttctgttgtgagtactcgtggttacacagataaatgtcagtctttggttcccggcatacaataggtgccagagaaagtttggctagtcatattagttacttatttgttagatgctttatgggagtctaggacattttgcaaggtgctagatgacttttggaggaggaagaggaaaaggggtagaaaaggggagtaagacataatccatatactcatggagctcacagggtaatgcagtgattctcagccttggctacacatcacagtcacttagaaaactttaaaaaatattggtgccctggctccatacccagaaactctgatttaactggtctgtgtgaggcctgggtttcagtatttggcagaaacttctcaggtgattctaatgtggccagggccaagaacagctggctgatttttgggaagacataaacacatagatgtttttaataatatatatgcttagggttctaaagagttatgcacagagggtggtaggaacacagatgaaggcacagataacgccttgttatttaagctgagtaatagcgtgggagtaggagtttactagaaaaaaggatctgcgagaagggcattctgagcctttactgtaaggccccaaataaaggcagagctgcagtaagtcaccaggcaggaactggagcaaaccagggcactcaagagggaaatgagaagagctggaatgattctcacgagcagagctccctggatcctgtacctgtcccctactcctcagctggggccctgctcccagaggttcaccgctcaagaccagaaggtcccctctgtgtagaaaagagaaaaagggcattctgcaacatcacatggcccctggaaagttcctttgcttcctcatcaactgttgccacatgtcttgcagagaggtcaaacacagggtgaggcataggtttgttgtttggctgcggataggggagcaggcacaggtttgcctcctgtccatggtgctgaacaatccttgtgctggagaacaggggtgctcaaagtgtggtctgtagacacacggcatcaggatcccatgggagcttgttagacatgcagaatcgtgggtcccacccaggacttacagaatcagaatctgccacttgtcagcatcccaaggtgatttgtgtgtacacattaaagtccaagatgcactgctcaaagccagtgttttgaaactgtaagttgcatccccttcatgagctgtgaaattaacttagaacatccaaaagagaattttgaaagaaaataatgaaataaaatgaaatgcaacggaaaagaataacaaatgttagagttcatcacacttattaggctggtgcaaaagtaattgcactttctgctattacatttaatgcattacttttcctgccattacgtttaatggccgaaactgcagttacttttgcaccaacctaatagtaagagcaagtattgttactctatatatgagtgttctaagcagaacctaaaaagtattcattattaggaattgcattttcaacaatgtctgaaaggcgctgcttgttttttcctaattctgggacactggtgatttttatccagtatctcccaggattctgagacaggagaggaagcagatagtgggagaaatgagggttataggttgatacaaaaaagagaatgaaagatataaaaacagattgagaactgatataaaaaaaagaatgagagagtgatactgagcctccaggaaatgtattcactgagagaacaatggggaaggaaaaatataaacaaggctggtttcgacatcttttaccagttactacaaaagaaacaacagccaaccatagctcaatgattgaatgaatatcaaatgatggaaggaatatgggtacagcttggcgaatgtaggtatggacaagtgagtctgtgtgggctaacaagcgtacccagttgtacagagaagactgggttgagtattactgtctgcagagttactttaaagtgctcttgacttccttttttatttcaatgaaattttgtaacaatttacatcacccttaaaacaagtattgcagtgagtttatatgtttcgatgtatgttgctgatttcatatactgagaattccctaatatttctgatggtttgctcccccagccccaggagcagtggtagaagtgcaggcgggcaggcaagagtgcctgtggattatagtcaatagccctggtgttttgctcctcaccacaggcagatttcttaggtttctcactgcccaccaccaaccaaaaaattcagaggcaaaactctacagaactttggaaagaaataagcagaggtctctttaaaatgcacaaagatgctttgttcgcttcaaggggtgacagaacaaaatgtcaagagtagaagtgactctgtgatttttcttcctttcagaactgggcaatgggagttattaacctcttgccacacgtctgttatttcatttatacaacactgtcctacatttgattctgcctaggaaattggtgtctaatggaagatgacaaaaagaatgacttttaaaataattttcttccaggctagcagtttataaaatactgagctcaatattcccactttgggaaattctccatagagggaatgttatgagacaaaaggtttgttaacactcacacacggtttcagcttcaaggaagacacaactccatgtatccaaacgtgtttgttctacaaaatggcagaatgaagaccagcctatcctccataatgagccatgaagtcagcttggacactttcactttaataaaaaatgaccaagtgatatatctgtaatctataaaggtaattttttctgggaagggggggtcagggcgcagacaggctatctaatttttagggccctgttaagttcctcggaaccctaagttagttgtcatgatgcttgatatgatgagcagagtggctgcctcttactggtagctattatgttcctggacttttatatctttattaaattcatttgacaaacaatagggtgagtattacaatccttattttcagagatcgtaaaatgaaaggtcagagaggttttgtgacctgctcaaggtcatatggcatatcagaatgccacaaacagaatctgaactgcagcatgtctgacctcaaaactccaaccaagttgaccaagagtcaactcattgaactgcctttctgccttagtttcaaacgccccaatgtcccaaaataacctctttcctatgggcttctggctgttttcccaacttggcgctttcatttctccgggtcttgcatctgagtaggctgacatttcccactgcttttgtctgtcactgaggaattgtcctgtgtgggtggatggtcactcacagagaggggtcttctggaagccaactagctttccatggtggcccaaaatgacatgtgtttctctattcagccagtgattgtaagaaacagcctatactcaaagagggagaaattcagtaaaattcagctttgaagctggatttctttaatatcacaatttaagcatttctgacactggttgatgcttagagggaaatagtgcgctctgagaaatgatgatttaaaaatcttgatctgaatacaaagacagtcaatacaaatacagcaacactttccccagggcctaccgtgttccccacactgtgaacaggggggataaaaaggcaccaaggcactatcctaaaccatgacatttacttaccagtgagaaagcaaactcactgaaaattctaactagaattcaagctaggaagagacacatttcagctcaatataatgaaggattttcttcccatcaacatttgtccaaaaacgaaacagccaaccttattaatgaattttacccacagatatgctggtaaatatttgacaactgactttccagaagaggggaaaaaaaaggcttgatttgtagtgtttgctgatttccatggtgtaaatactccaaccatggctggtttcaagctatcaagttgacgtcattgaaggtggagttggaaagagatgagtgataacagccatcatatagcatttccacctatttacctgttttacacaggtaaaatagacatcagtaacctctggggtagagtataatgtagtaaaataaccagaaactggtgagtgtcaagtacttagtccctttgtttttaacataatttaagtgtgaatttatgcaacttaatttttaataatggctgtttaataactagctcacagaattcctgaaaaattaacacttggttctcatgagccagtatgagggtccccaaaactccatagaagaaaactcctctccatgtttgggagaggaagtgggtgatctgactggatggctgtcatggatgtgattccctgtctttaagctggtccaatccagccatcagccacagctatagctgcattatcactgctggtggcacttcagggccaaccatgtgccagtgagagtgctgaaagctttgcctgcattacctcattgatcttgatgaaggccccataaggcagattggaactaacagcaaccccattttacagatgaagaaacggaggcttagacaaattaagtagctagcctagagtcatagaacagtaagtggcagtgttctcgaaatgtttgactccaaatcccttttccttaaaccaggacattacacttatataataagaaatgcagtatagctactggttcatgtacctccattatccttcagtcaaactcatttgtaaagtataaaaaaaagaagacagtctatttccagttacaggtttcggaaaaggaaatctgctcacccttatgaatccagaaacttaaattgaactcagagcacataagggaagtgtttaaatgaacagcatgctcctttttttgtttaataataaacagaaaaaaccctaaaatcttaaatagattcatataaaatcaccatctttgtaagaaaaaatataaagtcaagtatgtgcaacttaatgttgttccaccaaatggatgatcctgggcatgctggaaggactgccagcaacgcgcagcctgatctgaagccttgagtatcgatgctaacagataacaaatgcttttcctttatccagacgatagcaaagggatgagaaatatgagcaaactagatacctaacgtgagcaggacaacattatctctgtgttgaaagatgcaagtgggtactgaagttttgtcccagtacctgccaccaccttctctactgtgcagtgaagaggaggatcccatgctaagccagcagccctccaacctgtccggtcctgaagctccatccctagtccccttagtccacactaggtgaccaccacaactgggcttgtagttggttgacaagattttcttattaggtagaggctctaccagtgattaatttggctgcagtgtacctccctccctccatgtgtttctcacctaccttctactgcagtggaggttcctggcagggcaggagaacatagctcatcgtagagcatggagagcccagagcgcatacgcaaggcacagttcatgggttccccttcctcttcccttctgcaccctctgactcctgaaaacatccccaggagtgaaactggatgcaagcgtttgcactcagtgtttacctgtggaagtttcggtcacccacttaaccaagatccctgagctgtgcatgttagttgctttttcatcatgtctccatagcatggaattactgaggtacagctgcatgatgcaaactatctaaattgtgggcaatggctcctgttgcgacaaacacagggtgtgaggagggctgcccggctttggttggaggaatcttactttaaaatcaatcaaaatagcagttgagaaagaaataatgacgttgtaaattttttacataaatgatgtgacaggtgagttatttctagtcctcacgagcagctcctcagggtaactattgctattccacttcttggatgtggtaaactaagtctcaggaaagttgagaagcttgtccaatgttacactgccagtaaatggcagagccaggttttaaactcatgtttgcttatatccagaacccgcattttagccacattgcaactctgtctacataaaaggggaaaaaataattactaagggcttattctgtgccgataatgatgataagaatgaagataatgataatgataataatgaaaatagctaacacttacatagtgattacagtgctccaggcactgctgaaattcaggttttcaaattctccctatagctttcattttagggatgaggaaattgaggctcagagaggctatacaacctgccaaggccacagggctaaaaactgagctaggtgtctctgcataaatgcttctcttagcatcctcttctcaatcttgacaaaaaggtggaagcatccctgattcacagctgaggaaaccgaggtttggagaaggtaagagatgtgcatttatcctagcaattattctatctcagaagtagaaggaggcctagcttcagggttagtgtaccacttgctggctgtacaacattagacaagtcccttggcctctctgtgcctcagtttactcatgaggacagtgaggggctttaatcaggacatccttcttatctcatccagcctggacacaccaggactcctggataccaaaacaactaatgagatgtttcctacactaacaggaggagaaaagtgctgccttcagactcaacacatgcatcccccaccaccccggctgctacactttcaggcaaataaacagcctcaaacgcttcccaaattgctgcttaatgcttctcctcagagcatgatctcatttatgaatctgcagaaagcgtttacagcaacactgttgatggttcgatgtcccaaatgattcatctgaaaaggtgatgtaaaagagcagcaagaaatcacaggaaagggggagggggctaactacccaattctttctgggaaggaaagaggcagacattaccagaggaagcaggcgatctcagttcaaacaactcgtcactgggtgcctgtgatgactttctgcacaagcaggaaattaccaaaaaaaaaaaaaaaaaaaaaaaagggagagagaacttgggacatgccaaaggggctgacagaatttcacggagcttgttgacatctcaaagcataacaaagatggaaatgctgagtgcaaaacatatctcagagccatccctatcttagctagtttgggtcagacaaaagcttgaggtatcagaagggctacgtatagatctcacattatcaatgactgtttggcctgtccctgtgcattgtgggaatatcaagctacttggaagagaaggcagaggtcagatgcaacagggcagatgaggatgtaccatgtctgggccaaaatgggattacatagggcctggaaatcaatgtgagatcagtttcatgtggaccttctgggactggaattgatgtaaatgacaggaaacagggagggctcaccttgccttaacttccctgcaccacctcctgctacatcccctcttgtgacttactccatatccctatgtcttagtactagcggttccctctgtccagatggcccctctgctgggctccactggcaaagtcttactcttcccttcagctttttcaagtgacacctgactcaggaagcctctttccctatgaggaatggattcagggccatgctaatccacacagctgcacaaggctagaggcttaaaagagccctatgcccggcttaatattctactgttgctgtcattaaattcttaatttttgaaaatgatactctgcattttcactgtgcaatgagtcctgcaaattatgtggctggccctgctcctacccgttgaggctgtggtctcacagcacctcgtaggctcctttagtataggatgtgtcactgttcttagttatttgtctatatctttccaccctgctctagtgccaagaaaagagagagattaaacagttaaaaggaattctacactctccccaaaacacaacacaacaaaaagcaatttggcataaacataaagcaatttggtagtagatgagaaagggaaaaaaaagacaagcaggtaatcaaaattgagctttgaattagtttaattctcttaacatgtagaccttggtttctactgtatattccctagaagtctacaaggacaatgaaatgttattgttcacacaattccatgtttactgcataaaaataaatcaacttctctggagaggcatatttattcttaaaattgagaagagatacaatttctcttgagaatcctcataaaaaggaccttgtaaaccagagggttttaacccagtaccttcacctcctgaaatagtctacaacattcagtgtctcttggggtgaacacagttctggagaaagctccatggctggtgctggattctcaaatgggcctaagactcaaaaagaattaagattcactgtgctgtaatcatgggcactcacagtagatactttgtcataatgacctttaatccaggttaatgtttccacaaagcacagttccacacaacaagtcttattgatttggtactggaaatttgctataatgaaattatttgtgtatgggcccctcttgaggcagacacctttttcttctaaatcctgatcccagaaggcctaacccaacactcaacatataatcagcatatagtaaaattggctaggcagctggatgaaaggacaggtgaataagtgaaccaaacttctaataatctacctgctcttctttctactacagcatgatgaggactgaacacttgctcagaaacgttgacccactctctagctacatatctggtgataattccctgggttgggggactcagcagcaaactgggcctttcccagacccctgagcttcctaaaaaaggtgatgcaccctctaggtcaagacttctcaaggactgtggtggttaattttgtgagtcaacttgattaaactatggtacccaatcgcttggtcaaacactagcctagatgttgctgtgaaggtatttgtggatgtgattaacattcacaatcacctgactttaagtaaagcagattatcttccataatgtgggtagatttcatccaactaggacttaaaagactgagatttcccaaggaagatgcaattctgcctcaaacttcaacttagaaatccttcctgggtttctagcttgcttgccctgcactgcagattttggacttgccagttcctacaatcgtgtgagtcaattccataaaatcaatcaatctatttttctccatccctatacacacacacacacacacacatatatacactgacatacatgcagatacacatacatacataaagctacatatacacagccattgtccttcagtatccttgggggattggttgcaggaacacttcacagataccaagagctgtggatgctcaagtccgttatataaaatggcatagtttttgcatataacctacacacatcttcctgtatacttcaaatcacctatagattatttataatgcctaatataatgtaaatactatatagtttttatactgtattttttactcattatttttattgttgtgttatttcttattccttttcctttatttaaaatttattgttattgtttttagagacagggtctcactctgtcacccaggctggagtgcagtggtgagatcatagctcagtgcagcctcaaactcttaggctcaagcaatcctcctgcctttgtatcccaagtagccaggactataagtacataccactatgcccagctaattaaaaaaaaaatgtagagatcaggtctcgctatgttgaccaggctggttggtctcaaattccttgcctcaagtgatcctcctgccttggctgcacaaaatgctgagattacagacatgagccactgtgcctggcttgtttcttttttcaaatattttttgatccacagttggctgaggaacccatggatgcatggaatccatggatacagatggccaactgtatggatacggatatagatatagatataatcacaaatacacatatatatgtgtatatatatgtagatgtatatatagatatatagagaaagacacattctattggttctgtttccctggagaaccctctacaggggctaagaactcttgattattctgggtagatgacactgctgctgtcccccggaggccatctccatcaagggttcatagcagaggacacagagaatatctaaaagggagtttccagaaccaaaatgagtattataaatcagctgctctgccttaggagtcaggtgaaatggaagtcagaagggaccactcccaagaggcaggccccacctctctgtgccttcagtccctttcagggaaatgccaatggccactcagccagggacaggtttttctgagaaggaggatactgaaaggctctagtggccctcccccatctaccaggattcaaataaattgttggaatattccaacgttggcacgtggaagagagagagagaggaaggatgttttagggaaaggctggcaatggcatcttttagctggctctgcccattcctgagaagtgagttctaacctgggctggaggtgtggggtccccaacgtccacacttttaatgactcttcaagagcagctgacatctagaggcccaacacgggccatacataggctaccttcatcctgtcaagtgcactataaaggaggaatgaccacatccattttgagggaacttggagaagtgaagtggccaatatggaattagaactcacagctgtttgaatgaaaagaccccaaaatttcccctctgccttgtctgctgtttgtgttgtgctctgaaaggaatgccccactggtataaccttggcttcaccagttactagctgtgtgagcatgtgagcatgggcaggtaacacaatgtctccaaacagctgcatcctcccctgtcaaatgcctctctgtcgagattaactgttaactgagatcaggctacccagtactcgctcaggaaggcatttaggcagtgtttattatgagcaaaggctcactgtaggaaagtacccagtacccagtactctacccaggcgctcagtgaacagaggttattgtgatcattttataattcactgggtcaaagatacagatgattcaccagatctctatcatgtctccacgagaacacacccaaatggctccttaaccccagcagtagaagttacaccaccacactctgctgctcctaccatccttaagagagcatgaaacaccagctccatcaggaaatttcgcaccagggtgggagagcagggaaatgtgaaaattaggaaccaaaatcactttgtgaactcattaaacatgagcctgctcgcatctctgcgtgcgtctcctgttcccgctttgggttgcatgcctattattaaccaccacccccagagagcaaacgtgcgccttatcccaggaacatattgtggggtaagagatttcctaatatagtgtgatcaacaagttgtttaaaaagtcccacctctctgaagtagaacctgactcaaaaaccctcttgggccccccgcggcctgcagaatgaagtacaagcttctagacagtcgtggaaggcctttatcataagtccctaaccccctttccccttggcttccatttctcctatacacatcaacccagccctgccaggccacccaaggtcaactcaatgacctttcctacattgaacctttgctcacagtgaacactgcctaaatgccttccttgcctgtatctttgctcctcaagtgctcaagacacttctcaaaggcttccttttctgcaaagcaagcatggactccccattccaaactaacctccccctcgcctaaagacccacagctcctcactcatttgtctcttgcaacacctgttgtattgcatggaaaactgtcactttcttgtatccttccaatatcctcttcctgtcctgctcaccaccagattcaggttggattctccaatagcaaccaggaactaggttgggattaataagcaacctctctcccctgagaatcgccatattctgacacagaaccatgaagcttggtgttccacactcagttcccatttaactgagtctctttgtcccgttccctagagctttttcatgttcatggctgtctcctaagctaggcagacaccttcttttgggaaggaaccaggtctatttatctctgtctccacactccagtgccaggcatatggagcattttggtaaatatctattcaccattatataaattaggaaacagactaacaaatgagtaaaaaagaaagaaaaaacttgatcagaagctccttacgggcagagcctcatctcacttatttttctctctccctttaatgctctggctgcagaaagagctcaattaaatatatggtttgccctgaactgagtgatactcaggacttgattcttaaaacagaacattaatctccagaaatgctcagacatttttcccccagccttagtaaagtgaggttatataagtcagccagaaggtgaagcaaaaagactgtgttgacaattttaagtgccatagaaatagataattttaatggatacagtatttctacaaaaataaaacactataattgagacagtggccccgggtttcatcactagatgatagtgaattttaaatttgaatcaatgaggaaggtctacaagtcaattacctttcatttcactcctttgcaagaaatgaaggtttagggccaatagcaaaagtacattggaaaggaccattttacagtttctcaattcatacatcactaccacaacagatgttctctctaaaagacatccatatttattagctcattgaatttaagtcaatcttaaagttcatagtgagttatgcaacacagtgacttaagtttcattaacattcccattttacagataagaaaactgagtcttagtgacttgtgcatgttgccccaaatcacttatagcgagataaagcagagtcagaattggaaagctttttttttttttttttttttaacctccaagtcctgtaccctttgccccaaaccagacctactaaggaaaccaatggaaaaacatagtggcgaaaagaaatctaagtccagtgatctgaatcctggtacctcagagtcctctgtgggtgtcctgaaagaggcaactccaccattgtcttttaaatgccagtaaaatgggacagtgcctgagaactaaaaattttcaagccctgaccatgaactatgaaaaggaatgtttccagggcacaatttagggaatagatgcgtcagtgcacttaatgacagccccacaacctgatcaagtcccttctgccaccttaagggacccaagggtacataagcatggggagattatttgaaaagcttcctttgaaaggcatctctttcttttgttttctggaagtcaaaacatttctctttcagacccatcctaacatttagccatcagctctattgaagttaagaaaaaggtgaaggaagagaatgaacatttaggctcagtattttgcatagacaatcaccttctctttctatggtcctacttggatgtgatggttctcattcaactaatgaggatgctatggctcagaaagatcaagtgacttacccaggaaccaagaagaaagtggcaggtcttaaactccaacccatgtttttgggtctctaacattgttcttcttccttccccaagctgggaagagagtgctttgtctttgtaaccctcagaagcctcagaaaatcacagcagctggaaagacagagtctgtctctcaggtattgcagactgcccagctgactgcaagaaagcccctctatcctcatgctaagtggcttcttgttcctgtgacagcaaaccccacaactgtgaccctgcagctgccacagggtccagttctgtatgcctggtaagaggcggtggcggtggtggtggcggtgtggggaccgagggaggcggggacacaggaagagtgtgggaagaagcctgtaagcaacgatgtggtggacgaggggatcatcttctacaacgtgcccgcttctgttctgagttggagaactgagggagaaatataacatttactgaacacccactatgtaccatgcctgatgttaagcatgcatatatatatgtaagcacaggtaggtaacatagcacctcacagtttcttcttcttcccagaagaagaaactgaggttcctaggggctcagggacttacccagcattccagagctgatgtagcccaaggctgggctgactccagagattctttggaaataacataaaagtttcccataggaaaagctaccgtctctacaaaactgtccttctagctggcagagaaccatcccaactgacctgtcccagtgaaccatgtgactaggcactgacctcttagacaccattcagaagcagctaagctgttcaaaagccatggagaattctgggcaagtggcagccttcactagatgagcatttttgttttctcctcaatatatttttccttttccctcatggcatgtagatttctgttccgtcgtctccagatctggtgctacctccacagttggcacaagggtaggaatagaagaagttcttcagagcagagctgggttctttaaggattcaaagagactgaggctcagcagtgacgggagaggcctttgctgggaacatcttctcttggagacagactttcattcattcatcaaatatttgctaggcacctccaacatcccaacctcagttactggcaatatagagcttttgttttggtggagagatggcaaattaagcagcaaacataaaagacatgaggagctatgatagaaagtggctttgagcaggagcagaggtaagtagacaggaggacttgtctatgctgggggtggtagtcaaggaagacttctctgagaaggtggtacttggtcgaggatcgagataactagaagaagccagccatgcaaagacctggggcagagcagtcccagcaggagaagcacaaagccccgaggcaggaaggtgtcagctttttccaggaatacgaagaaggccagtgcatcagaggctgggttagcagggaagggaagatgagatcagaagttggcagggcaggtagagtaggctgtgcaggtctcagcaaggagtttggttctcattctgagtgttctgggaagccacgggaaggttttaaagaagggaatgacagcagctgatttacatttgtaaaatatctctccagctgcctggtaaggaatggatcacagaagggtgagcggcaaggctgagcagaacctgctgagaagaggggaaagtggcattgactaaaatggtagaagtggaaataaagagcagtggagagagatccgggcaatggtgtgttgttaagtgcttaatgactggctctctaggggaaaagccctgtttgcctatttccatggtataaacactcttactgtggcagactttaagctagcaacatggcatcactgaaagcagaactgggaagaatggtatacaagcaactcttgaagctggtgtgagctgccaattccagcacacaaccaggttcaggggtagacttgataagccttgctaatggactggccatgggagtgaggaaaatggaagaattgatggggactcctaggactgggacttgagtgatgcgaagcacagagaagccacttcctgaatcgctggcctctgctcagtccctgccttctagaatcctgaaaggcagggggctagggggaaaagcacacccactaggccctgggctctctgagagttgatcacaggccttaatcctccctctttctcacccagcattcagcctggtgcacagacagaacttaataaagggcaaatgcaagaacaaatgagtgacctcagcttcctcatctgtaaaacggaatggccacattaacaccctccaagggtaactgtgagaatcaaatgggaaataatataacagccagcagagtcgagagctatgtggtccacaggcatgacatcaggatccgcaaattaaccctgtgaaattttactatccctcctggcagatgaggaaaggaggttcggagccattaagcaatgtgcccaaacccatccagctaatgtgcagcagagctgggattcaaacagccccagtgtcagatgacattctcagcgcctggggccaccgcagacaaggccaagggctggccagtttctgctttcttaccaggagcaacagagacacgtggggtcatgaggatatgtcggccatccctgcctcaccaagatctgcagatgaaacaacatgaataaagtgaaactcaggcaagagttgggaaccagacgtttccctctcctggccaggaaggagggaaagagaggtcttccctgggggcagaagaggatttgcttgccctctttaggatgaatgattcagagttagagaactgtgtagggacggaggcatggctgccttgctgagaaaagccctggttgtgctcagcataatggcgactgtgttccccttgtggagacgggctgacctgtccctgactgataagtggactttttttttttacccctttgcacagccagcattttttcccagcctgatatagatggaggagcccaggccttggagtaagagtcttgagtttagactccactcccactgctcacagctgtgtgatcctcagctaatggctcatataagcaacctgcacctctgttgttgccttatctgtaaaacaaaggcacaacagagtccttgtctcagtgggttgcagggaggcctgggtggtgctcacagggtgcattaagaggacagctggggcgccaaccacagtgaccatgcctttccactctgtggaggggcatgcccatgctccccaacatctaccggatacagtgtccccaacatctactggatacagtgtaaggagactgtgggaggaaaacaaagagcaggagggaaactcaactcacttctaagtgttatacaaacgtaagtgacacattagctccctctcaccctgggaaggctataaattgtcaagcctaatggccctggtaaatcacagtgcttcctgcaaccccgggcaggggagcctcgcaggggctgagagctcagcctaccagcctctctattcaggtggaggctccagacagcatccttgctttgccatgtaatggctctagttccagcagcctctgctactcatgcagaaaggacacttgttctgaaatcaaagttgtcaaagcctgtcaggttttggtgctcagatgcaccgcagcacaaatctaatcagccagaggagacaatgatttgcattacaagaggatgctttgctttaataataatagatgctgttcaccgagcatgtactcaatgtcaggcacaactctgatcctcacacaacctgtaaagtagttttgattattatccccattttatagcagagaaaactgaaaccagaaaggtgatgaaagttaccagctagaaagcagcagagctgggacatgagccaaggtagcccaatgccagaagccaaaccttcagctatcactccaggctgccatttcagtcccgcagtgcaggagtggtttatttccagattacaggctggaatgtaaggctaaaatcctagaatttagcatgaaagactaaggccacaaaccaaatggcttcagaggccagaaggcaggtctgttctcagtctcagctccatgtggccaggtgaaaatgagggcccagtcatcacatctttcatccttctttgtaattaagttgaacaacttgaactgtcacatgaaatctcttttaaaaaaaaaataaggccaaccttatgccggcccaccgaaatccatctgggggctaattgtggccatggggtagcagtttgcaagctctgctctttgcaacctcacagtttataagcactcttcccatctcacccattgcttcattttgtttggatatccaatgttgttgttcccccacttctcagataaataaactgagactaagagcttaagtagactatatatctttccatgaatgatcattacaaattactgaatattaaggaccttgaatatacagtctgcacctctacgttgtcctggctaagcagctcacaacttctgcttgctcacctcctctggtgccagggatctcactcctatgagagcaatgtgaatcatttttaaattgttctagtctttagaaagtcacctaaacttcaacccgcctgtctcactctgaaactctggaggtatacccaattccccttctacatgacaggatttgtcaaccttcaacagtgaatatagcaggggaacaaggtagaaatttcactgaacacctccaaggcaggaagttcagtgttcagtccttaccatactttttatcactgaatccctagaagagcataacacagcagtcttccctatccccatttgcaaagatgttcggggagactgagtaccatccccaaagtcaaagttaatatatgataaggagaacattcaaaacaaggtctgtcagatttcatggcctgcccattcatccatccatccatctatccatccatccatccaaccaacaaacattcactgagaacctactatgtgccagacactgctctggacactgaaatatagatccaacttcccctctactttgccatcatcttcttttttaggcaaaaatacctggggtctttcatttaatctttatgtggttggtttccacaccattcctctttcccagcttgtttgaatgaacatgtgtcaacatccctattacccagaatggaaagtgatctttgagcagagcccagacaggcatgtggctaggagtgacccatccctaacttagggctctctccttttactgacagagcctatgcacatagtagtttctggcggccttcccacaagcaacttttcaaccaaaaccataacaattgttttcacagctgctgctactaaaccatgtctggtcttcagatattgggtttgaaggcctaagaaaaatgaaactacacctaatatctatgaagccaattgtacgtagtaaagattttatcaacatcttacattttgtattactatttgcattttccagcaattaaaaagtaagactcaaagaggtgaagtgacttgtctacgatcatctagccagtaagtcatggagctgagatgtgagctcaaggctgtctggctctagagcctgttttttccctaatgggtttcacacttgtacctgttcaatttcctctcccttgaaaagggctattgctgtggactattgtctttgatctaataagctgacaacacattctgccttttctagcacacagaatgatcgtctaagtcatctgtagttcatgagaacagcaacaccgagcatggcaaacatcattgactacctaactgggcttgtgggacaaagtaaatggaatgagagccccaacaaaaacaagcaacagaatcaaagagcaggtcccagctgctttccaggtaaagaactgctgctgagcaggtgaatgccttacagtgtcgcatatagtctggcaggactcagctggacctcagagtgggcccatctggagatcctcaatgatgtctctgaatgtgatcaccctggattgaggctgagtgccctgacctaggccaggtgccaggagatgcctgtacatccacagcaagagataccaaagagcaactttcaccgcagccttcaacctagaatttcagtctgcaggctcccctccctgacccaccatttctctattccctgagcactttctaacacagggtcctgcaaaaacctttccatggctgcccagcactgtcagggtaaaatcccattctcacttcatgctgctagaggctcctcacagctgacaggggcatcccttgcctgtctccaaccatcctcaggaaaaaaccctatctgtagcttagcattttgcaagataggttcaaagaaatcctactcctaaaagatagtctaagtgtcctgagacatcagtaagtctaggaaatgctgccaacaatcttatgatcttgaacaatcacaatgaacgttagcatgttgcatatgactgagaaatcctgtcataaagagatctgtttcattttaagcctgaatttcttattctataacagaactcctaatctgaataacacctaagggaaagaggtttggattagtcagtgatgtcaccaacttcccatgatttctttcttgcctttggggtcctgcatcataccgtgccctccaacaaatgtgttattcttctttcgccaccttcaaaacttatattcattcaaagcctagctcagcttacaactcctctgaaaaatattcctgaaaactccaggcttgattttgttcttgccttgataacaacacttatcacagggtttgttacaatcctatttccttttcgagtgggagctcccggaggacagggattgggcctgattgttttctagaagtacaagtgtatggcatagttccaggttgatgtggttcaagctggttctgctacagaacctgacaggtctcccgccaccatgactggggaaagcccccttcccttggcaaggcaacatgatctcaaggcaataactgccatgctcaaagagagccaataggtcacttcagggagattcaaaatagatgccatcctgctacgtcacttggcattgctaggaaacagctagtttgctataaggcaggttgattagcattgcggagaagacataaactaagaaatggctgtatcttctcaagctgcccaaaccatccattggtacatttgtatcaatttttttgcatcaatttcctactcagcttagggggaaaggcaaagtttgaagtcaggattgaagactgcagatccttctcagaagacaccagagtacctctgatgtatgggagtgactctataagcactgagaccagaaagggacaggattaattcatgaggtctgttccacctcagtctttcacataaggcctgtgtgcatcttggctcaggagaagcctagaggggacatggtctgggaaaatgttttgcacaaagaggagagactgccaactcccccgactgagttataggagcccgcagcttgcagtgactaattctgcctgaaagataaggagaggttgcctaggggtctcaaagggtaactgggaatcaccagactagtatgggatgagctcttacagacagcagaccgctccctccctttcaagtgggccatctgggaccacttcctctaagcagctctctttgctgattccctgtctaagctccctgagcagtgtgctagatgctttcatggaggttatcactgtttatagatgaggaagctaaagctcaggggacttgaatccaggcctgactaacacatgtgccatgaagttagctagatctgaactaaatggggaaaaaaaatgtaatttttaatctttgaatattttcccccctccaagatggaagagtgtcttgaggggtgggaaggaggtatggtttagtccatagagcccaaatcatgtagtcagggcatccgattccacatttgctccaccactaactagctgcattgctttgagcaaatccctgtcctcctccaggcctctagcttctgatcggttaaatgggagtaacaagagccatctcgcatacttacttccctaggtattagatgacagaggaaaaagagtattaaatgatagaggtattagatgagagaggaaaaagggtctgttataaaaggtataacagactatgcaatagccagcacatagtaggtgttcagaaagaatcggctggttatgtgcttataagctattaccacaatgcaataaggaatctagagagccaggattgggctccatttgctttctatcactttgggcaaattacttaatctctctaagcctcattacttctatctgtaaaatgggaattacaatgccactttgaaaatattgctatgaacatgcaataattaaggtatgtaaagacccaggcccaaaaggatgtaacatatttgagtttctctctacccccctgccctttttctagaaccattagaaggcagaggcatcctgctagctgtctgtcactcctgctggtcagtggcccaggaggcccccagttgctgggattgggcagtgttcacatcgacatttactgaattgtgccctgcaggatgagacaaactgtaatttccaaggctgagacccagccccactcaggggcacagcatggaaccactttgagaaatccacattcaaggcacagtctccccaggccccagggaaatgcaatagccgaggggacaaggaggttaccaagctaactgttcctgattaaagcaactggcctaaagccagcaaagctagcctttgaaaagtttaagttttgtcagcaactattgcatcttgcatccacgtagcaacttacaatttaccaaagccttctgtaaacagcaatcactcaataaatcctttcaatatacaaggaatcggcctgccagaggctttttagaaaaccccacattacattggtcagggcagactgggaggagcagatgtttgatggcagctgcataacaacattttcttgtaagagaaactgttccatccacagcccagccatgtgtataccatgtgatcgtgcctcaccgtgatcacagctgattaggtcagaagggggtacttgtcccttggaaggtccaacctttggctgtccagtgacctgtgatttgtctcaattaggttcttcctttgaggatttgaaattggaattgaggagcagagactggggtagttaccagaggggagaatagccagaaagggttgctaagagttgtaggttattgagaaggccagggtaggcaggacggaccttcgcaaggtaaagctctgtggaccataacctatgaaaaagcaaaggaaatggggaaactggggaaacagagccacatggactccctggtttctagcaacttccatttttttgttttggtggggccatgctacattggagttctcacctttggactctcaaaaagatctctgagaccttatcacagccatccttgccagagtgggtttctgccccatgccatcgaaggccttgccaaggacaggggcaaagtgggtatcgctatccacactctgcagacaaggaacctgcagctggggtggtacctagacttgctggcatctcacagccagatcagggtccttcctccatggcccctcactgcttttgagactgtgagaagttgtatgactatccaccaagtctcagaggaagagagggtcctgcgcaagcacgtatttgggatgactgcttctcaactgtctcttcccctagaatgtgagtgctgtgaagacaggatcatgccagcttggtgactgctgcacccccacaggctagagcagggcttgccccagaacagatgcttaaatatgtttgtcaaatgaatgattgaatcaattaagcagtcccagcatgttccaaccacaataaaaaccagggaggtttgcatgtcctcacctatagacaacaagaagagctgctgcatctgagattccagattctagtggggcaaattttcatttccttctcccttgggaattgtttctgaaaagcagctgctgtcagcttgggttcaactcccgttcagcactgggaagtaagcagaccatctaatccttgaaacgggatggcccctgactgccacccaaacagcagatttggaattacctcctcagcacctccaagtgacctctgcccttgcccaaattgtccaagggacctgaggtcatcccttccatcactgggcagccagagcaggtggaaagttgactttacactaattgtaacttctttcaccttagccctggctctaggcctgagggtctcacagaagctccccaaactatcctaaatagagtatggaatgaaaaatgttctggaatgcagcctagggagacaagaattccaaattttctgggtgaccttgagccagtcgcttgatattcctgaggccaaaaggcctgaagtctttggctggacctaggttcaaagtcccagctgaaccttggacaagtcacactcacggagcctcagtttcctcaactgtggaggagaatgctgccatccagctgagagtaatgtctgctcagggcatccaaatgggctttgactcaagaccaacatggaagttgagtctactctggagattgactcagttcactttggggctagaaacccaaaggccgagccttgaagcgggagatgatggagctgtgttggcaacgcctgctcaaacctcaaacacaacacagtcacaaagctggggctctgagtgccaggaagatccagcagaaagtggttttccctgtactccaactccagcatcaggagagtggcaggccaagcaggggattgttggacggggctgtcctttggtgtcccattccgtgatccagtgagaaaagaacaacagaatcaataggcagatgacacaagtgcagatgacagaacaccagacaaatcacttgaattctgtgagcataggtcctcatctatagggccggctaggatgcctgctctatctccatcaaagtgttgtcgtggagatcaaacttggtaataggtcaggaaagtcctggtaaactgaaaagtgctgtgtctttgaaaagtatcacactgcacagtttggttgcagttctgcatccttctttattttatgaaccagagccaaggtcaagggcgcctgtgcagagctggcaggcccagcacttgctccctgctcctgtgcatatccctctctccctactattactatggaatcctcatcatcccagtgagatgtgccttattatgcccattttacagatgaagaagctgaggcccagagagaccgagtaacctgctgggtcccatggttaagtgatagctataatcctagggcaagagtcacagggagagaaggaagagacatgaaggagcaagagagggaaaaaaaatgggaaaaatgcaatatcaaaagagaaagatggaggagaaaagggaggagagggaaagagaggaggagggatgaaggagaaagagtaaagaatgagaataaatcagccctgttgggggcacagaggggacagtgtgggaagctgccaagctgctccccgtggttgggtgcaggatgtggggtaggcagaccaggcatgggtgggggccacaggcagccacgtgaggaagtgacaggtcagcagagccattcagctgagctacaaaagccttctgccagggtggtgaaaaaaatattaaacgagacttcctcgagctttagaaattgctgaaataccgaggccgcaatggaagataaagtgtcctacaaagggagcttcgaatggaatcaatttccctggaccaactttcatgtcctattacaagaaattgaaaaattatttcagtggaaatgtcactttgctggtctacctctcctgaagatattgagaaggaaaatggcttccaataaaggggcattgggtcttgtcttccattactggagttgatcctccaggtgctgtgtcttgggagcccagcccagggaggtggggtcagggggagtctggagggcccttctgtcagagctttggtgctggcagagaaggcaaaaaaatggagacaaatgtgacagccccagggaccaccagctcttgatggccagacatacacactacaagctggaaaatgatactcttgaggctggctggactgggctagggtggaatgtcaagatttcctgcacgggacatcataccacagagaggactctggcagctgctgccatagcacacgtttgcttctagagtcacagcataaaaggccttcccgcccatcattccttctctcatatccactttttcccattgccatgaactccttacctttctctatccatggcaggctttccttctatgccttggtgctcttgctttgtttgaaagacccattcctgcacatccatctggcaaactcctactcattcttcaagacccatctgaaatgtgcctccttaggaaatcgtccctgcactccctcccctggtgtggtaggctgaaaaatgagcctccccaccaacaaaaaaaaatacttatgtcctaatccccagagtctataagtatgttaccttacatggtaaaagggactgtgcagaggtgattgagtatcttgagatggggaggttatccaggtgggcccagtgtaattacaagggttcttataagaggacagtgagagactcggagttagtgtaggatctgtgaagcaggaggttggagtgaggctggggagagaccacacaccacagaacgcaggcacctctagaagttgacagaagtgagaaaatggattctccctttggagcctccagaaggaaccagccctgccaacgcctttaccccagcgagactgaggttgaatttccgatctcaggaactataagagaataaacctgtgtagttaggaggcactcagtttgtgggaatgtgtcatagcagcgatgggaaactgagatctgtcagcagggttccctctgcctcctctgggatcccttgcaactccatgcccatgctgcagctcctcatgaccagcacttatccagtgccctccacgtgccatgcctatcctgagtgccacacaggcattatcacactcaatcttactgcaatgcagctgggcaggtactagatccccagtttacagaggaggaaagtgaagagcacagaagtgaagcaacttgacccaagaaagtcatacaggtcatgaacatgacagagctagaacttgaactcagcacacactgtgcagtgattatgtatgtaagcgttggtctcttccaccagaaagtagggtaaaagggtagatgttgggcctccaacaactgtagaatgagcagacctctgaattggggcctctctgtgctctctgagaggttcagtgaattcttgtgtgaaggatgtaaaaaatggaatgtctgcccttggaaactagaacttttcatcaaactagattatttgtaacaatgacctaaagcacattatttcacattctctatgacatttccttatgggtggtgtggtaaagtaggagtccaggacttatagtccagactataataactctgggtgagttccagcaaatataccctaagcctcaatttcttcatctgtaaaatggatataagaatcctactgccagaagaagccctggtgaggacaaaggagaatgtgcacacagaagcattgggtgcaatgtgaatgctgctcttgttctctctgggccatgaacaaagctgtgcagcacactgggtgggtggtctttccccacaatcacagaggacactgagaccccacaggcagctattgcaccccactagaaagtataaagctgcctggcccaagtaccaggggggctgtccaagctctgtgctgccagaatgcagatatggagaggtcattttgggctgacatgaggagagttgaccagagaagccagcctgtgattgtcaaaggtaggtgtgactgcatggaccgcgatgagatgaggagagggcttcgcaatagcgcacatgggtgagcagaggcacggaagagataaagtcccatggggaaggcaggctctgaaaatgtggaacatggactttgtggctaagaccacagagccagtgggcaggaggaggcgaagagggtgggagggatggtggctgggagtacagcgggccacacagaaataaggaactgcgtggcctccctctttcagtctcttgtgtgtctaggagctgaacatccaaggggctccaaacccatcatctaggcaggggttctcagtcctggctgcacagagaatcacttgggggagttctacaaaatcccaatgcccaggctgcactccaaaccacttaactcaaagtcatcaggagtgggacccaggcatgagtattttttgaagcttcctaggtgattccaaagtccaggtgaggctgagaaattctgctctaagcctcagctccagggccaggaagccagcctggcgtcatctggattccagttgggctcattaccttcagcagttctcagtgcagttcccttccccctgcctgcgtccctggcgccctgcagctttgcatgaatgtgatacttcacttcctgtccttgtccaaaactgggcctctggggggtgtttgcacagttgtttgaggataagtccaccacattcatttttctgtggtggctggactgactctccatggcctggtggccctgccctgaagcgtggtgggcttccgaggcactggcacacgcagctcaccctgagcatcagtaagccttctctgcagccaacccctagcatggatagcttgggcacaaggggatgggaatgaggagcttcctcctcctggcccctggaagagggagaagagagcatttactgaccactaagcactctgtgcccagcatgggagcaggtgcttcacatgcattatggttaagtgatccttatcacttttcaccttatgatgcagatatttgaaatcattctattttacagatgagaacacagaggctcaggaaagtgaagcagcttggcctacggtttcacaaatggaaaatgttagagctgggtcacacacagaggtctgctggctccagagcctgagctttggctttcagggtctcagtttctcacttataaaatgggtatgacaaaaaaaatccctccttcacagtgttcttgtgagcattaaaaaagtagcaatgttaacctatataaagcagatagtagagtgttgggaattcagctgatgcttgataaaaatggccctgactcacctttttaaaaaggactccaatgcttaatatggtctaaagaaaatacagtgtagctaagtttaaaaaaaaaaaaaatagtttgagaccagaacattatttccatctccactttcttctctgtgctctctgaaaaacgaacaagcttgttaccagtactaattagttcttgtcctggcacccaatcaacaagatgttgaaggtcagccatctggggtcctttgggtgaactctgagagctgaggcagggctgcttccccaggctcatgcctgggtctgcaggagcctggatctgcaggggcttgtgtctgccacggtggacatccccttagctggcacaaagaacatagatggggtcttggaaatcccagatacttcccagctgcattcacagagatgctgcttttagcatttctccctttcagatatcagtgttttctccctattttaaagcattctcctatcaatgaagcatcccagatcacacaatgaggaactgcattccatctactcccagacctaggtgggacagtgcctggtacacagtaggcacttaataaatatttgttgaataaatgaatgagcatatggaaactcactcatactgcccgagtctcccaatttccaggctaagtactcctgagtttttcaaccattactcacacaggtggcagagggggtgctcaaagcatgaggctttagtgaaccagaggctgagggaagatacgtctcttccctatgggctaggggaggtgaggtgaggaagtcagagaagggagtctgacctgggcatgcactcgctactcgggcagagagggaagagccagagaatgagaaagacacaggcccatgaggagatctcatacccatgaaactgccccagccaagctggtttggagctatggaacttacagaaagagagtacatgacacccccagaaggggtctgcatgcacctgaccaggtagactggcactggagtctttgaaaacaaaacttctctttgaccaacatgcaagagtgcagaccattttgaaagtctcagaatccttccctgtcttcttccatctcatgctgggcccttccttttgacccttccagaatgacaatatttcattttactcaggaaaaaccagcagtgcaaagaaggaagcagagtaatcaggccatctgcccaattttacctaaattttctacctaaattgccaagacaaatatttcaggaaactgcacttggctggaatggttaggcaattcatcttatttaccatctaaatgcacttgagagctgagatagattcactcatgttgtcacttcttagtcagatgcaattcacagtagaaatcgctgccatccaaagcttccataacttcctaagggtaatggattttttttcagcccatctttcttccccactcatatttgcttgagaattccaaatggattctatttactgtaattactgttctaactgcagctcacttgcaatgcatcaggttaatgttaacaagatactcagcggatgctggtaatgtgtattcattgttcaaactctttacccaccccctttggtgttgtctcaattctattctctgaacccaaaggggagggagcaaagccaagaaacacgggtggatttctttctgttttattcttctctaatgtcatgggctttttctcaatggatattcattgttcttgggttttcctattcctgaatttacgtgacattattacaaatgttatgctttgcttaaatactgatttacacacttccctctctcatttttccatgctactagtgtcattaaattccatgttatttgattactaataacaaaaattaacatcaacaaagtcctgacaatttgcaagacacgtttcacctatgtaatctctataacaagcgaaataatggccaagtgtatcaagaggcttaatctctcacttatggggtagtttatattcataatttgaatctacggaaaaagcacactcttcagaggggcaaagactagggttcatattctagtttcaccatttagctgtaggagttcaggtaagcttatctctctgaacttcagtttccttatctgtaaacagacaaaactataacctacttcatacattattgagaagttccttgcaaatcacaggtgcttaataaattatctgttattataccttaccgataatttcaattatctggccacatctgaggacccagcacacacaggtgggaatgtattttaataggacttccaagtgaacagtttttgagctatgaggagcttggagatgagacccttactactcaaagtgtggttcacaaaccatcagcatcattatttgggaacttattgaaatagattctcaggtctttcttcagaaagaaaaatgtgtaattatcacatgtctccatagagttgacagaaaaatagactatcccttcagtcctgacgacctgatctcagtctgaaaagcataagatggctgaagaggagacattcccaaataaaactccgaagtccattctagctcattccactatgcagcagctgtaatcccccagagaacatttgactctcctcctcgcgatgatgatcattaagcatgatgaatacaaatgccatttgttgattcaggtgctaagagtctgagccacacagcttcgatgtcagccggacagtacctcagtgtctgggtaagtctcttctcctttccacctaggttacctcatttataaaatgagaattacaatacctgccttcgggggtgtttgagaattaatgcagacagatgcttatcatgctgtctggcacaccgtaggcactcattttcagctgcagcagcggtagccttaggaatagtaataaacatgtgtttattgaacactcattgaaactgctgcttcaacccccacctcccaccacatacacacgcttattctattacgagtaattagtaattactatttattactgttattgccatctctgcaaaaagatctaccatgtccctgttcccaaagccaagttcttggtgtcagtcacctgctttcattatagggaagcaaaggagagctggagctggaattctaaaaatccgcttcactttccttctcctggtaacttttttgggaaagccacttaagccctgacaatcacactttcctcatctgtaaaatgggcataaaccattttcccccaactgcctcaaggccaaagtgaagagctcagaaaatgaagtatctgaaagtgatttgcaaccatacagtattagttgaacaaatgtaaaagatccctgtgatctctgctttctcttaggtcctgatctcatggttcggggtttctctccttatcccaccaaaccactgcctttgcagaagcctccattaccacacaggtcccctccaagctctatcctgggtttcactttcccctttcagaccaatttgctcatcactagggatgcatcttacttagaaactgttctttcgcttccaaaatcaaaggtggcattattaagggttggggaagagcagtgttttagcttccatgtaaacttcactagtgccagctcccaccaaataaacatgcaggccacgtcaaaaatgtgtctgctacataaataaagcttccaggcaggtccttcagcctcttacccccataccccactagtcaccaccacggtgcctttacactggtcctgtagggagactctagagctgccttataccaaaccctcatggcttcctctgcattttcttaaccattcaaggaactcctaataggccatggacctcaggacaaggctataaggctggctgacttattttccccatgatgaactcaaagatgatggagacccacttgactcactttagggccagggttctttccccactggaggaggtataaggtgggggctcagtgcctccccagggaggacctcattctcttggcactttggtattacactgtttgcagtagggccccgcagacagccacactctccagacatctgtgtgaactttggcaagccgcttctctgctgcttagcatagggacctatgcttccttcagcctccatttccctgtctataaaaacaggaacatgcagctggagtaatgtagtataaatcagatgtttaattatatctatcctctccttttttttttttttttttttttttttttgagacggagtctcgctctgtcgcccagaccggactgcggactgcagtggcgcaatctcggctcactgcaagctccgcttcccgggttcacgccattctcctgcctcagcctccccagtagctgggactacaggcgcccgccaccgcgcccggctaattttttgtatttttagtagagacggggtttcaccttgttagccaggatggtctcgatctccggacctcatgatccacccgcctcggcctcccaaagtgctgggattacaggcgtgagccaccgcgcccggcccctctcacttcttttgataagactcaaggggccccatttcccaggatacctggacaaaaccattttttgagccttttgtgcccaaccatagtcattagtcttttaacagagccatctgttcatttatgtaatagacactgattgaatatctttcacgttctggtataaggctacaccgaggatatagtggtgtgcagtactgccatggtgcccaactgtatggaggtggcactcatagcaaacaccggttgcctcccaaagaacttttccaacacagcagaatctccttcattggtatcccataccaaaacacagggatcatacaagatgcctcagagtcaaaattccagctactgatcacagttaagttttggttctatcacttgctagctatgcaatagttacagacagaatgattgcatcttcacaaaattcattgttgaattaacccccactgtgatggtatttggacactagcctattggaaagtaattagggttagattaggtcatgagggtgagacactcatgatggtattagtggtttcataagaagaggaagagagaaaggccatctgcaagctggggagaaggtcttcagtgggaacccaattggctggcaccttgatcttggacttccaacctccaaaactgtgaaaaataaatgtctgttgtttaagccacccaatttatggtattttgttatggcagcccatgtgaacagtgaccttatcttctctatgcctcagtttcctcatccagaaaatggggataattataatcctatcttacagatttaaaattaggattagatggaatattacaaataaagtgcttcacacagggacttgcccaataaatgatcgtttttatcgaagtgcctaactggaaatgccaatcatagaatgctagagctggaagggatcttgccaagccccttcactgtatggaggaaaggaggctcaaaggggaatggcttgcccaggactacaataccagggtcccgactcctgctttaggtttgttcccctccaccggctggggaaggtctcatccttcctcctatcacatgtctcatccctgacactgagcacacccacttgaaattgtcaccccatttacctggtgagcagctcctatgtgaggttgctaagagatgaggatccatcactgagttccacacctaggaagtctcttaaattaggttgtcagaattcttctttttgaagaaaacccaaatagaaaaaaaagatttcaccgacgtttccttggaaaatgctgtgggaggagttaaaactatgctaaagtgtgcagcagatttataataatagctgaacacctttcatttgctttgccctttgtggtttgcaaagcacatttctacatattgttgagtccccagaatcaatcaatcaatcattccttcgttcataaatacatatttagcactttctatgtagcacacaccattccaggtgccagaggttttgcagtgaataagacagaaaaaaacctctgcttttatggggtttatgctctagcaggcaataaatgcaacacacacatgtacacctacagacaatgttttcagatattggcaggtattgtggaaaaaataaggcagggaaaggggagagagagttaggggacttgttttgagtggccaggaaagctctctctggaatgcaatccaggcagagattattaatattgctgaataaatatctgaaacctcaatttatagatacagaaacacagtccagactcacaaagcagttagatagtagggcctagaggagaattcatactctctctatcccagcctgtgataatgccaagtctcatgtctggatccaggaagccagaccggaggacgaggagagtgcgtggagatcaagttctcgtgtcccattctatcacattgcccacctactatcgcttactgtgtgctggcccatgggctgggcactgggactaatgggataaagcagacatagtccctgccctcaggaaacttccagacgagtgaggaatatcagacaagttcacacataactgtgcctcctgttagaaatcccaagtcttcagaatggggcttcagaacggggctgcttctccagtacacactaagaaaaaggtctccaacctcccagattttcttctttttaatcaacaatcacgaattagctgccaactccatactgaccactgctagggatcacctttgtctttcccacccaggcacctcatacgcaaattccagcaacctctactgctaacaccttagtccgtgctgtcatcatctcttgcccagaatactgtcacagccctctttattttcctttcttggcttttttttttttttttcctgagacagggtcttaccctgtcacctaggctacagtgcagtggcacaatcacagctcactgcagcctcgaacatctggacttcagtgatcctcccatctcagcctcttgagtagctaagactacaggtgtgcaccaccatacctggctaattttttctttttttttttccttggtagagatgggggtctcactgtgtcacccaggctggtctcgaactcctggcctcgagtggtcctctcacctcagcttcccaaagtgctggaattacacgcataagtcaccactcctggccctgtcacagtcttctaacttctaatttctaatgctgctcctgctcccaactaccacgcccttcagggtgttctcaacccagcagtcagagtgattttttaaaaagtgtatcaatcatgtcattcttctgctcagaaccctccaattaccctctatgctctctgagtaaaagctaaatcctcacactggcctccaagattctatgtggcctgacccctcccctacctccctcagacctcactgccttcctactcgcctccttgcttgacctccccggccatactctccttccttttcgctttcttcctgtgcaccagtcatgggcctacctcaaggctgtatacttgctgttgtctgccaggaatgcttttcccgcaggtatttttaaggttttccccctgaaaggagatatcctttaaggctttgttcaaatcttaccctcttttaatttgcaatagacatgccttcctcatcacaaccttccttatttcctggtttttcttcctatcactcttgccttctcatatatggtatcatctactcactgattgtgttgctgtctgccttcccttactagaatgcaagctccacaaggacacagacttttgtctgatttatttagtgtctatcccactgcctgggagagtgcctgccatagaggggatactcagtaaatctttgttgaggccaggaacgttggctcacacctgtaatcccagaactttggaaggctgaggcgggcagatcacttgagatcaggagtttgagaccagcctggccagcatggtgaaacctcatctctactaaaaatacaaaaattagccaggcgtgattggcaggcatctgtaatcccagctactcagaaggctgaggcacaagattgcttgaacccaggaggcgaaggttgcagtgagctgagattgcgccactgcactccagcctgggtgacagagtgagactccatctcaaataaaaaataaaaataaataaataaataaataaatctatctctgtggaataaacatccagaccaatcatcttctccatcccaaacttgtttctcctctgacatcccttttttctgttgagggcatgatcatctacctaatcacttgtgactcagtgcaacagttcaacaagcctagattggagccaaggaggtgaagagccccgtgctgggtgccatggaaacaaatgaaactgggagtcacttctagttcctgatttcctcagccccctcaaatccaaactaaacatcagttttctgatttgtaaaatcaagataataatacctatttcataaaatgaaaagagataacatgtataaaagattcaggaaacatatgtgctgcatagtaaatacctaagaaaaaataattcggctggcactgaattctggagtcttgttcctgaatatctccaaaacatgccaatgtctcaccctttccctgtcctgctgctgccagaatgaattagaaggctggaaggagcagagagcactgagggctaggaaggagaggcatatggttaggggtgaccctgactgccagccagctcttggtttcagctgaatgcctgacccaaacacaatcaccagtcacataggcaagggtaagaccacaaccgtctagagccacagaggctttgggttcccatggagccaagagtgacctcccctctgctgccccaatcatgcccagcccccacccaatagacctgctccttccaaatgggctcctcacaccactgcctgggtgacatcgtgggaacagagagagccacggagcatgactgcctgcagcaaattgatttgtgccagttgctgacagaaggatgtgcatgacccccatggaagattaggagtgggacattcccaacagacaggcctgggcaggcgagagaggcaaggggaaaattctgccccttgctctctttgccggccagctgtggagtcccatagcagcctcctctctggcctctgtgcatttattccaaagggaagaaaaaggagacagagaagaagggaggaagagagcgggagacaaaagggcagacagatgggagacacaaaaagagacgcaacaaattatggtttttgagggctttctgtgcaccaggcccaagttctttcttaagaagtagaaaataaaaaggcagtgtgagggaaagagaggtgagccggagaaagaggcaggggcagaaaaatgacagagacagggacagaaaaatgacagagagacacaggcagacggataccctcattggcaaggctggcaatttatgaacaagatcacttcttaaatgttgggataaagctgtctcccaggtagggggacaggcagggggaaaggatgtagggctctttgggccctaaatacttttaccttatggggcaggaaaacaaagcttaaccagcacgaggcaccaatgagaaatacttgctgagggctggaggaagatggccatctgcctcctggaccagatcgtcattgacattccatgaccttatgtcttagttgaattgagattgttttctttggggggttttccttccctttaaatctatctgataaaacagatcttacagggaaagcccagcttctggttgataatttgtagagagggagagactacatcctgatggtcaagtccaggaaggctttctgacctaagcaatctcatttctggactgtctcttaacgtggtttttggggaaaaaaatagttttcgccttgaacctgacaagccagactctgaactgcttagacttcctaagcctcatctgtcaccccacaaacatgccatcctagaagtgtgacgatctctaatgtatcatggtttacaaatgagtctgaagtgacgcttggtacctgaaaaacacttataatcaatcaagcaaatcagaaaagctgtaaaaatagcttatagcttatatatccactgccaagaaaggctacaaaggatatactcatgatcaaccagccagagatatgtgattaaaatagaagaaaaaggaggaaaaaaaaaaaaaagagggtttaccactggggtcagcaaactcaagcctgcaggccaaatccagttggccaggttttgtttatttatgtagttttattggtacacagccacgtccatttatttgcatagcctctatggctgctttccactataagacagagctgagtcgttgtgacaaaatctagatgacctgcaaaacccaaaatatttactttgtgagtcttacagaagaattttgccaatctttggggcaaaacctagactcaccgcttttcatctgcagaggctaaatgcagacccattgtttatttttgttgtgaccttggtttttgcacttacaaagtcagtttataacattgcccagatagagaataaagttaaaaagtgaaagctacataaaagtccttaacactctgcctggcacatagtaagccctcactgaatggcatccttgtattataaacgttattttaagttgacgttgtttccaggacaggacacggagatcttcggggaaggcagagctggctgatgaaccctacccagtgtcctgattaatgcattacagggaatcttgaaggaagtcaagggaaatgaacatttggtgagtggcactctattgcaagtgcattttatttcatttctttgattctcataaggacttggtgccatttaacaagggagaatggatgtcaaggctcaaagaggtcacacaaagatacaaaaagcctaggaatgcaagcacaggtctgtctgcttcaaagcttaaatttatatttttctctaccttaaaataagtaatgtggttgaaggagctggtgatttttacttagaaaagaaagactcagtggtgacccatcagcctgcctccaaatacttaagtgttcctgtgtaccaaagaggtctgaaatacagtagcttcagaggataaaacaaagaccctcaatccatcccttttctgattatgtgttgctgaaaaattaaagttgcacagatatgtgataattctccctacgtcatatgcaaagaagccccaaaacaataacaaacaaacaaaaaaagaatttgaagtctgaaaagtttaagtctatcctaaagataagctggcatgaataaaataatattctatgtgtgcagtgtgttggtaggttatgaagaatttccatatgtatgattttatttgatgttgtgaacaaatgtgaacctgaaagagctaatccttcaagatggatccctagcggctaactgggtctacatttaaaagagagccaagaagccatttgttgacaagagttccctaaaaaccaaagccaaacctttttaacttttagaatttcagagctcacttgaaccaactagagctcacctgcctttaccaatcagggctcagccatgttgaccaatcaaaactcagcaagtttgaatccttcatttgcatgaacagacttgattgtgaacttaggtgagaacttttgctataaaacttgaaccctcagccagtcatggtgactcacacctgcaatcccagcactttgggaggccgaggcagacagatcacctgaggtcaggagttcaagaccagcctggccaacatggtaaaacctcgtctctactaaaaacacaaaaattagccagccgtggtggtgggcacctgtaatcccagctactcgggaggctgaggcaagagaattgcttgaacctgggaagcagaggttgcagtgaaccgagatcacgccactacactccagcctgggtgacagagcgagactccatctccaaacaaacaaacaaacaaaacaattgaaccctctctgttctctggaacacaccttcttctgtttacaccaaaggccatgtcttcccattatacaaactgttcactggaataaagtctctttccctcaaattccttttcagagaacctttgttcacagtctgcagcaaaatcatgtgagcatggtgagacacatgtcacagcctcccattttacagaagaggaaaactgagactagaaaagtaagtacctcagccaaagtcatatagctagctggctttaatagagctgcagctcacactgacacatgagaccacagtgacaaattacggaacctcagtggaacaaatttatgcaatacagtatttgtcaagatattagaaatgaaaattactctgatcttcttatgggagcacatttcctatcccaggggtttgaggggcccaaggcagaacttctttcatattacttaggtctactgcctcgagggcccacagactcaccccaggcagtagcactgtgagccacccagtggtggatctcatcagtggtcaggatgatgaccatcacctgggcaagatgaatgcaaggtgtaggtgcccatcagcagatccctgccttgcatctggacgtgaatccaaggagaggacctagaacttctctcccttctatatttaaacctcttctgcaagagtgtggggtagtggtcaagaggggagccctggatcaagtccccccaactagttgggtagccttaggcaagtgacaaccttctcctccctcaagttcctcatctactaagaagggatactaattgaatctgcctcctggctggctgtaaggatcaaacaagcacattcatgtgaaatgtttgtcccagtgcctggtgtagagtcatcaccactactactacagcgtggggctaggttacagcacagtttaggagaaagaccacttctggaattgttcaggcttctagcttgactctattctccatttgaccctggttaagccacagaagccctctgggcttacagtttctcctttatcacatggaaataattagccctgtaatatctatctagtggggtcattcagaggatcaagaaagataatagataacgaaagggctttgtaaaaaatggtgttcacaaatgagtcaaggtcattatcatcatcatcatcactattattagtcctaaatgatggaagtgttattgtattgggtaaaaaaaaaaatctgcagaatgattcctattcatttttatatctaatagaataatgccattttttggtcctttgtctttgatctggtgcttgctctcagcaatcgtttccacactatatatccataatgaatattataatatgagagatttcctttttttgatgtctaccatattctagtaagagaatctacttctcagacctcagtatgctgctggagggaattgggtgggaaggtgttatcttaattttaccaacaagaaaaatctgtcccaggccagagaccctcttctcttctttcactctgcccccaacaaaaggctaggagacagagcaaatgaggtgctggtgccacattccacatggtgcgagatgcttcattgagtgactgtgggcagcgtccttttaaatggtccactaaacagggcagtaactggcacatgccttgtctgaggactggagacttacctggaagttcccaaagcaatggcatgatctccaatgctacacattcttttaggttgtccccaaagatgcctgtgttgcagatttggttcagaatatttctccttctgtcctgaggccactttcatagccaactcttacatcagcctgacttgctgtgagagcattctgtttgtaaaacctaacctggggacaatccctatccagttttctagggaatcgcttgaaccattctgaattcacctgggggtgttgtccactcccacctagcattctgccttaatccaactatgatgatgtggggttttgcaaatgtgactttgtcaaaattcctgctcttgaacatggtggtaccccaacctgatcataacccattgactttgcagttctcaaagcatgtttaaaggccaaattttaaacaggcaagtcatattggaagacagtattgcccatagtacagcaggtactaaatcttttcaaaaacaaccaccattcaccaacttcttccaaccttccaaaataaagatgggggagacaaatataattgatgacaatttattttttggttaaatgtatgcctttggttgataacccctaaattatcttgcccacttgtagcaacaactatccaagtgtggcatatgtttataggtaaataaggactgtaaaacataccacaagaacactcaattcctggaacatcaaaacagctcaagtgtatcactatgcattaggctaactgagagatggaaatagattaaatggaatggaaatgtttccactttgaaatattaacgtcgtaattaccatgccctgagctttatttaccatgctctagggctaccccccaaaatatcactcctttacaacactctcctcctaaaggcttctgggctctggtaaaatcagggctatcatcacagcagtcctgctagatgaggaatcctcccaggtgccttagaattattagctcttcatccacttagtaagctgcccccttccccaaacataggattgacaatttcaggaaattaaatgataaatattactaaaatgacctttagcacagtgccagctgagtaaatgccaatattacatcttgttgatcagaagcctggaaagccatgattatcaggcggcttatgaggtggtatccccagagagctctaggccagacagggacgctcaggacccaaagcagaggcaggaagctctgtcaatcattcatgggccggatgaaaaatgcttatgtcaccatgtggggaaagcaggacacaaactgtatgcatagcgtgatcacagagtaccaaattatgcctttgtaagaagctgcattcaaaaaactaatgtgggtagtgaggctaagcgttccttccctccttcccttcctcccttcctgcctgcctgccttccttccctcctgcctgccttccttctttcttcccttctccttccctccctcccttgcctcccttgcctccctccctctctccctccttccctcttccttccctcttcctttcctttccttttttccttcctgacctctaacttcctaacttcttagcttcctctctccctccttcctgccattcattcaataaatactaactgaacaaccactatgggccaggcacggagctagatactgatgatagtgtagtaaaaacgaaaaacacctttattttttattatatttttgcaaacttttttttaagtaaaaaggcatttttttttttttttggcataagaataaatctatggctaggcatggtggctcatgcctgtaatctcagcactttgggaggctgagtggaaggatcacttgaggccaatagttcaagaccagtctgggcaacatagcaagaccccatctgtacaaagaaaaaataaattagctgtgcatggtgttgcatacctgtagtcctagctacttgggaggctgaggcaggaggattctttgaacttaggaagttgaggttgcagtaagctatgattgcaccactgcactccagcctgggtgatagactaaggcactaaaaaaagaatgaatccagtattaaacataactggttgtaaaactctacaggataatatgaacagcaatgggataactgatgctattaaggaattcttacacatcatccagattttgtttttttttaaaaggtggggaaatctttttttgagatacacactaaagtatttacagaggaaataataggatgtcttggaatttgactcaaaataatccaatgaccagatattgatcattgttgaagctgggtggtgaatacatgaggaggttattacagtcacttctagttttgcataagcttgaaattttccaataaaagtaaaacaaaacaaaagcataaaagtctcataaaaattaatagaacaagtctgctgggaagtgctgaggtcgaaggggggagggtgagaataggggcaatgggtaaagaaaagcagggcagttacctagagagaaggaaaactgcagatcagacttttaaaaaacttttaaaagttacatcttgttgatcagaggcctggaaagccatgattatcaggcagcttatgaggtggtatccccagagagctctgggccagacagggatgctctgggccagacagggatgctcaggacccgaagcagaggcaggaagctctgtcaatcgttcatgggccggatgaaaaatgcttatgtcaccatgtggggaaagcaggacacaaactgtacgcatggcatgtacagttgataacctccaactgtatccttacttagataaaagttgtcatcagcatcaaagtctcttcagacacaaagaacatccctcctctattcattacagagccacagcctcttcctcagtgggtccctatggtactttgtgcagttggataatatttattctgctttattatagttcatttatgtgtctgacttctccattaattccatgagcaagagctacatattctcatttccaaatcccagtttctcatactgggctgggcatacaacaaatgcttgttaaactgatttcaaaaatttcttgtacaattcataagtttcagaatgttttccctaaaatcctaataatgtatgtgatcaggcagaaagaaagaatatatgaatgaaatagaaaggcacatgacatttcttcccactcaggatcagcgtgttgattctgttcacatagggaacctctccctcctcagttggagtaggaatttatctttgatcaagcttgtcatcaatggtatgaccaagaagcacgcaagatggtgctgcaccaaccatattccttccttcaaaatcaaggatataaaatcaggctgaaaattgtcatttgtgccaggagatatcacttcaactacaaaagcatatcccagtgacaatgatggagctaaatgcctctgtttggtattttaatagactgtcagatttttagccgtgtgaattaccaattctctcgagactttatttaagggtaactttatggatgagcaggctataaataagaccttcttgttatatactgagcgatcatcttaaagtgaagaggggaatttcttaaatttaacccacaactacaatgcaaaatgtgttgtagaaatatcaacccatcatgtctcagaatgtactaaaaactgtctctgaatgatctcttcctgccctgcccacaatgccctaagcctgtgatacagcagaccaaatgtgcattattacagactggtcatattacagagctccatgtgactgtccatgtctgatgcctagcaattatcatgcaacctgtgacaatgtagtgagatgatgctggtagcattggccttagaacccagatgtcaggtccagatgatatttaagaggattatgctagacttttggaatgacatgggtgaaggtatgagatccagcaggcataatatcagtgccacccctctgcagaaattggggaagtttgagaggctgaactcagggatcatcccccgatctctggtgtctttagctggaaagggatcctttgtgcttattgcagtaaacgtaacttgtgtcagattcatgattttagagtgttcattcttaccagcctcaaatacagttctctgctggactagttcatgtccctaccacaatgtcagataattattttttaagtatgaactaaattcatcatcagctccaaacccttcaatgaatcctcatccatcgagcaagttttcctaggttctaatacgtgtatcttctcttcaccccttagacttagttttgtcacactcccagtgttgctagtctctgggggcttcagcactgcttcttgagtccctgtccttatccacacctttgtaaatagtccattcattgaactcttcagtcaccccttttgagagtgctgtctatttcctgcagagaccctgaatggcacaaatagactactttgaaaagaagaagaaagaaagtacagttgcttttccagatagcaagatatgttatttaaactgtgtgttatagatggaaaataaatatcgcaacagaaaaaaaaaatacagagactatgtatctgtgggatttcaaatatgctggaagtggcagtcaaatcaataggaggaaagaatagactattcagtaaatggtgtcaggacaatttggttagtcacgtagcagaataaaacctgtatcatagaaatgcaagtaacatatgtttacttacaagtccagtctaaaaactaggccctgtgtgcctcaacacagtacatatttgtgacaagtatcagatgttggagcaatatcatatgtatctcgggaggccttctggatgagattcttgcatccagttaggaaaaagggttgttccaattgagagatgaagaaatagagaccaagactgataaaatggcttgtccaagttcatataagtagcaaaagagatacaatcagtagaacctggtcttacacatctttaagcttgaaggtaagatgtgtaactgctgagttttgcaccatttcacctcacttcccaatttcaggtgcagaggcttgaacacaatgagcgcagacagctgctgcatgtcagcagagggggaaataatacctgttcatcagggagctaattctgcaaaatgcaccatctaataggtactgtatacacggaaataggatgctctaatcagtgggaaggcaggaactgcaatctatccctcatggacctaaaatataatggagctaaattgaaggttttatgatgcacagagcactttacttggaagactgatgcttttccaggcaaggtgttcatttccagaacaagttcccacactctctgacatccaatcctggggaacaacgggaactgaacaaagcaatgcctggggcagctcatcagtatttatagagcctgtgggagacagtacagcgcagaggctaagagcacagatttagaagccagccagacctaggttcaagtcctattctactatttttgtagctctgtgacctgggtaagtctctcaacctctctgaacctgttctttcaccagtaagagaagcatgatagtctaccatgggagtgttggaggattaaatgaaattaacatagacaaaatgcttacaaatacgtagcagtcaatgagctttaaccgttatttttagactgattttctggtgtggcccaccttcttgttccaaagaatattcctgggagagagctctaagatgtcagcagtggcaataatgttggaacaagcacattgcctgactggcgattagtctgacgtggatgacaagcagatcattggacactgactcacacaggtggattgcaactcctgatatgttttgttggctagtacagttgcttttttcttttaattaaattaactgaaaatatattaaaataataaaactttacattaaaaatctagatttccagtttctcttggaacaataaaaggtataatgacaaaacactcaccttcctttctgaccacagggtgctgcagttcagcggcagctgccccttttagggcaattgctgtgtgttctccattcccatccagcccacttgctccatctgcccaattcctacaggcatttaagtttagaactcatccttgggaggttttctcccaaccggaatgtaaaaaaatgtggaactgggaaaggtattacattatcagaaaataacctgcgatgtaataactatggaatttgactaacctgagtttgacttgtggctgtgccacttcccagctgtgtggtatcggtgcagtctgttgtgactatccgctgtctctgaaactcatgtttcctcatctgataaatggggatgaaacacttatctcccagaggcaatgtgagggttacatgagacaatgtgtgtaaagtgtccagcacagagtctggccagtgcagattttcatatgatataattatcatagtaattcttttggaaaagattgagctgggggaccaaagttatgaataaactaataaaatgtcttcatgttgttttactaaatgatactaaaaataatagattgcacatacttaggaaaaaatctattttatccatctaatttttatgtagtatatcctatacatttcatctcatacaccaatctttgctacttagaagcactttgggatttccttcctttattgtttcagtgaaatgaccgtgactttgttggcttggttgcaagtgacacataagctgaaagaattttttctgggtctggtccttcaacttaatgttcaattactttgatgttttcacttggagctgttggctgtcaccttctgaatgccatcatattcccagagatgaatggttactttgctgatcgagatggaaaaatgctttgggtgacccttattttacctaagttacatcattgaggagatactgtctatgaaaagaaaagatgagtaatcttagctctgtcatggaaactattcattaaacacacacatgctccataaccgcatgtgccagagcctgtacctgatgggcactggagaggaagcagtgaatacgacagacacatgcaccttccttaaatctcagcaccccccggcccaatgggcctgccatggatgacaaggcctggaggaaagggttcctctgtagtctctctctcctcttgttccctcataatctcactattttttccctgcccaagtctgattccctttccccaaaacccccagatgtctccatcagaaggtggctccaaaattcatgtagctctacctaaaatctccgtaggtatgggaaagctatggtaaaaatctgaatgaggccaatttattagtgggcaatgaaatattatatgatattatttaacaatgaaaacaaaaaataatgagcacttattaaacatctgttacatgacatctgcactatctaatttaatccagtaactctttgaagtattttcatcctaattttacaacaagaaaactgaggcttctatcacactgaggccccaagttacacatctgtaaatgccacagtgacagtttaaccccagcccagtctaacactcatgcctgtggtcctgtctactgtactaattgtcctacatttgctttaaatatcagtcttcataatttaccactttgtaaatctcttttctcaagtgcatttgatagggataatcaaaattagctagaggaatttacagtacaacagatacattgctttttctttaaaatttagttgtttttatgaagaaagcaaaaactgttgggagacatgtttcaaaatcttactaatgaggtatttacctgataatccacaatggctttgattgcgaggataaatatgtgattgccactcagactttcaggaaaatatatgtaattacaaggatttagcaaagtataaatagaaaattgttttccaactcctggcactaaaaattgcagccccaagaggctttgagctgggataagcactatatctaccccaaaatacccattacacattaggtaagtgtccctttgttgtgacaactttcttcctaaagaataaagagtttgctggtctttgatgaaggaaaatcccagcccatgggcccttcctcctccttaggcccatcatggcccctaaaaaatcagacagccgaaaagctcccagtagcaactgtattatgaatgattccaggatcttttaattgggaggttctgaaatcaagagatttttaaaataaccaagtccctgggtgttaaaatcctaccagagacagaaggcaaatacccacaagaggctgacccctgctgccttctgaccagccttctctaaatcccattgtctattccagaaacatttttgccaagctctgggccaggcgctgaggacacaatgatgaacatgacagccacagctactgccctttggagcttacactgcagtggggagacaggcattagcatctgactactgcataggttagtgttctaccatgacagcaacaggcacagagggaagcaggaggagctaagcccaaggacaagggcagctccaccagatctcagggggtctgggaggttccatggaggaagtgacattggagaaacccagtatgattgaggaacatgcagatgcccggtgcgggtagaggcaagggtagaaaaaacctgtggtggggtaaggcattaggagctggatcatataaggtctgaaaatgttaaggactttaaactttactttgaaatcaataggaagacactgatgggctctaagcaagagagcccatgcttaggtcaaaggtcatgcttcaagtgatcaagagccacagtaagctagtggctatcatgctagatcctttaaattactaacctgtctaatccttaaaacagtctgcaaaacaggcactctgtggccattttataggttgtattctttccacgagacctccccacaactgttttatccccagctctgatgctgtgaaaaggtttccaccgatgactcagggcagcattagcggaggtgcagagccttccagtccttctccaagactcttctcaggaatgccctctttgtgtcaccttcttgaggaagacccaggctggttgggctcctaaaggcccttggaataaactttactatggcatttgccaagctgcaagggaaatgtgcgtcataggtgtgtgttccttatgcaactgctactatacagtttgtaggaggtggcagacagagtgattcacaggtttaagggcttactagcccctgcagccagtgcacaggctgtggattaggggatgtcctgaggaagtatgatggggactgggtgctcctctcacagtgtgatctctctgcttcaggagcaattcatggagttccaaaggtaatgtaaccaataggtaattttctctttgggcactaacattaggtgttaattccctggtgctgctccactgtacagtgcctggcagtcaacttccctgtctctgccatattcattgtaagctccttgaggcctgggaaggtactatattctttcttgtgtttctaggcccagtagggtagccagaagttaaaatagatctaaacacaggagaaatcacatcacaataaacagtggatggatcaatgaatgaatgagtgatacaagtcattatagaaaagttcctatcattcattttatagctctgccagaaggctatatatcagtgaaagcctagtcacccattcacagctcccatttgagacttatcaatattttcttcctccttggatcagaaaataataatacaataggtatcatttacatatcttgggcaaaaatgtgctacaaaagatgaacactaaactttggaattatttgaaccaggattcacatcctcattcttatacaaattggctggatcactttcaacaagacttttcttgggcctttggctccatttccttatctgtaaaattgggaaactaagggctaattcacatggcaaaattgagaagatgaagtgaatctatgggtgaacacctacaaaggtaaacctactcaatacgtgcggttttctctttcttaccttctgaccttatatgcatggctactagaatccccgatactctcattggaggattcctttacaagaagctaccacctgtgagtcagccagaaagattatttttatttctctctcttcttctgtccctccccttcctctccctcttcttttccctctccaggagagtctatgaaaatgattcctttaaattcctattccttctgccaagagttaatacatatcacaccttctctgatgcacatatgttattgattaggtacaatgaaagaattgccatcattttgtccatagctacttgtgaaaggaaaaaatatattattatttacttgcttatagttgtcttggcaatatgaaggagcttcagaaataactgacttatgctaatccaatgtgtcaacaacctgctgaaactacctaaaaatagagcagttttatcatcattttgactcaaattattggaagaaaagaaaaagaagagagacataacaaatgtgacattcaaatggcctgctttgaccaaaaaacacaacttcttccttgaaggcttcaaaaagcaacaatttgcaaagttattgatctttcttttggcagggtggtggggtcttttatttctgaggatcaagagtttcaagcctcctttgtgtcagattaatagcaataataagtgataatcacttgctacatctaaatctgactaaagcaggtggaggctgctgtttctttagtcaaaaggaaaccagcatggggttgaaagaggcaaagtcctaccatgtgagttcgctgcggcccttggggattcggggcaggaaggcaccaacgccagagtcccaccccaagactagggactcctccagggcaggactgggtcagtctcatcactgtgctcattggtctcccaccacagagaagccaagagcagccactcagtttgttgaatcactgctcattcaacagaccaagcctccaggaattattttatatgtttaatgaaataagccagcaagtgaaaccacgtagcttaaaaagtggcccagagccacagttagcatttgtgatcctgggcagatcagctgacctctctgagcttcagtgtccaccaacctcgacagagacagtgagaattaaatacgcagtaatgtcaaccaagtacagaggccacccttggccaacattccatacatgctcacctgtaatactatttatatcagtatgagatgggacagccaggtgtggctgaaagggcaaggatgtttagactatgtcagtcttgctttccaacttccatcctagtggttaaaagcacaggttctgcaggcaatctgcctacatttgaaccccagtcctgccatttaccagctaaggggcaagttattttatctttctaggcctgattttcctcatctgaagaatgtggatcataacagcacctaccccacagggttattgtgaggagtgaataatgcagataaggagtttataatagtctctgccatataaatataagcttttatcaccatcgtcatcattgttgtcatcatcgtagtgggcaaattaattagcctaatttctccacataacaacagctgtctcgcggagatgtgtggagtcaatacgttcaggaatgacaggtacttggtacacagtaaatgtcaaataaatgttagttttctcccttttctttcctgattccagtaatgatgaagctttgttgagggggctttggtggttgcaatgtacacaagcccattcttgtctgcttttatttctttgcagaatctcctccccactctcttttcccttaacagtctccggtccccagacaaaaaaagaacagaccacatcctagctgagaatgaaatcattttttttttaactgggaactgtccctgcagctggcagggccaggagtcactccaaatgacaccaccaaattaccaacgagtctcagaggtttccgagagatgcttaagagcctgggcaagggtttgcagcacttaacctgccaaagcctcttcaattgcagcctgtcaccccctgagttaagtagcggatgaaatcagcatgtataatttctcatcttccaaggttcagaggggcgcattacatttcagcatgattaacactgctttcactttttttttcttttgcatttacccttcccaaggaccagtgatagggttcaaagaaatggagaggaacagaggtgggcacttcaatagaacaggtgctcaactttaagtgaaacactcaaacaattgatagccagggaaagagatcttcctttcctcattctctgccagatttagcaatttaccagcaagccttcacaggctaagagagaggacagggtgaagaaatagtcaacctcttaaactcaggctcatgtcactcatccaaccatccctctgtccatcctacaagctcttccctctctaccagcttaacttttattcatctgtagaccttagcccatatccttccagaaccttctctcaactgtgactgggtcaaattcccccaagatttcacagctctgagtagattcacttaaagcactgaccatggtggcaaacatcacctttatttgtgaaattatttaataaatggctcttagagctaggttcaaacccaggactgtctgtctccaaagtccaggatttttccaggtgaagcagctggagccctggccctgggtctccagcccacaaaccatgcaattttccgtaagctgcttcctcattctgggtctgtttcctcatcagtaagaaaaagggtgacattcaaactccccctgccctgctttaattttctagaattcatcatcatgtaggagtgatgtgttcaagggatggccccaggaagcaaagcccagccaagaatagaggccccaggttccctgagccaggctcctgctcacaggccatggaggccaacccttcacatgggccccctacgacggaggccagggccctccataccatgacattatcatgacagcacaggctgtcaccttcttcctttccactgtcttccaacttcacaggtgcctctgtgcctgacaccacagcttatcagactggagtagagatgggggctgctggccgcctcatctcaagccgttgtggtggcagccctcctgggggaaacctgcactcattaactattccctccatcatgcgaagtatgagcacccctgaagttcagaaaaattaaaaaatagaaaatttaattaaagccctctctgcctagttgccttccccttggcttatgaggtcctctgaaggagaaaaaacaaaactctttatcctccatgtccatctgcaattcctaaagcgtggggcttctgttgggaggaacctgagcctcatgctcctgtcctctctgtgagttattagaaaacaacatagaagaatatctttgtgacctggaggtcacttcttaaataacttcttaaaactcctaaataacttcttaaaactcctaaaggcacaactcctatggtaaaaaaaaaaaaaaaaaaaaaaaaaaaaaagtgataaatttggtaatcccagaattaacgtttttgcttaaaaaattaaaatagatgtacatagtttgggaaaagatacttacctaaaagtgacaagggattggtatttataatacactaggaactccttccaattgacaagaaaatgtcaggaactctaattgataaatggacaaaggatgtggagaagtaattcaatgaagagaaacccaaaaagccaacaaatgtatgtaaatactcaaacttatgtagtgtcaaagaaaggataaaacaaaaacaattaaacaataagctatgtgtgcacccagcagattggcaaaaatagagagctctgtctcaagtgtcagaagctatgcagggatagaggatacaggtggcttcatgtcagtgtgagtgcagattggggtagcactggaggaaagcaatgtggcactacctagtcaaggtaagtacacatgtgctttctgtcccaggtgcacagcctacagcaattcccactcaggcccattaggaggcactgggtgatgcctactgcagctggagaagagttgggcttgcttctggtcaccggctgggaatgttgtgggcttggttctaggactctgacatgtagaaaaaaaaatcacctctaccagtttgggatatgggccaagacaagatcctaacaagccctgaaacacagtgctcaccattggctttagttctccaaggaatcctcacagcccccatgggcttccttatcacatattctagaaggataaaatctgcctgaagagtttgcccttcacaacatcccagatctctttgcttctcttcccctagccatgcccctccccaggtgtgctttcagacaagctagggaactgtggttcccaaatttcatgagttccttgagaaaattcacaaaggaaataagatctgttgttaatatgataattgttgttactagtgaagtcaagaaaccccctggggaatgcacatagcaaatatgatcacctacatcaccagccccctgtaattctgaagaaagagactttattttacttcctgagctcagagctaccttttatcctgatgattggggcaaatggtccccaaacaccatttacaaagtgagcagagataagaggtaggtgtgaatggcagctgcgatgaactgaggaagagagcccaaggtgtcagggatagaatttggagtaggaaatgaaagaaatcctttgagagcccaaacagcagtgctcctgccctgcctctatccccctcgtgtatagatgaacttcatgagcttttagaagggtcaccaaaagtttggaatagaaagattgacttttgtatcattaccccagcttgtgatatatattttgagtggtgattttatttttattttttccaatcccagtctcaaagggtcaatccaatacttattagatggacatcccagggtttacaatacagtcaagacccatatgatgggatttggatggcagaaccattttcttttgcagtaaaatgtaataagagaatctgcaagaaagggagtttaaaattatatgtttgcagaagtgaatgactttgctgtgtcagaaccacacaagcccctgttcctttagaagaaccagggctctccctttccagagtttctacagaaaatcagcaaggatgtggggtagggagatggagcttatctctcagctgctatccttactaatgtgtgaaaccagaaactgatcctttgctcagagccaataatgtcagcagagaggacttgtaacagaatctggtagaactaggtgtgaatgctggtctgcaacaaccaggctttgagaatgtggacaagtcatttgacttctctaagcatcactttcctcttctgtgaaatgggaggggaggggggaatcttgtttggaaggatatatgagctcatgaagatatggggcttggcatgcagtaggcactcaataaatatcaggttctacattactctcctccttctttcaagttaacttagagaactacacataagggagatggatggcaagccttggcattgtggatatagctgacttggacaaggtgacttgggcaaggcattgtggacacaaatggactccacagcctgctggggaatcaaccgtgcagccaataaagtgtattattggagctgtattcaaactgcagataagagacaacgaaatgcttaggataggaagtttgggcctgttttgttcattagggcagagtttttcttaattatgaaaaaaatatatatctaaagacattaaatatatgtaaagaaaaagaatcttgtctttttcactgctgtatctgatacaacagtatctgataaacagtagatactcaacgcctgttagatgcatgcatggatggatggatagatgcatgggtgggttgatgcttggctggctggctgactggatagatggatgaatgaataaaggtgtagatggatgcatgggtggatagatggctggctggctggctggctggctggctggctggctggatggatggatggatggatggatcgataaatgaatgaaggtgtgaatggatgcatgggtggatagttagctggctggctgggtgactggctggctggctggatgaatggatggatggctcgttgaaaggttggctggctggctggttggataaatgggtggataggtgaatgaattcatgggtagatacatgggtgggtgggtggatggatagtcaggaggcatttcaaagagaaggtgagaagagaatcagcaaataaacgcagtgaaggaaagaagaaggaggtcgaaagatcatatgaaattatcaaattcctgtaccttctccagcaatacaaattatcattttaaaaaatgaaaacgtttttcttaatctaaaaggtaacatatggtgaggtagttgattcaaaaaatgaaaattaaaaaccttatatgaaatgttatataaaatatatttgttttctataaaggcctgactcaccatagagtcaaaagtaagccccaagatatcattaagtcaaaggcaaatatatttatttcaaagctcaagggcctgattactagagattactttcattttcatgcattcccaggcagaggaaagcaagtgttccaggacaattggggtgagggccatccaaggctggggcaggaaagcaggtaggagaggggggcatgcaggcaagcctgggttgatggaccaggaacaatcaatacttatccacagagctcaacaagtaaaagaggacatgacaattttcatgaattcaagccagcacgaagggtcatctgatgatttaccaagataaaattcaagacactctttgaggaccgaaatcttcaaagatcaatcttcccatgctatgaccacaatgacccctccaaatcgcctccaacacacatggctattaatacataattaatagcaatacccgtacttttgcagggattgaggtgggtgtggggaggacatctgtgtccctatgtggcaaagtcatttgtcgcctcaatctttatacataaatttgcacacacccacacatcgacatagaaactaaggcgataaacattttacatactgactcctgttatttaaaactagcatttcaaatggttgcatttagcccactgagtgagcacaattactggaaagcccatttccttagtgtcagatattaatttcaccttgtttccaactatatatatctatatctatatatctatatagatatagatatatctacacataaaccttggattatatcctgaagagttcaaaaatgatatcactaagtcatggtataagcttggtcaaaaagttttctaaaatttgttttatatgaggatcctagttttttcacaggctcactaatagaaattattactaagctttactcttggtagtttaagagaaaaaaatgataatgggttaatttctaaaatagttatagtctagagaaaggcattactacagtgaagttttaacagagtcccaaagtgcttacgaagcaggcgaatgcggttgcaagccgggggtaattagtaaacacacacgcacttcatgggagttctgctttggctgcaacgacgggcaagccttgaactccttctcctttcaaagactctaatgccactttgcccttttttctgggcattagtccctgtgggaattccatgagaaagactggaaagaaatgagagagagggatttcaaatattttctttgtccagcccataataaggattattctaaatcttttgtctaacacacagaagatatcatgacagttaatgaacaagttgattggttaaatcattctagtgggggcctccaattcattcctagtgagcctgtaatgtgtgtaaaagattaaagctgcatttgaggaaggaccaagatagcagatggctcaaaggagcctcattgatactttatttttattacagaagtcatatgttcttatttaaaaaatttggaaaaaagaaaaaagtaggacaaaaacaacagtcatcctatagcttcacaatccatagccaatattttgatagattttcaagtgaatatacatgaattttataaacttgaaattagactgtgcatagctctttatcctttttccattcagtataataaacttttctaatttaaaaaatgcactgaaaacttatttaatggttaaagaatattacctagagtgaatgtatgattatcctcctgttaagtattttacttctgaaattttatttgattttgttattattatttctttcactcaacatatatctaacacatacctgccacgtaggatagaccgggtcaacaaaataatcatagacccctgcccttcggaagaaaaatgtgaagcaattaagacatacacatatttaatcaaagctgtataaatgcaataaaagaagtgacctttaagaggagacctgaaggccataggatttgatggggtcggaatgggagtaagagtgtcgcagatgaggggtatatgtatgcaaaaacccaaggcattctagaagggggcggtgtggctggcagtaggaagtttagcattgtgggatcaccacagtgggaggggaggaaagcagctctgctttctatcctaagggcattgaaaaactactcaaacagtgagaaacacaggatgcacttttacattctaaaggaaaagttgtgttaacaccaagaacactgggggactggattccttagacctgacaagcctttaattagcagacagtttgcattcagacttcactgctggccagtctgcctgtctgcacactactggccacatgtacagtacaacagggaacgcatccaatggaagacaagccctgtcagctgcagagacttgcagaagctgtcccttctcctttggtgggtttcacctatgtggatggagggatatgaggcacaaagatagtaggtgaactcaaaacaagatcaaatacctgtctcttgatgtcctcacccaagatttgtctcagcctgaaaatgaacgattgggcaacctcagcatgtagaaaacaggttcagtcttgatcacatagctttgctaatgctgctctgctaaagtgtcctttctctgtcttggggctacctgcctcactcctacttatcttacagtctcagtttaagcctggcctgctactggaagacttcccttcttgatagcacatttctccatcccagcacttgctatagtctatataatagtcccttgacctatctatgagctcccgagggctaggtacagaatatctgctcaataacttttcgatgaatgaatgaatgaatgaacgaacagtggtcccaacatctccaatttaattcttgttagaagctgggcaatgtgtatgtccctcccccaggacaagaatggcaccactgctaactgcctatcctgcccttgccagggtggtatgtcccctcagagtggctcacactcagcccctcctccttcctctccacatgtactctcagaatctcaggatctgtgcttattctctatgcagcccctagtgctggtgtggtcggctgaataatggctcccaatgatatcaggtactatccctcggaacagggacatgttatcctatttggtaaaaggatctttgctgatatgataaagttgagaatcttaaaatgaagagattatcctggattcgctggttggagactaaatgctatcacaagtgtccctatatgaaagaggcagagggagatttgacacaaacacacaggcgataacatggagatggatgcaaagtttggagtactgtggccacaagccaaggaatgctgtcagccaccagaaactggaagaggcagaaacagattctccccggagcctccagcacagccctgttgaaagcttgttttagcccactgatactgattttgaactcctggcttccagaactgtgagagaagagatttctattgttctacatcaccaagtttgtggtaatttgttatagcagccacaggaaaccaatgcagctggctagtggatggttctgagggtccagacacccagcatgtcatcccagctctgaaactctctctctcagaactagaattctcatccaggcttcatctcattcacagctaaccctgagcaagtcccttctctctctggcctttttttccctagctgataagatgggagagtaacagttcgcacctgcagagtggttgggaggattaagagggacacatacatgcaatccctagtataatgacaggcacacagcagtcgctccatgtaaattacttctgttctcccttttttgttatgcaaataagtgtcagtgctaacctagtgctcactatgtgccagtcaccaagctaagccttcacttgcaagggaagtactggacagcattcccaagagggaagctggatgggttaaatgtggccctaaaagaaaagtgttctgtactccctagaaagtggagatgtgatttactggaaagctataacgtcctagaaagaaacacaagccaaaaaacaaaacaaaatacaattaaaaaaaatagagatattttactctgccaagggcacctttcccatccttttgtaaccagccaaggatcttttcccggtaagtgtgtctttcccataatacagaggtcaggctcaaacactaaacacagttgaacatcctctcatttcatcatctttactctccgtgccttccttgagaattgacttttctagacccactggtctaaaatttttattttaaaaaaaggcaaattaaagtacaaagctgctggtaccacctgaaaatgtcaaggttagaaaggcaacagcttctccccaggaactaatgcttttctgtctcataggaaatcttgtgcatgcctggatcttgggcactggagacctgtcgccaccaagatctgtcctgcacctgtaggggccaatggagtagggggcctggggcccttctctggctctttatcctggtccctgccaaggccttagtctggatgtggggatcacgctcctgacagggcaactggggaagaacaggggaaagaagatgatgaaaacgagcaagactggtggagaaggaacattgcatggctgcccagctaagtgaggagcatgggaggaataatctaggtctttcttctggaatcccggtccagactgtcacctgggggcatgccttgctctgaaccacttccacactccaccttatgtccagactgggctcccactcacacagtatgcagagaaggggcaggtgcaggctccagactgctgggggttgaatcctcgaaccaccactaatgaactgagaggcacaggaaatatgtcttaaccttccctgcctcagcagcctcacctgtaaaatatggataatagaaagaagatgagagccaggcatggttgtgtgcacctgttgtcccagatactcaggaggctgaggtggaaggaccgtttcagcccaggaagttgaggctgtagtgagctatgattgcaccaatgcactccagcctgggtgacagaatgaggccctgtctgttaaaaaaaaaaaaaaaaaaaaggaaagaaagaaaatgaggaaagtgtggctcaggaaacctgtaacacagtccttctttattccttcttctgcattctttctgcaaacacactggtaagcccaagcctctgccctcatagaggttacagtgcttgtaggggtaagaaaataagacaatgagagtgtgaggaaatgcacattttgctggcagagacaggcccaggggaaggcctttacaagcgagggtgctggacgggttagcaataggtagcagcatatgcaaggccaggaggagagaaaggctcgtgggttcaaggacagagcagaggtcagagtgcctggagcagtggactaggttgagaacagcacaaggaaagtcaaagagctacctcccaggccaggtcaggcctgagttgtttaagttttattttaattgtgatgctaaacctactttgagggtttttatgcaggggagtgaggctgttatagccgtgttatcggaagacctctctggatgctgtgtggagactgtactagcgtagagtggaaacaggaccccttttagatacgattgacgtggttcagggagagatgacaatggactggatcagggtggtccaatttgagatggagagacggatgggttcaaggagtactgtgatatctgatgttcacttgagtgctgcttggcactgtacaaagcactgagcatccactattttatatgctccttctgacagccatatgaagtcagtgctcatgttatctccaggtgagaaaattaaggaccagagaggttaggtgatttccctcagaccacacagtgagtaagtggcagaggcaggatctggaccaaggccatcctgttccagagcccatacaccacactgctcttccttgaacaggcctggacaatggatgggctgagggtggtgagggagaggaaaaatgagacagcttctagggtttaggcttgaggaacggggctaatggtggtgctgtttacagatggggattagctgagggagagactggcttgtcaggggctgggggatcaagagctctgctttagacatgttgagttccagccactttcgtctgctcttcagcccttttctgtctccacggggcagtcaataatgggggtgaaagtgagggcagggctggtggggcagagagaagcaggacaattgttctctgtctacagaacctccttcccccaacacatgcagctatgagcctcccaatgtccttttataaaaggaggtgtgatggcaacatctccagaaatgcagcaaatgttgaatgagaaaagcaaagcaagattgtctaaacaccttttgtttgccttcaagatttctcataagttatcaatagttcttgggagtggcacacatgggcattttccacatcaagacagtgtagggaaaaaaaaaaagaagagaggaagagaatgaatgacaacacaaggctgcactatgcttctgaatgctggaggcgggaatccaatgctatttcagggactggggtggtatcatgggagaatctccatccttgggggcccacttgctgagtcaggtcttgggaacaggctgattgatctatttcagtgtttactgaagagtcatttggctctgtaggatgttaataagcattaacaaagcaaagattccttgtcgcataagcttgggaaaagctggcttattatagcttctttactgcaggacttctcagaatcttgaacttgggaatgcacactgtgaacctccaagaaggaggggaatttcccaaatgtgtttaatcacagaacgcttttgtagccaagcactccaaggatgcttgttccaggaaacagattttgggaaatgttcatcaaattcgtttcattcttacggaaaggcaatagaaccattactcagaattgaatgttggaggttcctggatgtgcagactggaaaaccaagccagaagctttgtaaggaagatcgaagaatagaggctgtgtagtaaggcttggggctgtgtgaccataagccattctcaatcttggtttctcaactgtctggtgagaatgagaataacttccctgtagaattcttggaggattagtggagataactcacactaaggccccaaatgcaggagcctagaacacaacaggcctctctagatcctccgaggcctctggcaggctccttgtagccctgactcttgagtgcatgatccgtgcaggtcagatagcccttctgacctccttgctacaccagcttgcttttttccttggcaacagtgctccccaggtagcccaattccctgccattatcaggcttctcaagtggtcaatcaagggtagccaagtccggcctggaacttctaaacaagtaccccctcaggaaagcagtctttatagccaatgatgcaattatgtcccacagctcaaatggcctggaaaaaaaaaaaaaatccaggaggaaagaaccagtgtgcacagctttctaaatgcatcaggtttctaaaatgctccaaggctccttgtctgttgtaaccatggcttctgcagtggctaacacacaggacctagccctgtgtttcaagagtccccaacgtttgctcaccactcaagcgttcattcaacccgttgaccgaattgagttcattaaactctggaccgaatttggggccaggtattagggtgcaaatgagcagcccatctagtgtgcaaggtagacagtgagtcagtaagcattgggatatttgaattggatgggttcaaggagtactgtgatatccgacgttcacttgagcgctgtttggcacggtacaaagctctgagcattcactatttcatatgttcctcctgacagccatatgaagtcagtactcatgttatctccaggtgagaaaattgaggaccagagaggttaggtgatttccctcagaccacacagtgagtaagtggcagaggcaggatctggaccaaggccgtcctgttccagagcccacacaccacactgctcttccttgaacaggccttgacaatggacgggctatacacaaatttcaatgacaacaagagggtccaggctttggttcattccaaggtggggtttcaaactaggtcacatttagggagcatttggcacgtgccagatatggtggtagaatatttttgcataaattatctcaacttagacataattacaacacaattttccgaaggagaaaatagcaaatcagataggtacagggagttgcccaaggacacacagctcattagggggagggccaagattcaaatgtaactcgtctggccgggcagccttcagccagccacacctgagccaaatcaactgagggaattggcagtggccgtgccagagggttctctggggattagaggtggtggtctctgtgaacacccttccttaacctgggggcttcagacacatgctcttttgttccttctgtcttgtgtttcttttcctctgccttgtgcaggcttcgctttcggtggaatgaaagcctcctacttatgtacatgccactctcagtccagaatttagtcaaaatgagcaaacatggagttctcaagaaagtttttaccagcatctgcaatcccccatgccctgcagagatcagcctcaggaactctactggcagcaatcctggaatacttcctgaaggaagcctcctatgtggcagaatccaagcaattatgaagtccagagcatcttgtaaacatggagacctgagtcctcagtgaagcagggagaagggatggagggtagggagggggaggaggacactggggaaggggtgctaccgtgagatttgtttcccgagaagaggctgggagcctcttcttcaaaggctcagagctggcttcaagcctgagaaatgaaaccactcctctctatggggagaatccttggaagaatatttatgagacattaaaaccactgccatcaaccctttaaaaaattcctgtacatgtaattatgggtccagggatgagattcctggatatggtattaattacttccctgaagcacacagcccccaggggctgcgagcaggcacgctctgcctgtggcctcctgggtctccctctgcccctacagacccttcccttcatgagtgtgctgtggcttctccaactgcaccctggccccgccatccatcttctgcctttctgccctgctctgtgcccaggaggctggtcaagtaggtgtaccctctgagtcccctttctggccacccctcactggctttggccaacagaaagcactagcaggagaggggagggcaggaggggaagagccttgcctccgccttgcttcagtgctgcctagcactacaatgccagctcctgcccacagcagcctctccatcaggccttgctctcttttggcttcagaaataccactttctctccttgccttgcccctttagacctgggtggtttggttccacccccaggtgccctcaacatctcttatttgttcccttaaccctgactgctccacttccacaaaacacttccttcattcaagtctctttatttggaccatctgggatgaattctattttctgatgagaatctgacaagaagcaaatcaggaagggagctgcgatatttcaggcccatggccacaaactcagtaaggagtaaacctgctcaatcaccacctcactggtgtgtcttcatgttctgtgccaggtgtgggtgctggagatgcaagctgtgggccagggagggtgctcatggccggtggggagctcctgatcctgtttctctctcctcttgacccctcccactccccactatatatacatgtgtttctatttttttactgtagtctaaaacaaaacaccacattactgacatccttgatcaacaaaatattagaataatagagatttttcaattcatcattcatgcaccaaacctgccctgctttctgtgtgtcaagccttgaacaagaaaccacggcacagaaatgaatgttcacataaggcacgtccctgcccttcagcactgccagaatattgagccccatatttctatgaagcaaccaaggaaaccttctgcactagaatcaagataacctgcccccccttcctttcttccccatgggttcatctgctagaacacagctaaccagccagccagccaaatagccagccagacagacaggcacacatgccagcctgatgaccaggaatttcattcagtgccacagcagtgttaatttacagtgttttagacccagcttgtggaggaatgaatagaaactgaacatagcagagggcctgaatccatacaattccttcattttcctcaataggacctaatcagtatttcttttgcgaaatgaagagtaacattgatagtaataacacgatgctgtgcaggcatgcttcttgttttcattcaacaacagtcatggagcacctggtctgcgtccagcctcgcacttgatctgtgggcttcagagcatccccatttggtgtccttccctccagtcagggacacccacttccccatgctgctcatcatcctcacccctctgctgaccgtgccagattctgagctcctggtctgagatgcgggggggttgaatttcagtcccagtctatcactgactcacctgctgtatgaacatgcacaaactacttcttccttctgactctcggatttcccacctgcacagtgaggcattaaaatggatggtcagcttaacaataacccacaaaactcggagcacgcagtggctcacgcctgtaatcccagcactttgggaggctgaggtgggcaaatcacttgaggtcaggagttcaagaccagcctggccaacatgatgaaaccctgtctctactaaaaatataaaaattagctgggagtagtggcaggtgcctataatccaagctactcgggaggctaaggcaggagaatctcttaaacccaggaggcagaagttgcagtgagccgagatggcaccactgcactccagcctgggcaacagagcaagactccgtctcaaaaaataaaattaaaataaaataaaataaaataaaataaaataaaataaaatggatggtcaggagccaccctttcatgaaaaatcactgcacattctaaagcctgtggtcaccgagcaatgatgtgggctgcacaacatagggttgcagcccaaagtggcattggagagaaagaaaggctagttccatgagagtgaattaactctctctaggccagtggctttcaccttggatccacgttataaacacctaaagggcttttaagaatccagatgcccagattgctgccaagaccaatcaaatcagaacctctggggctgtcacccaagcatcagtatttttttcaaagttcccttcatggtgtgcagccaagattgagaaccactaatctaagttcactgtcaacattttgggtaatttccaccagatggtcaataatgttcattcagatcacatattttagatcgggagatttttcaatcatagaagactgaaagaagctaggttattaaaccctctatttgtgcctcatctacaaaaaagtaatcccctgttaagatgagagtatatatggattaacttctataatcaaaaatgcaattaattacccagttagaacaagattttgaagagcgaataatgcctaattacaaattatgtaccctcattaaaatctaactgttacaaattcttattcaaaaaataaccccttttctaaagtaaatttgctttactttacagctatagaaaatatagaaagatttgtgagatttatccatgttattccatgaaaaacatatttttcccctatcctttgggaatccccagagcttttcaaaggtcctggttcacagtttcagcctgttggcagcacttttcctaacaccatctctcttagtctgtggacacaggatccctgtgcccctcctccctccaagttaccacacacctgcaccctccaaaccccacttgccatttgagactttgagtacctgttgtgtctctattaaacagcacagaacaatccccctcaaaaaaacagcatattatgttctttcatccttagattgttccaaaatcatttactcaaattctttctattatagaataatgaaaagaagatacactttagaatcagatagccctggcctgaaactttaactgcaggagtccagaagcagacccacaaatgatcagccacctgatctatggcaaaggtgaccctgtggtaccgtggggaaagagtggtctttacaatagacgttgttaggtctattggttatccatatgcaaaacaatgaaccttgatcacgatttcatacttcacacaaaaatcaattccaaatgggccacaaacctaaatctaaatggtaaaacaataaagattttgcaagaaaatgtagaatgtcttcttgaccttgcagcaggcaaagctttcttaaacaagacataaaatgtgctaatcaaaaaggaaaaaggttaataaactgaatttcattaaaattaggaacttatcttcaccaaatgacaccactgagataataaaaaggccacagaatgggagaagatattaacaatatctggcaaatgactgatgccagaatatataaagaattcccacaaataattaagaaaaaagcagacaacctgatctggaaaaaagacttgaacaggcatttcacaaaagaagacatccaaatggccagtaaacacatgaaaaggtgccctatttcagtagatactagggaagtgcaagttaaaccataatgagacacaaccatacaaccaccagaatagctaaaatgaacacggccgttgagttcatttttttttttttaagtgagcaaaaaaatttttttttatttttttagtgagcaaaaatatcagaactctcatgcacttctgggtatttgctacaatcactttggaaaattggcagtacttactaaatcagaacagatacatatcctataacccagaaactccaccccaagaccaaattagtaccaaaagacatgcataagaatgttcaccgaagcaccatttgtaacagccccaaactagaaagtaaccgaatgtccagcaagagcagagtgaataaatagattatgtatactcacaaacggcaatactatgcagcaatgaaatgaataaactccgactctatggagcaacgtggataaatctcacaaacacaatgttgagtaaaaggagcagacaaaaaagagtatatgctctgtgactccatatacattaaattataaaatgggccaaccaaatctatagtattctaagtctggatagcagttaactttgcaagaagtaaggggaaagatagagactgggaggggggatcacattctatttcatgttctatttaaagttctggttacattggtatgttaattttatgaaaaatccactgagctatacacttaggagttgggcagttttctttatgctatattatgtccataaaaagtttatacacacaaacttggctgttccaccttttaactgtgtatgaccttgggcaaggcatttaatctacccagcattgtttcctcttctgtaatagttggaagtataataccacatatattgcaaggttgttgcaggatgacagtgggggaagcttgtacccacacttacatatggaacacacatagcatgtacttcataaatgagtttcacttcccttcccttcccttccctaccctattgaaactctctaatatcctcttatgacctgagacctagtctcttccccttatgaacattagaaaataaacaaacaggctgggtgtggtggctcatgcctgtaatcccagcactttgggaggccaaggcaggtggatcacttaagcccaggagttcgagaccagcccgggcaacatggtgaaactccatctctagaaataatacaaaaattagccaggtgtggtggcatgtgcttgtggtcccagctccttgtgtggctgaggtggaaggattgcttgagcccaagaggctggggctgcagtcagccatgatcatgcctgggtgacaataagaccctgtctcagaaaataaaacaaaataaacaaagaaactcaaaacttgaataaacagaagatgttttgagtgtgaaaggtggtacagggcctttcacaaatagtcttgaaatgttctgggagtttctatatggaaggagacagttgccaccttcactgaggttagagccaggcctgggccccagcaacagagatgtgagttcaacacaaggatcgaccccagagcaaggctggttcagaaacagtgacagtggggactgcactaaaattacagaaagaatgcagtgggatgctgcatgccaatatagcaaccatactttctttccttttaaccacacagggactcagtttttcagcagcaaaattcttcacagaccaaaaacaaaacaaaacaaaaaaccaaaaaattcaagggaaaccactttgttgctttacaagtgccaagtcacaatgtgagaaaatgcaagttacagaaaacatgagattcccagaaaataaactggtgattattgtaccaggaataggaaacaaaccactgcctgccataccttcattcccacccccactagatctggctcctttgggcgtaagagtggggcctcgtgcacacaggcaggagttcctcccaggctacttagtttgtgcctaatccctttattcctctggcaaatgtttactgagcaccactcgatgggatgccagctataaagcatccaagaagaatgagatgtggccactgccctcatggagctcacagtcatggagggttccaagaggtaaatgagcaattccatgcacagtgtggcatgctaaagcatgacaaaatacaagtgactccaaaactggagaggagagggcatcttcctggagaagaggaggacaccggagctaaagcttaatggaggaaaactgggatgtgtgcattcccagagggaacagtgtgagccaaacccagaaataagaaagtaccacttggtgttactggacaaaggctggacacaagaagagccaggaaaagaggttggagaggttggcagcaccagatcagggaaggttcttggcctctgtcctgtaggccagcagtgctcagtactggctgcaggtcagaattatgaagcatctttcaaatcatactgatatcttgccctcatgcccagagacgagtggggtttttttagtctgtttgtttgtttgtttgagaaggtctcactccatcccccaggctggagtgcagtggtaaaatcatggctcactgcagccttgacttcctgggttcaagccatcctcctgcctcagtctcctgagtagctgagattataggcatgtgccaccacgcttgactaatttttaatttttttttgtagacaagggtcttgctatgttgaccagtctggtttcaaactcctggcctcaagcaatccttctgccttggcctcccaaaatgctgggattacaggtgtgagccactgtgcccagcacagagataagtgtttaatgggcctaggccccgagtcccatcatcagtgtttcttagaagcaccctaggtgattccagcatgcagccaatgttgagaagcattgctatagtccaggcatctgcaaactatgggcctcaggccaaatccatttctgtatggcctgagaactaagaatggtttttacagatcaatatttgcaatcaatttcattgtagggagcatgaactccaattaagcaaactccaatttgaactccaattaggcaaaatgttatcccccacaaaaagaagttccatttctcccatcagtagacctgtgtcacaaaaaagtactcaattattattatattttgaatgtcatcaatacagatttgtgaaatgtgttttctctcttattaggtaagtactcacatagtagactcaatttcaccccttggattgtaaagcctaaaatatttactacctggccctttccagaaaacgtttgctgactcctgctatagttgatggaaaagtaacatggtgggtttttgttaagaggaggactctggcagctgtgtggggatagatttgaggaagagagactggggacagggaggccagggaagcagccatcgtttagtcttggcttgggcaggtgaggcctaatacagagcagtggaatgaaggtggggtgggaaatgcagacctcagaggttaaaggaagaggaaatagtgcagggcttggcagccaatgggcataggaggtcagggcaagagaggggtccaggagaccttcttgggaccaccaaagaccagacagagccaccagcaccatcccttccttgtcttgggggaggggtactccaaggcctgtgccagcacagttaatgggaaagggctagagtcccttccccttctgctcttcttccaaaagacgccatttgctctctacagtacttggatatagttcccttcctggcacctctgtgcatagacaagagaacagaaagaaccaaattgtgctttaatatcctttagctccctgaatcacaagtatcacccactataacagtcagggcaggtactgctatcctcatttttcagaagctggggcccacagagaaagtgaaactaaccaagaatacagggtcaggaaagagaggccgattcagagtctttctagtcctcctcaacatgctggcatataacctagagatcggtctggctccagctgttctcagaatgccacattagtccctgggcttccatgtaagctcctgaaggccagtatctgtgacctcactccaagatccttggctccaggccaatgtgtcctgggtttgaatcctgccccacatgtcctccactgctgagcctcaggtccttcacctgggaagtgggggatgaaactctactttatatagttatttagaggcttaagtagaataatacaaagagctgagtatagagcctagcacacagtatgtattcaataatgcatattattttattaaggaggttcattcttgccagtctaactcttgtttgcttgagcctggctttagtggacatggtttttacataagaggcagcgtcattaaaagtgtgaactcagaagccaaaatgctggggtgccaagcccggctctgccacttactatgtgaacttgggggagtcatttctaaaaatagttgccacctgatagtgtagtcatgaaaattcagtgagttaaaatatgtagggcatttggaacaatgcctggcaatagtaagagttctacaagggtgagctattgctattgttttatagttccttttttttttccatcataatttcaacagtaggccagttcctgggacccaacagaccttgtgccaacagtgagcctgcagatgcatttactcacccaatgtttctcagttccttcctcagggcctgatctgtgctagcctgtgggatgccaagtggaaccaggctcccctagggtacctgaggtccacatgtctttgggaactactgaaaattgatttatgcagtctcatacaggcaatcttcatctctctatgaatttatatagtaaagtagcaaatattaatcagagagccacaggcccttatcaatcctgacactcaaaaaattctaaaaccaaaaggttgggttttttttataactcattgggtgaaaaacctgacatgaagtaatgtgaagctatttactgtctttatctttcctacttagtgtgtacaatcatacattttgctgcagagaaattaatggctttgattatggagcacagcctcagacgtatcacataatatacagtatatgcaccctatttcctttcaaaaatctaaaaacaaaccaaattctgaaacacacctcaccccaagggctttcaatgatggactgtggacatgcatttattatttctatgggacagctgtgagcactcctattgttcccctccaccaaaagatacagaaaattggtttggcatagccaaatgattttttatttccctttgaaaaaaaaatcaatatattattgggatccaagaaataaaattggctttcctctttcatgcagttgatattacagaaaacatttacttataaccaacacagactccatcagcctgttctcagacagaaaaatccagttctgaggtcaaggacagccaacatccacagtggcttagccccaggaactctgaaggatgggtttggagatggagctgggtctcagagcggaaaccttaatcccctgtcttacatcccaagataaccctttccttatgatgtttgctcacagggaagttctgggcagaaacagaagacatgagctgaagctgagcaggagagaacatattgtgaacttggaggcagagggagcaagggaaatggaacagttacttcattggctaattaggagatacgcacgttgtgaattgctgatggccttggggcattgaagtgacaggttacattagcagccaggatggctgggttgcttgctagtgaaagtccctttagaaaaggaaagtcgcagggagaatatacacccacatgtttctttgtgtgctcctggatcacaaggatttggggtaaggaaaccaggatataggcaatcaaccacaggtcccggcttcccagattgggctgcctgggccctgccccttctgtcctgcatcgctgtgacacagcagggataaataggtcctgggaaacaggtgtcctaatctctgctatctacttgctgtgcaactctgggcaagctacagagcccctctgaatgtcatcttccagacttataaagcatgacgtagggtttaaggtcttcctaaacatgttttctttcttgggctgcttcagtcacccatcctgacctttgtctctccctttctctccgtttgaccaaaatgacacatgaatttcccagcatgttaacattccgaagggacagagtgatccacatacagcaagggagtgaagacacaactaagaatttagtgagaaatccattttggctcctatcttggacaccaaatattgagcactatcaggccctagtgtcatttcccaaaccccccacagtgcctgataactccccttttcgtgcctcttctgcaccctccaggctcctaacctcttttccttgtagctatttttctgtcacggttttcccttctttccactctgaaatccagctacagtcaactgagtgcttactgtatgccaggtagattactgggtttagacctcaaaacagccttgtggaatataagaggagtctcagagatcctcctgttaaaaaagaagaggctccgagatcaagaaatttgcccaaaactacatgactggcagctggtggaagcgatattcaaactcagctcgttgggcaagttcctagacagatatctctctgggtctccgtttcctcatcttcacactaagttaatcctagcaccttcacaggatgcttttaaagacaaaatgggacaacagcaaagccatccttcagtcctcagtggctgtcagagtggcttcttatagcctaacaaggggcaaaagcacacctgctgtttcccacttctgaagtcttaaactgatgggactgcgtcagccctctggtcagctcctttattttaacaatggcaaatgagattgaaatgcaaaaaaggcaggctgaggaaacagggatttcagaaagcttgcccagaggagcagaggcgggcactccacgatgcatatgggcaccactgaagagccaagtcttactgaagggactcggtgtgtttcacaatttgtgtcatacacaaatgtgagggtgtgttccaataggtggtgctgccagaggatgcagtgcgtgctacagtcagcaggagtctggactttgccctggggccatcggagacacgggggagtgaggagcagatggctgtctggctctggcagtggggggttggaggatgcatcagagtaagaacaggcctggaggaagagggtgacactgaaggagggaggggagcagacgagaggggagaagaagccttggcaggggcctcaggcttgttctctgaaaggaagaaagtgagaattgaaccctggctccccgcagcttggaatgaggtacagtgaattcaacacctcacctgcggaaatgcccacagactcactaaaccctagttctctcaaaatttggcttacactctctgacatgttcagtaaaagtcattgtttgctacccttgaaggttctctccagagcaagggtgagcttctgaatgcaattcaagccaacaagtatttacagagcacctggttctcctcaagcatcctgtgagccctgtggggatgtgaggagggtggcatgcctacccccgcatcccagcagctcccaaggtcagaagcacaaggggagagaacaatatatgagttggaagtcccagcttcaggtcctcctccttctgtcacttctacactgtataattttgagcaaatcactttttgaacctcagtttcagaatatataatagggctgattatgccagctacccttagggttagtgtgagaatttaatgcaatcatcactgtcgcatgacccataaaacaccatatagaggtattattttgtttaacactaatatgtgataacgaactactgagagttgaatcatgttcctccaaaagctatattgaaatcctaatttctggtacctgtggatacaaccttatttagaaacaaggtctttgtgaatgtaatcaagatgtaagttaaggtgtagtcctgatggaatagggtaggcccttcatccagtatgactgatgtccttataggaagaggaggagacacaagcaggcacacagagtggggaaaccaccctgtgaagacatgaagatatagagagaagatagccatgtgagggcggaggcagagactggacttatcagctgcaagccaaggagcaccaaggagtgtcacaatcaccagaagccaggaaccagacagaggcatggaacagattccacccctggagcccccaagaaggagccaacattgccaacacctggatttcagacttctagcttccagaactgtgagaaaataaatttctgttgttttaaaccattccatttgtggtactttgcaatggcagctgtaggaagctaatatgccaatcaagacagggagaaggtgcccaaacagatgagccaagtgttgcaacacagagaaaaaaacaactaattcctccctgaattcctacatctcctgccatctcttcacatcagctattttccttccagtcccttgctgtcagcaagacgcctctggaaatgatctgtataggtaccaaccatcgttatctaaaattgacacatcaggtgatagttgagtgcctactatattccagggccaggcattgaggatccaggggtgaatcacacagactccattcctaactgcacagagttcacagtctagatggaggatactttggacaagaacttgccaccaggaacacattcctgaagaggaccgggcatacagggtgctctgaggaaatgcagcaagaggataaaacatgacccactcaatcggtcaccagctccgtgttgttgttgacaaattcgcccaagttccaaaaggccacaggcatcggattactcagcccaggggctttctatggctcccagaaggtatagcatcaggtcctacctcttggattttactcagaattcccctcaatcctctctggacatttactgcccactcctcttttagaaacactttcatactcactccaataactggataacacaggccttggggggattttgagtttgaatcctggctctgctttatggcctttaatatccgtgaatatttatcagaggcctgttctggaactctgtactcaggatacagagataagtaagacatatttgtccctgttcttgagcagccaaagagctagttggagctccttggcctcagtttactcatctgtaaaatggaggcaataatattagtcttagtttatagttggtaggcataccaagtgtctagctctcagcaggtgtgcaacaaacatcaagtcctcatgcatttattttcctggatgcacctttgctcagaccttccccctgcctatgttcttcccatccatctctagtacttcatggccaacacatttttaagactcagatgaaagcttgatccttctgtaagcttttcttgaccagcctaatggcttcttagaattccaaccactccaactgtatgagtcttaatattctcccccactgtatggtccaattaggcattttttaaatttgtgtcttaccccatcctagcttcttatctctcatggttctttgtatcatgctttatatctagttcttgttcaaggagtagctatagattggtttgctaattactttattattgcaagtcccagaaagtaggaggtaaaaatatcacacaaaattgggccattcagggttcagtccctcctaaaagttgagacaacaggaccattcttaatagaagccctgtgatccccagacctaaatggtcacttctgccttcctggctcccaaagcagcccaactgttcatacctttgcagggaccccttccaccccagggcaaggaaatggctgccaaattgcagccataattgggaggccggcaaaggaatggctagaggcataatagcgctccagcggccaagccaaagcgtccacttccctttcttttgtatgacgcatgcatggttctcccctctaaccttcaggcatggtggccactgggtctcccaagacctctctcctctctggttcacactccataggaccatttagtctctcaggggcagagaaaatagagtggcttgaatagctttatgagtcacaaccaaagccaagaaagacagaatcaaatgaaaatactgtctgagtcggtttgccaaggcaaaggttgagggagcctgggctgctgtcattgatacaagggactctgcctttcatttcctctttgagtttctcctgagcactgtgtcaagggggcttcagaacccagtcaaggacgcaggtgcagggactctataggtcagatggcagacctctgggcctcagaagaggaagtcacagaatttggcttgacgtgttagggcagaacactcaaagggatgagattcaaggaaaagcaggagctaagaaggaaaaggccattccagctagtcatggctgaggacagaaaattcatggtagcccactatgtaccaggcagtgttctcattgatttttatacatcattttatttcatcctcaacatagccccatagttataggtattactgttattaacatccccattttgtaagtaaagaaactgaagcccaggggactgagtaactggaacaaagctggaaaaccagtaagccacagagtcaggattctaacccagttctgagtgactcaaagcctgccccctccaactatgtgctacatggctacccaggaaccccaaagatgtgtcactcctgcttcttctccggataccatttcctgagttaactggctatctccaaatttttggcatctgaataattcctttacaggccagaggtaactgccactcatggtcaaaaaggaaggataccccagcaaccagatacagaataagagtaagtagagaatgcaaagggttaggaggctttgtgagccaggaaggcaaaagccaggaagggcactcaggtctgggggatcacagtacttctattggcaatgtttctcttatctcagaatttttagggagggctggctgctgagtggcccaaaacttagggcagtttgtatgatttttccccctcctttcttctggggcttgtgagcaatcagcaaaccagtccacagatactgtcaaatagaggttgcatggtagaaagttagaaggaaaacagtctggaaatgccagctctgtcaccatgcaaggcccatttatatgagttttctcattaaatttgtgtgacatccttgcacaaaagactatcattcccagcgaggaaaaattaaggttcagaaagattattttttaaatgaatgaatttacatatgtgtgcttgtttgtatttatcccaatttgtgcaagacaaattataaggaatccagtgcagacagaaggtagaaaatgcagcatcggcccaagtttgctacacattctgtgctttactttttttttcctatgctttgcaactccccacctcatgtgtcctttaatctaggacaacccccagcaccatgagttcaaaatagaatccaataagaagaggctcaatttacctgtgaatcttcaggagcagcagacaagtaggggtgggcgcatctcacctggctcagtggtcaggtgcttttaacagtcagcaatgttcatccagccttacctctcagggtcctgagagagagctgggctgtgggccactgcaacttacaaactgcatgaccctgggcagaccatctaacctctctatgctttggttttctcatctattcacattatggaaatactaacagtggtagctcctcttcactgagtgcggacaggaatataaaccacttgtaatcagaaactgctgcacaaacaagtggcttagttttagtcctacctgggttaggctactaaatagtatggacccaatagaacttaacatgatcagggatgatcacagaatatattcaactgtattcaataaatatattttgagtacctggccctgtgatagaagatagtcagatgctttaaaaaaaaaaaaaaaaaaaaaagagtgccacagtgtgttaggttctaaactgaggagatggaagacagataaggtatgctgggggcccaagtagaggctggtagagtggacctagggcagatgggaaagcactgcctgccctcgaggggacactggaactgaggcttgaagaataggtaggaattggctaagtggacacagtgaatgcattccaagcagaaggaacagcacagccgaggcacagaggcctgagcaggatggtgtgcagagggaagtgtgctaggcctggctgccatgcttcattacaaaagaacaggatttattcagcagggagatgtcactgtaactaccctgtatcatgactttccataggcagaaacataaagacagccccagatctcacccacccaaatgattcccagcattttttgtgccatttctcactctgattagcgagcaatttcctgaaggcaagccagtccaccaggcacagaatatgagttccaactctttcaatgagcagaaatctactggttccatattcttctctggggaaggagaatcagctgaaatgagtagttgtttcccatatttacatgggtattttcttcttatttgaaatgcttatggacaaggactaatctgttaggaaggcagagaaagattgtggtccctgctaccatagccaaggaagaagaactggggagtgggagagcaataagtttttatcagaaaaatttaaaactgattgtttggaatttgagaggagaccctaaaattagagaggaacttggaggcgatcttgtccaagatgctactcaaagcaaggctcccttataatacagcctggctaattaacaggcatcgagtcttgcttgaatacatttgtttattaatttgataacttgatggatcttagttctggtggaaacacatacattcacatcaaaaaaaaagagagaaacagaaacatgtggaatcttggaaacagacgtagagtcaaatttggctcctctacttacacagattgaattactatgaccttaggcaagatattcaaaccctctgagttccttctctgtaaagaatgggttataaaaccttccttgtcggtgttgttgtgcggattaagtggaatcatgtatataaagtgcccagcagagttggctggcacacaaccaacactcaataaatggtaattattattatctctttagcccaaactcccacccaaggcagaaatccttctttaaacaaccctgacaaaccagagagctatcaagtctctgctagaataaatatttgttgattgatttggtaatcagttgattctaaatacctgggagacacataaacacacaccacacacacacacacacacacacacacacacacacacacacacacaccctccaggattatttctccaagtcttgtgtgagggagatgctttatcaacaagaccatatccccatatccatcctgttgggtgatattcaatggttaaatttgcagcctggagccagaatccagtcactgcaactttctgctccatggtccgcttccttaaccattttttttttttttaaccacacagactcctttgaagaccttcccagacaatgcacatacctggaacaaattgcctacaacttcaggagtgtcacagactttgtgaagggctttgtgccttcggggctaaactcctctatgctggcacatccccaaacaaggctctgaaattgcaaacactgctcctttctcctgacaggcatctctcttgccctctcctccctgtgctcttcctggaacttcagaagagggatgcagtgctggacttaagctctgcaatcagtgcaaattccagtttccccatctaatgcatctttaagcctcagtttccttgcttacaaaatggcaattgtaatagtgcctgtgtcacagagctgctgtgagggctgaggggacagtgcgtgttgatgcatagcacagtgcctgcacagaggaaacacacaattgaagtttgcaattgtcacttctattcttatgttatctgttcccttgctctcctcctcccacagacattgcagtttgccatcgttccactttaaaagaagctccagaaggtacactcagctccagagaactggagatagccctgcatgccatgacctaggtgtcaggcagggggcactctgcccaagtcagacttgggacagcaggtggcatatgccagacttggccctgagaagctctgattgggatttataaggcctatgattactaaaaaacagaaaaattcaaactaccgagtgaaaaatcagtggtacagtagattcaaaagcttaataaacaaaggatcttggggacaggaaataatacaagggatccatggaggtataacatttgagaattctggtgtccttcacctttttgttttcctgcctccttccctccctctcttcctttaaagaacaagcatgtattgagcagttatgtatgcaagccttgtgctaggcactggaaatgagagatgaataaccatgattcctgccctctcggagctcacagactaatggaagagccgatttacagaaagaacacagtgcaacaagttccccaacagggtaagcacacgtgctgaggctgtctaaccccggagcctcagactctttgagatgcaaaggaataaacaataattcccagaaaaggtgacactcaaatggagacctgtcaatcatttttattaggcatttttgctggttacaaaagtaataaatactttttgcaggagatttggaaagcacaagggtgtcagaaaaagaaaacgtcaatcattattttaccattagaggcaaccactaatacattctgaagcatttctctttccatctatgtacttaacatcaatgagttcatcatgtctatacatttgataggctccccagtttacttaacattgaaacataagcacttttccatcaagctcagtccaaatgagtgacccctggatctttgatctgggggaccaagtccaggagcctggaagccagggctggcccagaggagatatgacaagctgggttttggtgagcaggttgagttggcagtgctgtggagcattccacccggggaggaacactgaagatgctggagagctgggtgtggcactcaggagacaattcaggcctagagggtcctcaggtggtggttgacgccatggggatggatgagatccctcagggagggtgtgcagggtgagaagagagatgactagggtaaggtccctgccctctagaagctcacagtctagttgtgttcatgtgcaagtcatttacccccagctagattgtaagctccttgagggcagttaccatttcacacacagcagtccctcgccaaccatgggggttaggtttctgaaaacccctggggcaggagaagtcaggcttcaggaatttaggaccttattggggaaaaaatagggttaggggaatgaagtcaccagtgaacttgtaaaattattatatttttacataatgagaaatgacaatgacaacatattcaaaacactgaatatcagtgacacaaattatcaacatattcttcaattaacaacattttacaacttattttcatgtaccatctatccctttagtagagcttgccccttcacagctacaacaatatgcttgtaaattcacttttgcattgctggaaaaaatacacttgctaagagtccttttcttatgtgtggtttcccatccaattattcaatgcattttggtttttataactccaggctactgacacctgtctcttggtcccacccacaagtgcaagcacacacctacatcctaacaggtaggagtgtgtttctgaggtctgatccaccccctcccactctcctctcttccccaattttactacaaacacctctcctctgcagccatttcacctacttccctcttccccaacctctgggcagatttcatcagttcccccataggaatgagcaaagactcctgaccttgggattctccaaggcttctgacaaagtatgcaaacatgaagttgtcaatattagaatttggtgtctttctttggtagacactagcatatcattcactcactagctcatagtaggtactcaataaattcttgttgaactgagcaatttccaaagtaaaggatgtggacttttttttctctttccccattcactgctccaaatgaatattaaaccttcacacaacataaatattgaaatatttgtaggcacattttattttcccttctggcaggtcatgatgacaagaggcagctaatagatgcaatctatctgcattcacgaaggcagttttgagttccacatgacatgctgtcaatagagtcaaaagatatggccctttagtgaaggaattctccatattttccagctcagaccacttggataaaggaaaacacctactaaccaacgattctcccatgcacatttatgacaaaaaggttgtcgccatgactaaatgggaggactagcactgtttttcatgagatatcaacaaaaccatgtcttttaaatgaaacaataatcagttacatttatacagcactttacattttacaaatgctttcaggtacatttttatctcactttttcttcacagcaactctgcgaggtagtcagagaaggcactgatagttccattttgcagatgaagaaactgaggcttactctaaggaagggaccaaaaggggcaactcactagtcaaatttgataccctttccatctcccatcactgttctgttgccagttgggttacaatgaaaaacacaaaactaaattgcaatgctgttccactgtcatgtaattgccagtgcccaagaggtagcccacccctcgacactcacattctcccattcctcccacccccagttgtcttccctcaaccactatccactccacaagtcagtacccagactggcacatgaagaatctgagtcagtaccagaaatggcattcagcacttcatgcatagaagcaaagctatgaggccaaaaaatccggggggttgaggggggtggtgggggtggttcaccagtcttatctcatttaatcctctgcaaaatactcacaatgatcaccctttcaaagatgcagaaactgaggctcatcatgtgtattagcttggccatggtcacatgcccagagaatgacagtcagcatttgaacccagcttcagttcctggacagcagggcagtcccaagaaagcacttcactggctcagagccacatgtgttccatttcagcctcccagctcagaaggaccttgaccctccgctgaagctgctgccctcatggcaaagcttcttacaaagggtcctcatctggactaaagctggatcacctgacataataattaagccccaaacagccccaaatcctttgtggaaaagaaaatctgctttttaaatgaattcacacagacattttggtttcaattgcaaagaacctaaaatttccaaacaaggaagtggggattcagtccacttattcatttcacaggatctttaaccaaatggcaaaggggaaaaagctcaatgagcacaactaagaaaacataagggttaaattttatgtgtggctgcagagaaatttaaaagccaagttgcagagagagaaagtagactagaggctgccaggggattggggaaggggaaatggggagtgactgctgaataggtacagtttccttttgctgtgatgcaatgtcttggacctacatagaggcgatggttgcacaacactgtgaatgttttaaacaccactaaattgtacactttagaatgactagtggttaactttatgttctgtgaattttacctcattttttttagaaaaagacaataaaaagaatgttgcgtgtgctgagcaaggagtctgacagataaaagatgcctcaggaagtgtttatatgcacaaatgattggaacatacccacctgctcaacattaagataagagttagttatgaaatcccaagacaaaatactgtatatctattcaaaatgatatatatggggaattgtagagccgtagagaaatgtttatggtacaatagaagacagcggggggtgggggaatagtagacaaaatagtagacaaagaggaccagatgaagcttgtcctcttgttcctgaacctgtggatatggaaactcctagcacagggagtgtgcagcaccagagaagactgtgtgcacatgtgcatttgttgacttatgtcactctgcatgcctgcgtgtgtttatgcaacaggcagaggggaggaacttcagaattacattttttacagcttgactctttggtttagtaaattgttatgcctttcaaattcactagtagtaataatgaggaaaacaataacaacaataacattattattattattaacattattattatgcaggtactatttcttccgaggcttatgagctaggcaccctcataagtgtctctcatgcatcatctcacttactgctcacagcaacccatgagaaaggaactcttcccaattttcagtgggggaaactgaggatcacaaagttaaggacttctccaaggtctcacattagtcaagacagaaacaggattttaattaggtctgattgatgctcgtcatttgacaggaaagggagagcatagtcaacatttagaattgtagaagaaggcttagaatgtaaaaaaaaaaaaaaaagacattttttgaaagacacataatcactttagctagaaataacaaccagtaacactctaacatgtttacttgtaattgtttctatgtcttttacatagttgaaataaagctatagatgcaattttgtctactattccccccaccttccattgtaccataaacgtttctctacatctctacagttccccatatatatcattttgaatagatatacaatattttgtccagggatttcataactaactcttatcttaatgtggagcaggtaggtgtgttccaatgatttacgcatataaaaatgatgtggtaaacatttttgtccatctaatttctctgaatgcattgtgatttcaaaaaaaaaaaaaaaaaaaaaaaacaactagctcctagatgtgctcttaactgcatgtccttatctggaactccggatgggcgagaaccccatctatggaggtgtctacaaatgcacacatctggccctgccccagagctgggaccagaatctctacggtgatctccaggttggagtgggggctcactttgatggttccagccttaaccaccgcaccagggctgatgtttcttggcctgactgtgcagacatacaatcttgaccaaagacaaggttctgttctccctacactgtagcacccgagacttgctgacagtcattgtggcatgaggctccttccatcttttggatttctgccacacccccagcctatctgctctattattaacctagtgcaatttttcttcacattcaactgactctttgtttctggaatcaatttattttaaaaggaaaatgtatctcattatcttaagtgaaaaaaacaccatcttttcatgaatagaaaacaaaaaggttaaaaaatgaatatgatgaacaaaacaaggtgaatactgttgcctcctcatccaaactcaggtctctgttaaacagggagatgaacaagcattggcgaggtattaaatacctaccagtgccaaaatcaggctttctcctccactaaatcagaaagattaaagaggaagtgaaacaagactttctcaccatgtgatccaatgttacttaacaccgtgcttaggtaacacacgcaaccatttggtcccagtcccccgtggaaaacacctatctagtccagccttctccatttacacaggaataaaagaacccaagagttaagcgtcaggcctttgtcacatctaagcctggcagcaaagcagaatggagaatctaggtctcctggctcctaagtcttatttgataattctttaaaaactgtatttttaaaaaaatatgggcagcagagtatacagggagagaaatatatatttactctgatctttccttatcagatcccaaagcatattatgatagaagaggttaaggaaacaaagcatatctgtatcaaaaggaaagcaaaaaaatttgatcatcaagtaattattgacaatctacttctgtgccaggctctatgctctgtgctgggcccatcaacagagaacaagagacagtttcctgcccctgacccccaacctgtcagtgtatggggccaatatttggactagaagtggcctgtgtggactgatcattcactcaattcattgctccacgaatatgtatgagtacctaactatgtgtcagatttccataaataatttttatgggaatattgatggtctcttccagacagttactctgatcattctacttactgctaagagtcaaacataagaatggcaggatttaaaagttaggtcagttatagaaaactgttttataaaactgatgctggacgtcttaatgagggatataatttaaaagcattaaacagtttagaaactgttactaataatagctaacaagcaaaccaatcatgtaattagtaataatcagctaacatttgttagatatttatgatatgcttgatatcgtgctaagcactttcgcagatcctgactcaatactcacaagaatcctgctcatctgcaatacacagacttggaaccaaggcttacagaggttaagtaactttcccaagatcctgctgctaataagtagcgagacctagatataaatcaggataggtgacagaaagttaaaacctcccaaaatgtaaaagacatgctttctagaagaaaaatatacatttgttgaaatttgtatcactttaattacattcacaaagaagaggggaaaattttaacctccttcaaagttcatctactagttgaactctttatcagtagttaacaaatgggtgaagatagtgtttcccaaacttttctgtgctaagaatcacctggagggctggttaacaggaattgctgggcctcatccccagggtttctcattcagtagttctagggtggaacctgaagatttgcattttttctttttctttttcttttttttttttttaagagagtcttgctctgtctcacaggctggggtgcaggagcatgatcttggctcactgcaacttctgtctcccaggttcaagtgattcttctgcctcagcctcccaagtagctgggattacaggcaccggtcaccacgcccagctaatttttgtatttttagtacagacatggtttcatcattttggccaggctggtatcgaactcctgacctcaagtgatctgcccaccttggccttccaaagtgccaggattacaggtgtaagccaccatgctgggccaaccactgcgcccagccatctttccttttcttttccttttggttaaaatcctagagaaaaacttaggaaaaactctactggatgctggccaagatttgcatttctaacaagctcccaggtgaagctgatgctgctggtccggagaccacacttagagaaacgccaggttatgagttcgtgggctttagaattagacagacttgggtcggaaccttgatttttccatttgctttatgtgcaagtcacagaggcagagctacttatctaaaaaagagaatatcactattgaataaaatcgttttgaggattacattaaacaagaatatgtaacctctgtaataatctcccaaatacctggcatatacaggtattcaacacactggctttgttaatattattgacaaacaatccactaggaaaaatgtctaataacttttccactacatgctttattggagatggaaaggaagaaaattgcattttgggggattgtgatatttcctcccaataagtttgtcttttttatgcataaagatgttagaaaatggtggctgatgaaaaaggaaggcatatgcagtggaaacccatcaaagccaaatgccaggagttgagaagggcagctcttttcccagcacccatcaggtggtacagaaggacttgtaggcaaaattagaggtgcttgatgggatctgggctcagtggaagctcatagcagaattaataattatcacataacaatataattgcatggcctttttaaggcactttactgttgaatggaataaataagaagtattaagttctccttttggtcttcctttgcctgaattataaagtgttgtctatgagggatattttgtgtgtgtgtgtgtgtgtgtgtgtgtgtgtgtgtgtgtgtgcgcgcgcgcgcgtgcgtgcacgcgcacgcacatgcgtgagagttagtggttttagaataagctgtagagataaattttgttgtgagcttctcttccagaaaaaaaaaaaaagattatactaaggaatagaaattggcattggagctaaaaatagctgtgtggtagagtggtgggaacacttgggcacattttagagctgtttaggagtgtttaaagcatttaaaggtagattctggggcatagagcaggactgaaatcatctgatgaggcatacatttctaaggctattcacaggttcataagagtgaggcatatttgtgtgacccagtggagaagggttaaaatggaatgaggggcggcaggaatccagcgtggctagggaatttcaccagctgcgcctttgctgatgcactttaactcttggagctgcaggttcccatgaaggagggtggaagaatagcccccccggaaccattctggctgctccatagctgccccctctagtccaggtctcagctcaaatgcagtctgcctgaccacgcacaccagctgtagcagacactacggatgccctcaacccacctgcagcctccatagactgcttccactccataaatgcttcctaactcaagtcagacacatatttctctgctttgggactctctggaggtggaggctccacaaccaatgaggaacatctgtaggtggatacataccccagctttcttggcccctgatggaacaatagtccagcaaatgtgtcagtgtccctctgagggtcccagcaggaatgagctctagttgcccacagtggtaacctaatcattaaattaccctctgtttacaggggtatccaatcttttggcttccttgagccacactggaagaagaactgtcttgggccacacataaaatacactaaaatgatagctgatgatctagaaaaaaaatagcaaaaaaacccatagtttttaaaaagtttacgaatttgtgttgggccgcattcaaaaccattctgggcttcatggagcctgcaggctgcgggttggacaagcttgctctattagcttcccttcctttcccatttcacttccttactttctcagcaggcttcctggaatcaccttgcaaattgttacctacactcaaatccttttctcagggctttaggaagaacccaaactaagacaatatctaaggtccccagcacctctccagtgctccatcataccacactgtttaatttcctctctgatcactttctgaacttacttgtttcctcttctcagttctccacaagggcagagagactggttctactgcatccccatcacctagaactgtgcctgactggggctcaatacatattaactgactaaatgaccactttgaaatggcttcctcctacaattgtttctataaacaggaattacactattatcacttgatatcaactccatctttttcccagaatatagtcctgtcctaacacatatgtatgaacaggcagagaagtgtatatgaaaagagttttggaattcaaagagctgtgactttgggcaatttatttgccttctctgacctttcctgaggccatctcaaaattaggaatagtattgcctgcctgatgggtttacagtgaaggctaggagcttaggagatgtgaagtgcctggtacgtggtaggcatttaataagtgtgagtttcttgcttgcccgtttctttcacttaccttctctctaaacctccatagtaagtcctgtactctacagggagggttctttgagaacctttctccatgtcgggcctacctctgtccttgttaatcatccctgtgcccctctacacacacatacacacacacacacatacaaacacacactcaagtggatatggtcactcattacagggccagcacccatattctctactagcttgtactttctgcttccatgtggtagatcctggcccttctatccaggctacttggccatttcacagataggaaaagtgaggctcagagagggtaagtttaaagcttctgggctagtaggacacacagactgcctgactcctgaacccttgatcttccccaggccatggtattttcattaggctccctagaaatctagaggccacagtggctgtgactgagtattgtcctaaaagcctgctgagatgtgtagcaatataaacccttgtgctaaatggctctccccttgcttttgtttgatgataactaatacaatgccctaggcactatcccacacaaactcttccagggggtattattagcccattttacagttgagaaaactgagactcagaacatgatagaagcgatttgctctccagcgtgaagcaagtaagcagtagaagcaagaatcaggactaggtctgtaaagcctatgctgcacttaggctacaccaccctcctggccttgcgctgcagccttcctctcttcccccttgtcatttattgcatcttcttggtgctcttctgctacagcccttctccctccagtctttctttccaccaaaagctggaaagagggacatccaacagattgcaagctccttgaggttttggggtttttggtttttggtttcctctatctcatctccaggcacagttgtaagctcaggaagaatttgttcaatggaagtgatcaaagccttaacagagtggatgggatgtttcacttctcttccaactctagaaggctactcctctgatagtcctatttcagctctgtcaatgtgtgaagacaagtattgggcagcaattcaaaccactgaacaacattattaaacatcaacaaatgctcatcttcaagaggaaattctatggtagtgggagccgatattcctgactccagcttcacaaaggagtctagcagagcactgatgcttggctcagccacaaccacagagctgcactggctcagccttcctgttagaagtcaggccctggtggccaggcctggcatggactgggtgccaccaccaggacagctcaggagccctcccgaacaccccaagaggacacagccttcccagctctgctagcaagttagccggttggtaaagcccaagagcattctcaagaagcatccgcatcactgaaagcctgccacgtaaggataaccaacaggctgtgagatgtcaggccccaggaatggcaaagatggccagctccctcatgatggcccagctgggtgacagaccctctgttgtctgtaagcccaggacagccttagcgacagccctcgtaagacagttggggtccaccagttaccaagtgatttccctgactttggaacacccaaccccattccacacagagtgaggtggctaacagtagactctagagctgaattatctggaatcaagtcccagctccaacttactacccatgtgaccttggataagtcacctaacctgtctatgctttggtttcctcacatacgaggtaggaaaagtaacagtccttacttcctaggtttgtaagaaaattaaattcattatttataaagtgattaaaacagcactatggcataaaaatactttataaatatgtatcaaataaatactcatcccatctcccagtaacttccaactactaacctcttggaaaacactcctgattatcatgttttcgtgcatgcatccattcattcatttattttttcttctcctatctgctcccataacattctgtcttacaactctggatcactgcagcctattccatgagcatcttctttgcaccacagccaggcactgtgtcagtattaagaatggaactagacaacactcagtccagaaaggaaggcagacacagatatgagtcactacataacaaaggcaagggcaggtgctagaggcacccatggtgggtacctttgtgaagcattagttacagcatgtcctaatgatgtggtaataactaaaggccatcaaatcaggctactgcaaataaaaacctatttatttatgtccacaagggcaggttcattttcaaagggctgtaaccaaaaaatagaatgagaatcagaaaatgaagtcagagtaaaaacacacattctgggcaccttgtgttccaaatctgccctcatttcatcacataggattcccaaatctcccagcaattgtccccagttcccaaggtgtctacaggctcacactccaggctgcgcaccactcctttgggaaaactccctgcttcctaagaagctggctgtggactgcaggtttcagctccttggactccatagccttttccagcaagaagctaggcagctctgcctttccctttccccgcctccctggcacgctccatcctgacacagagagtccagctcctcctactgattggtcagcagacatgagagagaagacacaaggttcccatgagaccttcacggccagcccctaacagctgcctcagctggagagggttgtttcactctaatttgcagatgattctagctcatgaaaactgcttattaggaatgttggttcaacataccaaccaaatgtaatgcataaatcttgtttgtatcctagtttaggagaaaaaaaaagccataaaaacatttttgaacaattggggcaatctgaatatggattagaagttagatgataactgtaaattattattacttttcttaggaataaacatcatattgtggttatgtagaagaatgtccttgcttttagaagtggcatgctaaagtatgtaaaaaagaatcatgtctgcaaaaaaaaggagaaaaatatatatctacacatatgcatgcacacactgataagtcatagacggcaaatattttaagaaaaagaaagatcaattccttgtggctctgcatggagcttattcatgtaccctatattaagaacagaaaaaaaaagagtaacagaaacacaagatacgtataatttatctctatacctcaaaattcaacttgactttgctctcaaagggagacagatcccttggtcctgccctgcaactccactcacacacacatgaacacatatacacacatgtgtacacacacacacacacacacacacacgcacacaaacatgcacatgcacgcactggaaaagcacttccttcaaagtcaaagccctaagagacatcccagaatagctggcctggaatagtaaaaagagctttcgactctgcactggaagacctggattcaacctctgctgcacagtagctggtgatcttgagaagccactgaactaacctgagtctcactttccacactgtgacaagggactgtaatcatcctgcctcccaatcccagagtattggtccaaggaccagaagaaagagtggctatagagatgccatctgaatatgccttattactgcctatgctgacaagtaaaacatgccaactcaaactcgagaagggtatcaacctgctgccgaaagcttcttctgtgccagtcttctggaattgggcctctaagagtggactgttccaagttgctggccactggaaacagatgtaactctttgagccctatatgttatggcagaagcaaaaaaaacacaacttgctttttcatttttttaaaacagtaattcccaaagctgtcttatataaatggatctgaaacacagatcacagagagaggggctgagcagagacatggaacccaaccaagcagccctgcctgaatcatgggcaaaaaatgtcaaaaccttggccgggtgcctcctgagctccttgaacctaaaactcgggcagaaaacctcattcattcagaatccattaattctgatcatttagacacggcctcagctgaccttgccaccgttctatctgtggaaagcggcctggcttaggggagaggcctcgtggtgcaggggcaagcatgctgactggggccaggaggccggttccctcttcaccccaccactttgcagccctggacaaggcacctttcttcctcagcctctgtttccatgtctgtaagatgacagggttgcattaagactgtctctctcttgtccgattctaagattctatgattagtcacttcctttgggaagtccttccaatcctcaaagaatgtctgctgaacagaactgggatctgtgaaattaaagcatgtttaatcaaccaaaaagaacaaactgtttcagagcactttggaagcactcatgtctatgcccccaaggaagtaaagtgcattttggttttcacccaggttgactcacgtgaattttcattcgtttacaggtggtttagggtatttaagtattccgcatacctgaaaataataaataatgctatcattatagacaagcatttgggtcatccactataggtcagactcggtgctcagggctttatgtatattaactccttcaaaggccccaggaatgatgtgatgtaggtttaccatctccactttcatatggaaaagctgcagctcagagagcttaagtagcttgcccaaggtgacagtgagtgctggggctgggagtcaaactccactcactgtggtggcatctgaagagaactcatcatcttgtaaacaaactccagcatgaggatgtgatttgtctttccttgtactgaacattaacttaaacatactttattgagctatatttgatatacaataaactgtacatgtttaaattgcacaacctgatgagttttgatatcagtatacaactgtgaaaacaccactacaatcaaaatagtaaccatattcacatcatcccccaaatttccccatcccccttgataatccctcccaccccttcaccctctccaggcaacccctgacctgcttcctatcacaatagattactctgcaatttgtgaaatttaacataaaaggaatcatacagtatacatgcttttgagtctggctttttccactcagtataattattttgagattgatccatgttgttgggctaatcaagaatttattcctttttcactgctgattaacattccattttatggatataccacaatgtgtttatccattcacctgttgatggacatttgggtgacttacaatttttggctattacaaatagaggtgcctcaaacattcttgtacaggtctttgtatctcaatacgctttcacttccctggggtaaatacctaggagtggaatggctgggtcacaaggtaggtatgtatttatggttttaagaagctgccaagctgttctctgaagtagtagtctccttttacatttctgttgctccatatcctcaccaacacgtgtatggtcagtctttttaattttagacattcgagtgggtttgaagtggtatcttgtggcggttttaattttcatttctctaatgactaatgatactgagcattctttcatgtgcctcttttttgacaaaagaaactcttcagctataacataaaaatttggtaaaattaacattactggtttctgtttattaaggtacaaccctactatgtgacagatatgatgctaagaggtttacatgcactgtatcatctcaccctcataacaacctaacgagatggtattaagatccgggtttccagatggggaaactgaggcttaacaaggtcaggtaatttgcctcaagtcacaaattaattggtggcaggctcagggtttctctccaggtctctgctccaaatcctgtagggtatgcctgctactaacactgcttttgcgcaaagcttgcgtcttctatctcaggtacagttaggattttggtacataaccagacaatggcaaaaaaaaaagaaaaaaaaagacagacactacaggcaactgtaacatcaacgctttcttgccactcacacagtcattccttgtttgctagaaacctaggacagtttagccaagatatactgtggctgaggtcctgatcaatatctcaatactgtataacattaagggcaaaacagatatctggaaagtagttaactgagagtctcaaatctaagggctggcataagaatgtcaatgtttagcacatttatgttgtgctgaagaaatggcttaaaagaactttacttttgctctttaaaggcaggtgtgtttcatgcgttgactcttacgtaagcactgaaaacatgtctagagtttcctttagcccagagactaagtcctggcaccaagggcaaggcagtgtagtgcaagggaaacctcagcagctttgagcaggtcagccagcctctttggacttcagcgtcttcctctgggctgtttgttgatggctcaaaggggactggtccctcttatccttttttgtgcccagatgccgttgtttggacttaaagatttacaggaaataccaaccacaagagtggttggtaaacatgaccacagtggtagtaaacattaccacatagcaaagagagctgtacctgagtagaagaagtttcaacttcgcattctgcttctaaaagcttggctttgaaccatggtgtttatgccccatgtccaaagaattacattgtcctttgaagaacactatgtatgtctcctatagtcctggataatgctcatgacatccctgctcatacttgcaatatgacatcatctatgtaaagtgtccttgcttcatcagaatagaatccaagctccttgtggccttctttcttcctgaggtcgcctcatcccactccatatcccccaggtatgtgcttttctggaacctccacaccttttctcatgctctctcctctggaagaatcactccacatttccctactcagagattgccaaaaccctcagagcccagtaataagaagttctctcctcttgaaagcctttcttactgacctccaggcagatcttgtcactctttaatggcactcttcctggctggggtgcaggcttcaaggaaggcccttttcctacagtatactttaaacggtgtatgtatcagtagtgggattgtctgtctcctcgcactagactagtactgcctaatagaaagcaaacataaatatgacaaacaaggatgcataataagtaacataaattatatattatatatgatacaaatacaatttaaaattctattctagccgcatttcaagggtccaacagttgcatctgaccaatggctaccctattggaggacagagatgcaggacatttccatcattacagaaacctctactgaaaagcacctacctagaatctctctgtggggatttcttatcaacttgcttctttagggtataatggatttccctaaacaagcaaaaacactgaaactacagtatgcaggacatgaaaacaacaagaatactgatactaatggttgcaagatgccacttgtatctgttgagtcatagccaatcatgtggcttacaagctggctctaaacgccaattctggctcttatgaatcccaccaatctattctccctcatatggctccaccacccaacacaacatcctctgctctagccctactgaaacatgatttctcattttcctgtggatgtgcatatgctattccctgcaactggaatgtcctctctggtcaccctggtgaactctgatgacccttcagtacagttagttcatgcttcacctcttctgtgagaccctgcctgactgcccccatgcagaggtggctcttgtatgtcccctgtacatttacaccccactccaattactccattacgtggctgtgtcttccaacaggttgtcatctctttgaaggcagggattggctttcctctgactttgcccagcacttttacagtgcctggaaattggacactcttaacagacattagttgaatgactgaactcccacattcccaaagaggcatacagccttgtgtttagcaatggtggcatcacttgaataaatgtatggcctctccaggtgccacctctgaaggaagtcaaactcattggattgtttatattccaggtcacatctagactaggcttagctcatacttgtttgaagcataggattgacagaagcccacgagggcagctgagccatttccctgcctccaggacaaactcgcatctaaagtggtgaaggagatgaaaagcctacctggcttttcaaaaacacatggaaggatcaaaaaccactcccagcaagtcatggcaatgttgaatcaagaactgagggcacctccctctacccgctgagtcagtggcctttgtctgctttgtgactcacctcactgcttataaaccaccagagcacttgggaacagggcagtcgagctgttcacacccacaggtaagaggtcagctcccttcctccatgttcccaatggcacccttagcacccacggcacggggatggatgtgttccctcctgactcatcagaaggtaactgggtggctaccttgctctgtctagtaagtcagggatggatagtggatgagatggttaaattagattggcaaaaaggaaactcacattctggacttgacagtgtgatatgtactttgtatgggctcaaatcccactatgaggccagttaccagccatgggtcacgttgcttgacatttcctagtttcatttcctcagctttaatgaagataacacccataacctggttggttgtaaggaggtaaagagattaggtctgctacacagtaggggtgcaaagcatgtcagacatcatccacatctccactccttggcctgacgtcccatgaactggcttcgtgggttggcacaaactccttcccttctctgggccttcagtttccccagctacctaggtgagccaaattattccttagttccttcaagatacaaggtgggtgcggggagggagtttgagtatgagacttcctatgtgatattttatgtgtatgtgcatgtgtgtgtgagtgagagagagaatgaatgaatgagaaaccatttattttaaagttcccttaatggaataagacagatttaaatattttgaatccaacccactgtgttctctttgttccatatatgtattttaaaagcttatctttgtcttttagctccttcaaggatgcaaatccttcccaatctatggtaaaggttttctccctcctgatcatttgaaatacatttttttaacatgttaaatccttactctttgtatttaaatactttgatgttttccataaaataggttgggaagggttagaacaaaaacgcatttcatttatctgaactactaagatgtcagaaagagaggcagcttgcagcctcccaagagggaaacactcagcccctgcaggactctccaagcttcctgcttggaccatatcactaagacaggaaccataatcagaaccctacagattcagaaatccacaaagttagcacttcccaaagagcttctgaagaaaccctactcttgtgagagtgctaaaaatggttttgctttagaaaaaagaaaactcatattagaagtttgggaactcttatgtgctatttatgcctctcttggagattcgcataagcatagtgaagactctgagactttctgcagcatgaaaatacattaacctctctaatttggcatttatcaaacttatttggacacaaaccagtttttttttggggggtgggggatggttatttgctcctatggtgaaaaggaaaaaagaaaaaactattacccctccacatgctcacacatccacacaatacggaaaaaatatttgaaacctagtccctggagctgggatgggacagaggtaggagcagtcactccagagtcagataaacccaggttcaatgctaattccaccagcagtgtagcctcagggatgatacttcaacttccagaagtttccaaagctttccaaaccttccaaagctttcacttagctttgctgtaagtgaaaaccaggcttctagagtgcttgtgtgtgcattagatgagtcgaggagtgcacaaaggtatctggtagggagtattttttaaatgtgtaaactattttttaaacgtgactctccctactctccctttgcttttctctttgcaaaatcacaagtagaggcattcgaaagcacactggtcaatttttgcaatgcttataaagctttaaatcaaattatttcacataagaggctatcttggaatatcattccattaccttgtctatatgttttcataaataaagtcaccccccctcaaaaaaaaggtagggccactttcatccatatgtatgtgaaggagaacctagtatttcatacagctatctgaaatttaatatcaaggaatttacctgtgtcaaatattactttatttaacagaatgtgatatcgcttgatatagtcataaagtgcattcctatcaaaatacagctgttattaacattactaacaactgctttaccccagtgatttttattgaaactataacgatgggcacttttgaaataagtgttcctagctaatttgcagagggctatctcccagagagagttcatattataattctaacggggttttcacacaaggtagaatgaggagtttaaaatgcttgaaagagagtcatctcgaggtcaccaataattaaataggagctaaaggaacggaacaaggaaaatgtgtaatcttccctggctctgaaattaaaaaaaaaaaaaaacagttatcagcaagacagtgcttctgcagggaggctgatctcgatctacagtaggattcctttcaaaccaggatgtctatttcaaaatgcccattaaaagtctatgatggactttaattatgagaggcagcagataagagtccagttcattccctcctgttgtcggggtggtttagagctgccaatcatcacccccttcaatgaggcccaaggtgcagatacccctttcaagaggctggctagactgtgagggaagggctcttaacgcacaccccacacgtggcgcctgtgaagtgcaatgaagggacctcctgctagggctgcaacaatcttcccattcccccaggatgcaataaccaagggaaccacatccctgcttctcagtgctcaaccttctgaggctcatcttctcaactctgttcacctccacagtgtttgtgggtgatttgatctggtactccttaagctaatggtgacaggggcctgttagcttaaggagtaccatattaaatcacccacatggttcttacacacacacacacacacacacacacacacacacagagtaaaggacagagcagcagcagtccagctcagtagaagcagcaccagctctacagtaagaaagaccagagtttgaatcctgattccttcacttcctgctgtgtggtcttgggcaatttacttaccatctctttttgtaacatggagactagatacctgtcatctataatacctgtcacctatgtttaatatggggcccctaattcataataggatacctaagaatgtcattccccaaaaaaagcagaggccctgcagtcaatgtttgtctgcctccatgagtgcctaaaaaacaactccctccaccccaagagagaaactcgctggagaggccagctgagaaagaaaaatgttaaataattcagaagcactaacatcaagtctgaggtaggtataaaaatagttacaaaacaccacactcctcttgttttccttacagcaaccttggctccctggtagaacagagggagggagggtctgacccaaggctggttctgggcctggggcagggactgtggcccaggagcctctctgggcttctattttggctcttctaatcactcctctttgtacaaaggtaaggcaggcatttgcttgtcacctctacattttaaaacagccttctgataggccgacttatttttaaactgaaagtatgctcagctgggccatttgaatcagagggaattctttgcatcctgtcttctaaagtagaccaactggtgagccttccaaggatgccggacccaatcccaaagcttaagttaaaaggagaaggctgggaggctgtcctaaacccaatcccccaaggagtcccatgccattggcctgtgtcatccagaaagactatgctgtccctaaaagcacagatactgggaagagaacaggaagattccaactggagaggtaacattgactaagcacctaccatgtgccaggcaccctgccagatcctttacctatattatctcctgaagccctcacaatatatcccaaatcagttgcaacccccacccccgccattgtacagatgaagaaaccgaggcccagggaagtgaagacacttcctacggcaaagttccactaaagagtcagggctaaaactgagttggtctgactcgtagcctgtgctttctcccccataccatccacaagagcagagcatgtggtttgaaagggtcttcatgaaatattcaactgcatttgtagctcctgtctcgttcaagccagctctgaatgcttacaagtgcatttttttttttttttttttttttgcaaggaaactgcatgggtacaaatttccaattcatacttaacaaggtggggaaacgggtcattcttggcctgctccagaacaaggggcgagtctatgcactcctggagcagcaggcgcagggagggttaaatgtgaggccagaaccaaatctcctgtttccaggagctgaggatttagaagagtctctttggttgatttttacaggagagaagaaggagtgaccagcaagtgagaggaggcctgcaagggtagaggaaggaggatgaataataataatcacaatacttctagtccttttggaaaatatgttctcatccttcaagtcgacgtcaaatgcttcccactttttgaagcttccctgcctcccccactaacctgggtgtgaaggttctttctcagatgtgtctgtctactttgtgccaggctccctggtagaagcttgattaatgctatttcatttcattcttacagcaggtattgttgtcatacattaaaaaagatggaactaataccaagagtttagtttgtctgccaaaagtcatacaagctagtccagtggcttccaaccagggacggacaatcttggcaattctttgctcagtgaacttttggcaatgtctgtcaacatttttggttgtcacaattggcggggaaggcactggaatctagtagatagaggccagggatgctgcccaacatccgtgattcacagaacaccccctacaacaaagaattatctggtcatttgtggcaaagttggccaggtgcagtagctcacacctacaatgccagcactttgggaaggctgagataggaggatcacttaaactcatgagttcgagaccagcctggacaacatggcaaaacctagtctctacaaaacaaaacaaaacaaaaattagccaggtatgatggctggatgcctgtagtcctagctcttatacttggggaactgaggtgggagaatcatttaagctcaggagaatcaattatgcccaggaggtcaaggctgcagtgagccctaatcacatcactgcactccagcctgggcaatagaaccagaccctgtctccaaaaaaaaaaaatacaaaaaggctggcacagaggctcacgcctgtaatcccaacactttgggaggccgaggcgggcggatcatgaggtcaggatatcgagaccaccctggttaacacggtgaaatcccatctctactaaaaatacaaaaaattagccaggcgtggtggcggacgcctattgtcccagttactcaggaggctaaggcaggagaatggcataaacctgggaggcagagcttgcagtgagccgagatcacaccactgcactccagcctgggagacagaatgagactccatttcacacacacaaaaaaaagtcaggggtgccgaagttgagaaagcctggtctagttgtggctcagcccagatttaaacttaggtcagtctgactcttcagctgataatgtcttaatagtacctttaactggatcctaagtgccttgagatctgagtggcgtaccctcctgcttttctgtcttgaatcacatctactccagagcccagctcactccgcaggcccttactgattggattaatcagtatacttaacaacggtgctaaggatcaaggtgaggagtgtaccaaagggacccagcctttctgtagctgaacttttcaggaggacattgagtccaatttctcaccccctgcaggaagcttcttaatagacttgacagcactgcttgccctcctccaatgacagggagctcactccctccacaagctgtctaatctcttctgggatgttctggctgatgctgaactaaagccagctctccccacatccctagcacatctcagtgtctggagcctttggggaaagactcttggttagctactaagagactagccctaaactcctggccatgttctcctgagtcctagaaaagtgaagtagaagaacacggacttggagccagactgatccaaattcaaatcctggcaacactactcatatagtcagtgatggagcataacaagactgttggcagtgttgctgtgctcagcacacagtaggtgcctcttagcacacagtaggggcacaaatggcctatctatctgaggtggcaggacctgctcacgtggccttggctcccatccctctggtataagctctgtgacatctctttggtctctgcctgcctgcctgcctctggggtccacttctgaacaagtgaatttaattccatgattattgaggggaaagaacagtgagacatgtgatgacaacagatcaagaaataacaaccataagagtgaacaaggcaacattttgacttgaaaagttctaggaatgtgctgtaaattataggtgtgtgcccacacacctgtgcacaaacatgtgccaaaatgtgggggtctttcagaaacctactttgaggccttgagaccatcacccacactctggtctagaatgaatttccccacactatttcccaccttcaggagtaggctatgaaaggagtatctccttccaaaattaattcttgaaacaaggctttgttcatcagtgcaggcagatgtgagaagaggatacatatcttctattaaaaatgttagctaacaagttcagatgacatcaaaagatggtgtgtatcttgttcctcccaccaggtataagatattcaagttccccatcccctccatggctcatgaacttacaaccagcacctcctggagaggaacatttgctttacggacaggtggatgtctgtaggggaccctggctccctgactcactggtagagtgacctcaggcaagatgtctaacctcattgagtccctgttgcccctctggaaaatgggaactaacaagaccttactcagctccatgtgaataaatgcgataatataggccaaatgcctcacacaattcaacaaagaggatcctgtgatcatccagatgagagaagatcggagtgaacccaggtggtagcagtggagagcatgaagagtggtccgctgtgaggttatggctggaaagcagagccaatatgatttcctgacggctgagctataaggtatgaaaacaaaaacaggagtcaaagatgactccaaaatttgaggcctgtgaaccagaaggacggagttaccattagctgagctaggaaggattgccagtaaagcaggtctttcagggaagatgagtttcggatgtgttaggtgtgagacacatatgagattattcaaataaaaatagcaaggaggcagttggatatatgaatctagaatttgatagacacagtattggtacctttcattccccttttcttctctcctttaaaactgcagataccttcacagatccaggaagcaagatatggcctagatcaatcttaatgacctagtgaccatctacccctgtgtgatgcagttcagcacacatgaaccaggaggtgaagtggcagagggggctgtctgctcagggcttctccagtgccaccatggtaccctggtgacacaaaatgggaatgatgaaactccctacacaacacaagaatgatgaaaacttccctggtcaaactactaccagactagagggaccctggtcttggttccatgcttccacaggcccatcacggatcagcacattgtcagaagctttaaaaagctgcattatctttgacctagaaatttcaagtaaagaaattggactgaagaaaataaacagacaactacatgaaaatgttgatctcagcattatttatggtggtgagaaatggaatacaacaatagaaaattagttaaataaataatggtatatccttatgagggaatactacatagctattaaacatcatgttggaggaaaaattaatggaacggggaaacgatcgtgatagattaaggttgcaaaacaatgtgtgtaatgtgctccaaattatggtgggagagggtagtggtgagaattaggattttacatagaaacaatactggaaagaaaatcaaaaggttaggagaaactacctctccatggcaagattatgggttctttttcttgttctctgtgttatcttaggtttcctaaattttctgttgtttatatgcattattgtcataatcagaagaaaaccacattaaacaaaaacataataaaggttataaaattttcaaagtaatacttatcctagtaataaaaatcactgcctattccacaaggtgccatgaggcttaatgtgcttgaagatataaaagaagcctggagagtataacataatacgtggaactggaatctttccacggcatgatgataatggccactatttactctgtctacttcacactacaattgcctccactgaggctacaacaatactgacaaacggttgcacaaaactgacagattccattcactcaatgacagtctgcatctgatgctcctggacctaagaagacagaagggagaaagcagaagcaggaaggaagaccaaggtcttagagctctgctaagccaagtgtggccttagactggcggcatcaacatctcctggaagcttgtcagaaatgcaggagctgaggcccatgctcccacccactgaatcagaacttgcatttcaataagttctcagatggtacctatgcacattaaatgttaaaagccctctccaaaatacaacacatttccccagtttgaggtgggtttgagaagatctcaagaaaaaatcagaccgctgagtagaagtacttctcaaccaaaaatttattgtctaagagatgtaaaatcaccaaatcatgcataagtgaagagcctccaggcctttgggtcatgctaagtctctgtcactaaccctggaaagctattatcatctgataagcattttataggatgtggacagaaatcaagcattctctcttccacttgaagaatgctgaggccttgccagcttggtggagggttgtgcatgaatggttaatggggcacagcccagaagtgaacagaaaagaaacaaaagtaggtcaaaggactatcatgacatctccaggcaagggccaggcatttcccagcactcagaaggcagctgtgttggaatcagaagaggacaggctgagtaagaaggccacttttctgacccaaatgccccagtttgccaaaaacgagggcaggggtgggaaagaaaccttgattaccatatctgcagtcccatggctcaaacaaattaggtcactcacctcgtacataaattactcaatataagatccctttatgctgctttgaaaatggaggagactaacattcagtaaggctgtattctatgcagcatttctcaagcctgctgtaccttagaatcacctgggcagctttacagagttctgatgactagttcccacctggaacagttgtagagcaatctgtggtgggggcatggtgctagtctttggtaaaaagcacctaggtgattctaatgcaccgccagggtcaagtaactctaaatctagtgcctgacagcagctcagagaaacaggtgtaatatcattctcatttttaacatgatcaagctggtgcaaggtggcaaagaaacagagctggaatttgagccaggatctgctgtctcaatctagagccctttggtttttctatgtctacaggcaactttattttcaggggacaagaaagctaggggtcctctcagagtctgacctgaaataacctgcaatagactcctatagaacctccctctattcacatccttccccctcccgcctcctccccaataaacacctgcactcgccaccggactgtgctgacagggtccagaagcaggagccagcggaccagcagctgagaggtggggagatagtggggaaaagagcaatgccaggagctaccattcacatagacagtgattatcaggcactacccaagctacttcgtgaatcccacaacaacccttggaggtagacacttctattttctattttctaactgaaaaaaaaaaatgatggaagcatagacaatccaaggaacttgcttgaatgcatacagctagtaggtagcaaagcagagaattcaacccaaaacctgttggcattttttcactgtcttatatggccttagtcttatatggacttaactgcaatatatgggagaaccatcagtagcagagaaaaatgaagcagtgacttagtggtacctcaataaattacttctaaagctttggaaataatggtgctgattcaaggatggcaaggactcacaacactgtcacaaagattactgcatgataatcctaccaacaaccctgccaaagacttattattatcccaatgttatggaaaagaaaactatggcacacagacattaagtaatttgaccaaggtcccacagatagaaagtgtgagaactgggagttgtagctgatgacaaatttagtgcctctttcaagccaccaagaggtgaaatttgggaggagaccttgtttcaaggtggcaaaaagtgagctgaaccactagtgagcagtttacattcttcctggaatgtggcttggctgctgtcacttagcagcgttgggctacttttttagttaggcatgtttgtttcaatcattcaacctgcgaaaaaaaaaaaaagaaaaaagaaaaaaaaaaggaatgtctgctttatttattccttgagaggaacaagtagcaaggctgggaaatgttgaggggttaatggcaccacaatgaactgcagcccagggaaaccaataagcaaaatacaatggcccagatgggaacagaacttccaaacctgtaccagagagagcataagactcagagtcagccagacatctgtccaggtcctgagcctgccattcacaagcccttatggcaggggtcatgttgagtaaccacctgatgcctactctccctcttctggagagtgatgatcctacaatctcaagagagtggcacaagcacaaaaggagtgtacattctaaagggtgctgcaccccaggcatggaagacatttgcatttttatttacccatatgtgccagatgtcccactgaagtgagcacaatccacacagccatgagatatggggtagattctattgcttccctctttatagatgaggacattgaggaacagaagggtcgcccaaggtcccatggcaaggaggtgatgatggttcagggtctgaatctagttctttccatctttgaagttgatgtcttctgcaataccccatgctgctcagtcagaatcacctactacatgtagaaatgtacttaaatggccataaagagaattcagttttaacattagaaagaacatctaggccttgaaggcagacaaactctagaatagataagccagaagttccaaacgtgctagaaaaaacagattaggagcagctaggagtctctgaggcattctatagcagaaagagcacagggacgcaccgttgccaattttcttaggttagttcaattaataaattaaataaataaataaaacacaaaacttaataaagaaaaaagtcgaaacaatcttccccaaaccatcaaaaattctattaattcataagctactactcagtactttatttctctagtcctgcttcaacaaatatctacttttaaaaatacttttggggtttagcagtatagtgtttagtattttttaaacataatttttatcatggcattttcccttgtcacaaaacacattttcaaaacaatacgtaatctttgaataatattccgctgctaggcttggccacattttacttattccacccaattgtttacctttttcctctcttttataaataacactgcaatgaacatttttattcttaaattttctctgcccatctctgattattttctttggctagattcctagaatcagaatactggactaaacggaataagtgttccgaagtctactgacagttactgccaaattgcttacctaaaagggtatattaatttgcatttcaaccagcagcaaaggagagtacctgtctcccagcaccctctccaggatccaacactgccttaaaaataatctcagctagtaagacaagtgaaaaatagcagcatgaatcagcatagagcattcaaatagtctgcctgtagtcatacatcatttaaatagtcatctacctgtagtcatacattcagtacgtggcatacccaggaaatgaacccagtcctctagctccagaagctgggtccctaaccattagcccaaagaacttaaccacaacttgaattactcagtagttgccatgtgtcagctattgttttaggaaattttacattggagttcacaatggcaaggatccttgcatttttttttaatcccaaccttaatcgaatgtcttacaatgatagaaatgttctataactgcactgtcgagtatggcagccactaaccacatgtggctgttgagcacttgaaatctggctagtgcaaccaaggaaataaatgattagttttgtttcattttaattaaatttagtttaaaatgtgactagtgactactatattgcatagaatagctctagattatctagtgcattgctcaataaatatttatgaagtaaaaaacttacatggtcttctaattccacctacttctaccacatttctttcaaggcaagagctgccttcttcctccctcatctctgtgtgtccatttgttttctccaatgcaacgtgaatgctatttatctgtcatgtgggatgatgtgagggtcagctaattaatgtttgcaaagagctgcattgctgactggttctcagaataattgcacattaataaaacgtttaaatgatcagttctcatcctgaggtcaaagcagagctgggtttatttagtaaaaagctggtttctctgactcaccctgaactggatcctttcactgtggacctcatcaatacaagcccttcacatttaaaagttttttaccgaacagaagatactgaaatttaccttcacaatagttttgatgtcacagtttgatgagtaaattaataatacaaacaaggttggggagggtggatatttaaccaacttgaacaaattgcttttaagctcttaagcactttaattgcttgcatgataatgatgcaaatttttacatgtctcgatccactttcaaagtaggcccagaaaaaggacctctaaagggaaacactttgctaaattatcagtttgaattacatggcatattctcgaaagttacaaagttgccattctaggagaaacaaggatttaggagccagagaggcctaccatcaaatgctagttctagtggtgtgaccctgggctcagccttactgagcttcagtttctctgacacacagaaagcattgagtatgtgttcgttttgttcttgcctcattttccatctcctataggatcacaggatgagaggactgatgctgcccctctgcactttatttccactgtttgtggaaataaagattattccccaaatctaaaatgaaagaatgggcacatccctttatagtgtcattctacaaatataagcaactcctcttgacatccaggggtcatgattatgactttctgaaataaagtcagagcagtagatagcttgaaatcttgctactccatgtgtggacaatggaccaggagcatggcagcacctgggagctggcgaaaaatgcagattcttgggcccctccccagaccaaatgaagtagaatctgcatcttaacaagatcccagaactaggggtgtgcacattagagtttgagattgcactaacttaacaagacatggaaaccactctcttctcccaaaccaattttatagtgaggaaaactggcatcaggaattggcaaggtttaccccaggccataaatgtactaactgcaacccttttgtttgactttcaaagggtgcaagaccagcctttcagaaatcaacactcatcccacagcgagaaaaatcgactttcaaagaaaaacattcttaaaacctaatgttcttaaggattttaatgattaaccaattgcctctgatacccttttgcactattgggtgaggctacagtgatgccattgtgtaaagccagtgcagaacacacagggaaagggaaccggggtgctgaccactgctctggagatcccatatggcctgtttcctttctgttttccaaatgaaagaaaagctctgatttgatgttcagaacatgacaaagaacagaaacaccccttcaccttccctagtgaaactagagtggcataagtatcaaagcagcatctaaaccgttgtctgaagtcagagtcagcaaccaacagagcgggctccctctgtggtgaccacaccgtgaaacaatcctgaggtgacctctctacctgatctaaaggaactcctcatgtctcctgctgagcatgggggcaccttggaaatgggaggactggacttcccccactggttccactgaattctttgtcagatgactagctatctaactacagggaacacatcttttctggtcacagaaatcccacacttgagaaggggtaacggcaaaagcaccctctgattgattgaaccatgcaaagaggggacaagatgcctaacaatttccactttcaaaatagcatgtaggcatgttgattgattgattgattgggccctggaactgtgaagggagactccgtggggttgatttttcctagtaaaatgccatacagcaggtggagataagcttgctgtggggtagagtctcaactgtttgctttgtaagatctcccaggccagtttaaggcctctgaaccaaagggaaggagaaaggtgggagggggaaatccacagcctcagcaaatgctgaagacacacactcttctcggaggaactatttgtcattcaccatggagccagccccacctacaacgctgaggaacatatttacatatttcaactccattgctggctgaagcactccagaaagtgatgattccaagagccagggaagaaaaatgttcttggaaaaagaatttgtgtatcagttcagcagaacagctcaaaattatgcaaattccctgcttgaagtttgactgtcacccctgccttcttctaccacctgggcttccaagcctgtaagggactgcaaaataaatagccatattctggttaaaaagatgaaagagacatcatggtttacctaactgcttttcatgtgtgacagaagctttagtatggtatctgcctttaaccctgaaatgctactttctaggaattcatcttaaggaaatactaaaactacacagtatgtacaaggatggttactacagtcttgttatgataataaaaaaaaataaacacaaagtcaaaaaattaggtactcattaaattatatctgtcatactataacattgggggtctatgtagcattacaaatgtcaccgtaggaggaaaagagagcatgaaaagttttgcatgctttatcattagatgaaaataagcattcaaaacactatactaggatctcatcattttttctacattcataaagtcacaaggtacaacccaaaatgtggtggaacattttggctttgcttttctctgtaatgcctgaatttgctacagtgagcacatattactttggtcattagaataaagactgtaaaagaaaaaaaaagtaataaatatataaccccggaagcaataggcacatatatctacatggcttcattagacattttccatacagagaacattcagggatccatgtttgcttggctccctgagaactggggcatattactttcaaagtggcccccacagcccatctgccagtgcaaagcaaagatggagtgattcagctttcagttacaataaaagccaagctgatagaccatgtaagaaggcaggtagaaatcggccccttagatctagaattgacattgatttaccctgctaggctcttggaatcaaatctgcaaggaggtgatttaaatcctattcttcttttgtttaactttttagattaatggatgtgggagaagttactgggacaggaactacaaaaggtttgggctggggctgtgtagctgtttgttagaccaggacaggggctgagaaccccgggcggagacttgcaccactggtgcttatcaagtctcattttccttcaacctctagcacaattagagtgtgagctggcatcttaaattgagtcttttgcttgtgttgcccaacaatctttaattcctaatcaccttcttttcccttatttgtaacttttgatttggaaatatcgggttatgtaacatgtcaatctgcatgaggatgcaactctgtcagaaaaagggactcaatgaagcacaaattctaacaaaactggaaatgactttcctaagaaaagaaaagaaattttcatttcacgcatttgaagctggttttaaataggctggatgcaaggttggtggttctttcggggctgttgatttctctgcccaatctccacccaacaaatgcaggatgcttcctggaaggggataaggaggtagaaaggaacaagcatctgtgaagggaccacagtatgccagaggccttatcgatgttaaaactgacagtgttcaataatatgaaagatttaaaaagatgaggaaatgttctaggttaaaagagtttaaagagacatgaaaagctgaatgaactcataagccaggattttctattgctataacggacgttattgggacaattggaaaaatctgaataaagtttatagactggatcataaaaaaaaaccctgacagtgttgcaaactaagtaatattgtgccattttacaggggagaggactgaagctccaaagacaatttgcctaaggccacagagccatgattccaacccaatagttaagagattaaagtcacatcctatcaccttactcccacaaaaccacaaaagattgaggagactataccaaatagaatcagattctattggaagagagtccgtgggaacccattactctaacacctagccttctacctcatattccaggtcactccactcactatagaactatcctttgatggttcttgttcagaccaagcactagttctgcccgttggcatccgcactggtcaaggccggtctattagggtggctgatccgcttaccgcaccactctacctccacccccaaacagaggccttgatgaaaacaagatgagagcagaggaagaacccaagaactctttctagaaaaccaaagctctccgtccctgatcccttcccccaccacagaagatggcaattccacaagccttccgcaccctgccctcccctcagttcaagacacatgctggaaataaaagcttccccgaattagccccctaaaagcacacaaacatctatgccctaagtcctggctgaatatcttgaggactttcagttccccaaacatttccaaggacctacggcacacaggtgccgctaaaggagacacccgttcactccaggcaatcagctccaacaggtccagttccactaagtggaagggcttcccgtcaacaccctcaccggagaaaacggattcctcctcagcattcccttataacacctggaaaggggaaacctgttttttgtgctatgtgtgacttcgctgcaaatctctctgctccccaacacatgcacacacacacacacaggcgcgcagaaaactagttcccactgtcaccaccagtgaaaacacccctcgtaactttgacgagaagggctcccccgctgaaagcccaactgcagagcgcccggagcgcgctgtgagtccgcaggaacgcggccgggccggggacgggagaaaggcgcggccgggaccctgcactgtgccgcgcggcgcttgcggctggaacttggcctggaacgcggtcttctcggctccagtttcccgcccaggccccgcccacccggccgccccgctggttcgcaccgctgctccggccaccgaggagcccaaagttggcggcgtcccgcggactccggcggagagcgcgagggagtcgcggccgactcctgtaccacgaagacaactggaggccggcgggggaggcgggccacgaggggctggggcgagggagctgggatgcgcgggcccggctcgccgggaaacaggttgccgcggagtcccgtcccctccccctctgcggtccccgccgcgacctgattcccgccctgcccggggagctaacccagccgcctccggggcgccctccttcttcctggattcccacggctggaccagagcccctctggcagccgggttaaaggctccttcagcaaggtcaaggcgcggccggctggcacctggggatttttttccagccgagcactggcttttcaatcgcattgttaaggatcatggcagcggcaggaaatccgaagggccccacaggtctgcgggagggaggatttattttacagcaaggaacagattcagacagatcggggatttcagtgggaggggacgagaggtttcaggacgctggaatgtggcaaaaacaaaacactccccacccatgcacatcaccatctcctgactgcgggctggggggaagggagttcagggccaatgtgtcccagacttcagcgttccccacggctgtgtcagggctggggtggcttatccccctacagacgaaaatcaagatttaaaagcatactcttactgtggtttctctatcaaagcccatcaacgtgatacacaggctgcggcgctggagggaagcggcgaaacggggagaataaacgcaacagaagcaaactgctgtctgcagaggcgagaggcgaaggaacggaagccatacccgaccccagccccatcccgtccccatcagcgccgggctagcgcaggaaaccaggaataggtgtaggtaagggtggcagcccggcagagccagcgttctactccctctaacccctcgccagcgtgggcctggatggctgggctgcctgggcatctccaagggggaccaggcaccgcgggcaggtttctaaacacgtgaagggcacagggcttgaaagacaaggaggggcgcccaggaagggcggaaaagaggggctttggggctccccaggacaccaagtcagtttctgaaaacggcgttccctggaaggccttccaacacctccgagggaagacttggagctctgaagacccaatgaaacctcagttctgactgactcctcctctgcgatcaattccggatgcccccacttagtccctgcctcggtaaccggttctttggggacagcagcatcagcacccgacgcccatcgcacaagtgggcgccgtggtgcgaggcgtatcctagctacccaggccggggtgggggcgccccggtacttacactccccaagcaggcaaactttcaggcttgtctttcgagaaccgggagctcgcatcacagttccgggtaatcaccgaggcagcttatgtaattgcccgcgatgccgctcagcagatctctctccttactcggcctcagagctcagtacatgggcaccctcttccccccaccccccaccccggcgattggaatcccgagcttgccccaccaccgccttctacaaagcagcggggtgatctcgtgtgctacaaacaccaagccagtatgcaggttcaggcaaaactctggctgcctccctgcgcccctttcactgcgtcgatggtttacagataactgcatttctataaaccctctctccacggttagggggtgggagggagttagagatcgggtgggggcttggcgcggtactgttgagggctctgcacccaactgagcagtaatacactcatccacatggacgcgggtgcataaatcgccttaacattttgccctgaaagcggagccaatttccaaagttaaggaccacgcagctgaatttccagtactttccaacctcgcctaggcgggggcaggcagagaaggggcgggcagcgggcagctaactcgcccgacccccccgccaagaaggactcactaggtgaaccccccgcccttcacccaagtagttggttgtgtattcctcggttgcgtgtgtgtgtccacacacacacacacacacacacacacacgccgccccactaccttccagtctgctcctccaatgtaacgaccgcatttaaaaatggcaattaaaatgactgaggagctcggtgatcacatttcaacccagagcacatttcccgaagctgggggtgagagtagtcatacagtcacactcacacccgggagccctccaagcgtccatctggcggctgcagcctcagttggctcctagacgaacatcaataccgcggccgggcgcccggtgaggagaggcgggcgccccgcgggttgcagagggcgaggagctggggtcgcatctccaggatctgagctccaaccaccgcccgtgcggggctgctgcagccggcacttgccccgcagggcaggctgcagccgctgaagcccggcgccgcctcgcgggctcctccagcgcccgacgggggcctggggcgagctagtctgcagaggggctgcaggcgaccgggccggggcggggaacgggatccgggagaggcagacgaacctggggcgcgccgcctccctcccacccgcttcccacctccctgccctcccccaacccttgctcccaggctccagtccgcggcgggctccgggggctgcggcggctccaggctccagaacagcttgcctcttcggccacccgcgccctagcctccctcctcctgggccaggggagcaagcaaacatctcccggagccctcggcagccgcgtgagctacccgaaccctgcccgggccagcagtgcagagggcgatggagctggcgaggcgtcgccgcggtccccaaggcgcttttccgtagagcggatcacgccgccttaccgtggctgcaggctgctaccgccggggaagcggcgaggacggcggcagggaggcaaggcgccgcgccggtggctcctctctctctcggcggcgcggctcctctgctccgcgagccgtagcggggcgcccaggaaggagcaggtccgggctctgcgctcagctccagcgagaccaacaatagctcccgcggggagcggagccccagcgagcctccagccgcgcgcgcacgaccggctcccgctcccggccgctcccggccggcgtccctgccagcactgctgccccacatgaaacagctgcaatcccgaggcttctggggggttggggcgggtgtgtgcgcgcgcgtgtgtgagtgtgtgtgtgtgtgtgtgtgtttaatagcttcccttctcttcttcccctccctgcctgctcgcctgcctgcctccgtcccccaccctcgctctcttacacacagaaagagagggcgagcgagagagagacacacacacacacgcacacgcacacgcaggttacatgaatgggaggcggtagccaatcctacgaggccggcgagccgcgcggcgcactggcgctgggagcagggccgcactccggcgcgggggggcgccacgcaggtgatgggcgcctctccgggggccacgcgcggccgctccctcaccccagtctcggttcctctgtctccttcccccttcctctccgccgccttctccatcttctctccttttacctcctttgctttctcgagttctccgagctctctcagttcggtatctttctggtctctttcttcttttaccctccttgcttgctttctcttcccctttctgaaactttctcttttcctttctggactttcttgtacttcctctcctcttgccttttgttctttcctcctcctttggctttctctccaggctccccgtagcacggtctcgtcccctctccctcctcttcgcctttccctgggtctctctggcgcccagggcctcccttctgcctgctcgctggatgttactccacaccccccaccccaacacttttctagggacggtctctttcaagttgctactgcagcacaatcagagtaattaagagctgagatcttgagttccttcttcaggcatgcaagatgcccaaagaaaggccctccttcctcggacaacttccccaaaaccatggtaacagctactgagtcgtgataacaatcacttaaaaaatagcagtgattgcggtccaagagatttctgtccctcgaatgtttggatcgtgatggcaagcacatttccaagagaagggcatttttatgtgatgagagcggtagtttgactgagtggcaacttggaagggctttggggaagagactggaggaattcccactccagccctgctgcctgctggctaaaggacttagtgcgagccatttccccttacccggcttcagttttctcatctataaaatggatgataccgacttcaccagttttggtgaggattaaaagagagaacaatggaaagaaagcactgggtgtatatgagatgcttaatttatgttagtttccttctttaagacaacttccttcatgatcttctgctacagtgtgtctctctgatctaaagtagtcaatgaaggaggaaatgtg

SEQ ID NO: 612 - DNA, 137122 bp, Homo sapiens
  source 1..137122: mol_type = genomic DNA
taggtagaatgtttctaacaagattttaacaagtaaccttttgaagcattggctcagaagggtcaatttttgtccataagatttatttcacggaaggcagctatgctaacccctataccatcaacgggtcatataagatttatttcaggcctggtgtggtggctcacgcgtgtaatcccagcactttgggaggccaaggcaggcagatcacctgaggtcaggagttcgaggccagcctgaccaacaaggtgaaaccccatctcttccaaaataataataataataataataacatagctgggtgtggtggcgcacacctgtaagccgaactactcaggaggctgaggcaggagaatcgcttgaacccaggagcagaggttgcagtaagccgatatcatgccattgcactccagcctgggcaacaagagcgaaactccatctcaaaaaaaaatttatttcaaatgccacatttctgattttattcagccaaggtactttgattgtgccattgaaaacacgagtgcagtcatcagtttgctctgccagcctggaatctctgttccttctgtgtaggaggcaaattttattcatccttgtatgcctacattgtagtgcaagaatacatttgtatgaatcaatcagtgaggaaggttaaaagtttaggaatctttcccagaacagcccggttatacttatgtgtatacgaataaaatctaagtgcagaatgggggtagaatggtgtgaaatgcaatgagggactgaatcctttctcttcacttgaagtttgacctggaaggaatgaagattccatgaacagcattttccttaccacggtgaccccattaaaatcctggattcccttgtctgtgtcatgactgctggaagaagcaatagctatcaaacatttagagaaaaattcagatgccctagtcagtcttaattctggcgtaatgccactggttattcctcctaattcggaaaacttagctcttcctgccctttcatttcttcattcataaagtgaatacgaccaccactgaggtccagggccaaataactaacagaaatattatgatgaactttgcagacatccagcccagagtcagggaacacagccctcatctggtttctctctttggtgttgagggcggttttccgttgctggcgacctagacattgctcaatggtgtcatctctgacctggcaccttcttcatacatttataaacatgcaatttagagatcctaaaaactttttctagagctcccctgggaaaaaagttaatgacaaaatcttgacacctctctacgtcttcttcggagacagagaagttgagagaggtggagaacgagggggagggggagggggtcgagagggagtcgaggagggattccagctccagtttgggtaaatccagctcgcgttttgtctctcgctcaactgtgcagggtccagcgaaggcagagccccagcttcactccctgaggtctgtcctggggagacactgctgctccggggggctgacctggcggggagtggccgcgcagtctgctccggcgccgctttgtgcgcgcagccgctggcccctctactcccgggtctgccccccgggacacccctctgcctcgcccaagtcatgcagccctacctgcctctccactgtggacctttgggaaccgactcctcacctcgggggctcgggccttgactgtgctgggagccggtaggcgtcctccgcgacccgcccgcgcccctcgcgcccgccggggccccgggctccaaagttgtggggaccggcgcgagttggaaagtttgcccgagggctggtgcaggcttggagctgggggccgtgcgctgccctgggaatgtgacccggccagcggtgagttggggccggggcagagggcaggggtgcggggagcgaggactccgacgccgaggcccgaggggggtccgggaggcggcgctcggcgcgggctggatgtggccggggctctgcgtccttggctctcccgctgcctcaggggtgggctcgttccccgcctcgaccccccaccccgggacgctcgggacgcttttgttgccggagataaacaatgcccccggccggaggtatcggccacccgctccggaggccccgccacagcgccgggttgggggcagcgggggcgcctggggctctgaccccgggctgcggtggaagcggggctgggggagggcaagtgtggcgtgggggagatggctgaatataccagcggttggttccctggcccctttggggagttggaggtcggggcgcctcggggtgaggagaggctagagtctgtgcaagttgtgagtggggagtccgggctgtcccgtgctcaagcgtaccccctaaacaagttttctccctccccccatatatatatgagagacaggttggtagggaaacgctttggcgcctgtctccccgagagttttgggacggcagctccagggatgaaacgtttggagtggaggcagtggtgcagtcttgctaggagttggctgggagttgtaaggatcagggaagaagggaagagggagtagagtgtgttctgtcaaaatggcatttaagaaactcatttatgagcaccactgggtcgctggacgcgctggccttgcgatcccatcagtccccgtctggcgggatcccggagcgggccccgagggtgggaggtgcgcggagctgggtgctggggctggtcgtgcagcacgtgaggggcctggtcctcgctctcgggcgaggaggcggccgcacaacctaccgcccccagagaaaaaatgctctcctctctctctgtgcttccctccctccctccctctcccccgctccggtccccgcctctctcgccccaggctcttgaatatatatatatatatattctacaagaagtggtctggaagggactggccgacgctggtaatctttccacgtgaacgagaaacccacgctgggcatttctgatccactaaaaactaaagtgtttccaaaagaacacttaaagcttcagcctcggagtctttcccgcgcccccaactcgtccctctcccaaattaaccaacctttctgcatacgtctcttagggtgcctcttcccctccgtcccggttccactcctgggcactaaacgagctgcacaatatgtcctagtaatgactgctttttgaagaaatgtttgaaaagtgctgcaagaccttggagcgagaacaggattaggtacacagccctgggccggcggggtgagccgcgcgcgccactggaagagcggcgctgtatagcagcagccccaggtctcccctggacctgagtgtgctcggcgtccccacccccaatataaagtaaaataaaagcaatggtttaattaggcctcaggatacgaaaaatatggaaaaggcgcttcttaaccagtaagggcaacagttatttggagcacactaggaatttatgactacaattaaaccaggggcaggggtacacgtagataggtacggaaataaggagattggtgtgagttaataatcgaaagacttaggtgaatcaaaccaagaatcaaaagacttaggtggcttttggtgtgtttccgattttatcggtattgatcatacgggtcccccttttccccaattaagggatttttaattagtttgtcagtctttaaagctaagttgtggtttcaattaaatttcagaatcaagatatacgggaaatggcagacagtgtccttttctctttgcaaagatgaggagtccaggcttacaactctgggactgccactttccattttaataagagttaactatcgctctccgggctggtctcccagaatagatgggtgggagggttgggtctccactgtccctgccctttgtttctcttccttctcccatctgatttgtctcccctcccccaccttctgagcgtccgtatcttccctgcacacttgatttcccctatccccttggtcttttagttttcggccttttgatcccagttgcctttttatgttctagctttattactatagatgtcgaaccccttcctcagtttttactataagtaatttttgcccttcctcagttttttactatacatttcttccccttctttcgtttttggccttttttgttttctttttgggcattttcttccttctcttgctttttcttctacttcctcctgttgtgtgttatgtctttcttgtcttcggaaggacagttctatgtccattctaacgtctcccttcccttttcttggcccttttccccccttttttcccccttcctctctgcagggcagaggggtgttttacatatggaaggagccattgactaaatgtgctggcattctagtgagtttccctgaacagcttttacatgtgccgagggctctcacacttcctgtggtagaaaactatctaggaacagcaagcagttgcctgcctgctcttcctttcgaggtagaacttagttgctggaggaaactgagccaggtgctgccttttttaaaaaatgttttaaatcttgtttttctctgccaagtgcaagagcctttaagttctgtagagctgaatggagggactatgaaatcagtctcttgcaactagctctatgtatgcaaataccacgtttttggccactgctggtagtgggaagaattgaaatatgactttaatttaacatgcaggctggattgttacatcagttaagcatttttgcccagaggattttgggggaatccagaaaaaggacggatataggtgggaagaggatcttgctgacatgttgctgtcaatactggcttttttgtttgttttttgagacggagtctcgctctgtctcccaggctagagtgcagtggcatgatcttggcttactacaacctctgcctccggggttcaagcagttctcctgcctcagcctcccaagtagctgggattacaggcgtgtgccaccacacctggctaatttttgtatttttagtagagatggggttttactatattggccaggctggtctcaaactcctgacctgaggtgatctgcctgcctcggcctcccagaatgcttagattacaggcaagaaccaccgcaccagccagttctttgcagaaaacccttacactttaagaagccagcttttcattctctaagcaaggtaattatttttaaaagttagttgggttattatctcctagcctataattttggattgcatactctgtagttcccttgtcataaagacattttagggggaaaaatgttctattgttttcttttttttttttttcagagtctcactctgttgcccaggctggagtgtagtggtgtgatctccgcttactgcaaccttcatctcctgggttcaagtgattctccttcctcagcttccctagtagctaggattacgggcatgcgctaccatgcccggctaatttttgtatttttggtagagatggggattcaccatgttggccaggctggtttcgaactcctgacctcaagtgatccacctgcctcagcttcccaaagtgctgggattataggtgtgagccaccacgcctggccaaaaattattctgttgttgtttagggcgtcttggtgctctctggtgaaaagatctgttgattgagtaatgttttacatcccagaaatggttttttgtttttcccttccatgacagtaagaactcacaggatggtgtccattaattgcacatgattcccttcttggccaatgatagatgcttaataacagggtctccagtcttattttcttctcatatcatgttatcatgtagctatctctgcagcactttcactgactcttgaagacattccaggttagaataaaagtaactttctcatgcctgtaatcccagtgttttgggaggctgaggcaggaggatcacttgaggctaggagttcaagaccagtctgggcaacatagtgagatcacccttgatcctcatctctacaaaaaataaaaagaacttagccaggcatggtggcctgtgcttgtaattcccgctaccgcggtggctgagatgggaggatcacttgagtctaggagtttaaggctatagttagcgatgatcacagcactgcactccagcctgggcaacagagcaagacctgtctcaaaaaaacaaaacaaacctgatattgagaaacattgaaatatcagtttttatcagaaatgaaaaatggaagtagaattagggaagagtgtacacgggagagatttgactgctggaaatattttagttcatctgagtggtaggatctgagtatttatttgaaaatacacattttttctggacatggtggcccacacctgtagtcctagcactttaagaggctcaggagggcagatgacttgaagctaggagtttgagagtggcctgggcagcatagtgagaccaccctgtctttacaaaagaaagaaaaaattagcctggtgtggtggcacgtgcctgtagtgccagctacttgggaagctgaggtgggaggatcacttaagcccaggaggtcaaggctacagtgagccttgatatacctgagcgacagagcaagaccctgtttaaaaaaaaaaaatatatatatatatatatatatatgcacacagacacacacacatttttgtatgaattgaataatctatgacagaagcactaaaaatggaagcagagcatttaataatgtttacaaaaaagaaattaatttctggaggtctttgaggtaattccatatttaaatgtggacctatttaatggagtggactacattctcttgcccctgcctccacaaatttcaggataaacttactgcccctactccgtgagttcggctcttgggacaacttagtttgtcacaaaagaagtttatgtttcaatagtggagccatgagtgataaaaatcagggtcttgtgggagtccttattttgtttctggttgtctctgattctttggctgggtggcacccagtggttttctcccctgcagttgggtttttcaggggtcattggcctctttcatgatctcataaaaaggctgttaccatttaaagaggccacatcttcgcaatccatgttgttcataccttttctatttccttgacaggctgttttttaggagatagggtttgaatgataaagattatcttaattacaagtctgaatttctaaagcacttcaatttaaaaatatgaaagaatataggagagacagaaatcaatttgtaaaccactttcaaagcagatcccatgacaccctctggcatacccagattacttgcctacatatatgaattttaatttttgtggctgatttacaatgactagattatatactcctaataattttttagcagtataatcttgatacaagagagaaagcatgcttttaatgatatcgttgaatttcaagagattaaaatgaattgctttttgtaatgaaaatgcatcctgatgaaggtatttgttgactttttggaaattggaattggaatgtcttgttttctgaaaatcttgtacaaaaagcagtggtctttggagaaaatatctttcagtttctcacagccaaagactgaattactgcaagccaaaacttttttttttttttggaagaaggggaaagcagtaagcttagatgccaagaattcaagtgaagtattctctggcctagtgtttgtatttagtacagatttatcaaaatgttattttttgtgtatttgatgttatcactaatgtctattttaaaagtcttaaagacacattacattgactaaatgtagtgtgctctgggaattcttgtgtgtataacctacgtagtgtgtaaggtgggaacagaaccaaaaggagatcttgttctggagaatatagcaaactctgagttaaactggttccataataatgataactaccacttattttctctctctctcttttttttttttgtattttagagttgcaaacaggctttttttttttagctcctatttatgaaacacctatcatgcgccagccctgtgctaagcctttacacatattatttcgttttattctcatgataacccaatgaggtcaatactattaggttttcttttgtattaaacatgaagaaacataggtataaagataccaagaaacttgtcacaatctactaatatttatgaactgaaaactgaacccaggtcagcctacttccaacgtccatctttttactctgctacccatgtcccctgacactcaaaccacagataccacaaggatgaaaccagtgccactagttttttcctgtgggagcccattgaaacctcaaaactacctcattttagatgaaggaacatggactcagctaagtagttctctgaaggacacagagctggcgatcacagattcaaacccaggactttttggtgtgagatcatctctagacatgaaactaaacagtgggtcctaggattacctaggtcagtcagtaatttttaaacagattgaacccgggagggttcaagtgattctcctgcctcagcctcccaagtagctgggattacaggcatataccaccacgcccggctaattttgtatttttagtagagacagggtttctccatgttggtcacgctggtctcaaactcccgacctcaggtgatccacccgtctccgcctccaatagtgctgggattacaggcatgagccactgtgcttggccaggtttatttttttttaatctatttttaatttttctcagacattgggaggctgaggcgggtagatcacctgaggtcaggaattggagaccagcctgctcaacatgccaagatcgtgccattgaactccagcctgggcaataagagtgaaactccatcttaaaaattaaaaaaaaaaaatcatagaatcaagactgtgacaacagaaaattaagactagttgtcatttgagaccattcgtgagaacatatggttctcacaatgagaacaaatggttaccaacaaccgttttcctacaccatgagacggagttcctacaccatgagatggaggctggagtgcaatggcacgatcttggctcaccgcaacttctgtctgccaggttcaagtgattctcctgcctcagcctcctgagtaggtgggattacaggcatgcaccaccatgcctgactaattttgtatttttagtagagacagaatttctccatgttggtcaagctgctctcgaactcccaacctcaggtgatccacccaccttggcctcccaaagtgctgggattacaggcgtgagccactgcactgcgcccagcctttgggattacaggtgtgagccaccgcgcccagtcttttttttttttttttttttttgagatggcatttcactcttgtcacccaggctggagtgcaatggtgcgatcttggctccctgcaacctccacctctctggttcaagcgattctcatgcctcagcctcccgagtagctgggattacaggcgcccaccaccacgcccagctactttttgtatttttagtagagacagggtttcaccatgttggccaggctggtctcgaactcctgacctcaggtgatctgtccacctcaggtgatctgtgcacctcagcctcccaaagtgctaggattacaggtgtgagccacagtgccaggccgatgctgtgatcttgagagagactgttgatatcctactatagtgagctttgcttttgcttagagcttcatcttattttgggtctgggtaggcaatctgaaaagacccgggtcaaaacccagagtcaagtggtgagactccatctccacaaaaattaaatatttagactggcgtggtggcacatgcctgtggtcccagctattcgggcagctgaggtgggaggattgcttgaacccaggaggttgaggctgtagtgagctgagttagcactactgcactccagtccaggtgacagagtgagaccctgtctcaaaaaaaaagaaaaagaaaaagacctgtgggatcttgtagaagggattttagaaccagcagtctttggattgagtcaggagaaagaaaagagggacatttctgggtttgggcagtgtccaccacaatgccttccttagacatagcaggtactcaacagatgtattggacctgtgagtcttatttgtaacctaatttgtcaatactgtctcctgagattttatgctgttttggtgtgcatgtgaaaagctcaaaatctgtggattgttaattggaatgtggtaggaatactgctggatctccaggcaggagagtttcttttttttttttttttttttttttgagatggagtctagctctgtcacccaggctggagtgcagtggtgcaatctcggctcactgcaagctctgcctcccgggttcacgccattctcctgcctcagcttcccaagtagttgggactacaggtgcccgccaccaggcccggctaatattttttgtatttttagtagagatggggtttcaccgtgttagccaggatggtctcgatctcctgacctcgtgatccgcccacctcggcctcccaaagtgctgggattacaggcgtgaatcaccacgcctggccagtttcttaccttatatgagcctcttcttcctctggtttaaccagctttactgtcaaacagatgatacttctcccagtatagggatatgctcaggaaagagataatttttaaagtatccaaatttgtaaagattgggatttaagctttaaaacatatataatggctaggcatgctggttcacacccgtaatctccgcacttggggaggcggggaggattgcttggggccaggagttcaaggttacagtgaggtatgatcatgtcactgcactgcagcctgggcaacagggagacctgtttcaaaaaaataataataataaattaattaattaaaaatgcatgaaactacaaggggtgtggtttctaatgtagagaaaaccccatgcttaccttatttgaggaacttcatcaacttaaatcatttgttgtagcaattaaagaagctttatagtgaatctaaggtttaaaggatactttagtattttttcttttttaaaataatttcaactcttttaggttcagggggtacatgtgcaggtttgttacatgggcatattgtgtggtactgtggtttggggtgcaattggtcctgtcacccaggtagtgaacatagtacccaaaagtttttcttttttttttctttttttttgagatggagtcttgctctgtcacccaggctggagtgccatggtgcaatctcagctcactgcaacctctgcctcccgggttcaagtgattctcctgcctcagcctccggagtagctgggattacaggcgcctgccaccacgcccggctaatttttgtatttttggtagagacggggtttcaccatgttggccaggctggtctcaaactcctgacctcaggtgatccacctgcctcggcctcccaaagtgctgggattacaggcgtgagccaccgcgcccagccagtaccggatagtttttcaacccttgtctccatccctccctccttctctagtagtccccagtgtctattatggccatctttatgtccatgagtacctgataagtgagaacatcagatatttggttttctgtccctgcattaattcacttgggatattttagtactttctgtgttgattatatttttcttttgcagtaaacaattctcagttccatgattttaattatttttaattttttttttgagacagagtcttgctctgtcacccaggctggagtgcagtggcgtgatcttggctcacttcaagctccgcctcccgggttcacgccattctcctgcctcagcctcctgagtagctgggactacgggcacccgccgccacgcccagctcattttttttttgtatttttagtaaagatggggtttcaccgtgttaggcaggatggtctcgatctcctgacctcctgatctgcctgcctcagccttccaaagtgctgggattacaggtgtgaaccaccgcgcctggcctaattatttttaaatttttgtcattttctatttttgttattttattttatttattttattttattattatttttctgagatggagtctcgctgtgtcacccaggctggagtgcaatggtgcaatctcggctcactgcaacctccgtctcctgggttcaagagattctcctgccttagcctcctgagtagctgggattacaggcgcctgccaccacgtctggctaatttttgtattttagtagagacagggttttgacacgttggccaggctggtctcgaacttctgatctcaggtgacccacccacctcggcctcccaaagtgctgggattacaggcatgagccaccacgcccagccctgttattttattttatttcattttattttttgagatggagtctcactctgtcacccaggctggagtgcaatggcgcaatctcggctcaccgcaatctccgcctcctgggttcaagtgattctcctgcttcagcctcctgagtagttgagattataggtgtgcaccaccacactcagctaatttttttttttttttggccaggctagtctgaaactcctgaccacctcaggctcccaaagtgctaggattacaggcgtgagccactgcgcctggcaatttttgtatttttagtagagatggggtttcaccatgttggccaggctggtctcaaactcctgacctcatgatccacctgccttggcctcccaaagtgctgggattacaggcatgagccaccgcacctggccactgtttttatgagttggagtctgcctatgtagcccaagctggtcttgaactcctggcctcaagtcatcttcctgcctcagtctcctaaaatgctgggatcacaggcatgaaacactgctcctggtccttacttttaactggccgggcacgctggttcacacctgtaatcccagcactaggggaggccaaggtgggtggatggcttgagcccagttagagaccagccagggcaacatggcgaaaacatgtctctacaaaaaatacaaaaattagccaggtgtgatggtgtgagcctgcagtcctagctacttggggggctgaagtgggaagattgcttgagcctgggtaggtccaggctgtgctgagctgtgatcatgcctctgcactccagcctgggcaacagaatgagaccctgtctcaaaaaaataaaataaaacaattagtagtgaatattctatttcaaataggggaatgcataggaaaaagactcacttcagtgtattctgttgttatttcagaccaaaaccttgtgtgactgagctgaagagcagtgcatccagattctcctcagaagtgagactttccaaaggaccaatgactctgtttcctgcgccctttcattttttcctactctgtagctatgtctcgatcccgccatgcaaggccttccagattagtcaggaaggaagatgtaaacaaaaaaaagaaaaacagccaactacgaaagacaaccaagggagccaacaaaaatgtggcatcagtcaagactttaagccctggaaaattaaagcaattaattcaagaaagagatgttaagaaaaaaacagaacctaaaccacccgtgccagtcagaagccttctgacaagagctggagcagcacgcatgaatttggataggactgaggttctttttcagaacccagagtccttaacctgcaatgggtttacaatggcgctacgaagcacctctcttagcaggcgactctcccaacccccactggtcgtagccaaatccaaaaaggttccactttctaagggtttagaaaagcaacatgattgtgattataagatactccctgctttgggagtaaagcactcagaaaatgattcggttccaatgcaagacacccaagtccttcctgatatagagactctaattggtgtacaaaatccctctttacttaaaggtaagagccaagagacaactcagttttggtcccaaagagttgaggattccaagatcaatatccctacccacagtggccctgcagctgagatccttcctgggccactggaagggacacgctgtggtgaaggactattctctgaagagacattgaatgataccagtggttccccaaaaatgtttgctcaggacacagtgtgtgctccttttccccaaagagcaacccccaaagttacctctcaaggaaaccccagcattcagttagaagagttgggttcacgagtagaatctcttaagttatctgattcttacctggatcccattaaaagtgaacatgattgctaccccacctccagtcttaataaggttatacctgacttgaaccttagaaactgcttggctcttggtgggtctacgtctcctacctctgtaataaaattcctcttggcaggctcaaaacaagcgacccttggtgctaaaccagatcatcaagaggccttcgaagctactgcaaatcaacaggaagtttctgataccacctctttcctaggacaggcctttggtgctatcccacatcaatgggaacttcctggtgctgacccagttcatggtgaggccctgggtgagaccccagatctaccagagattcctggtgctattccagtccaaggagaggtctttggtactattttagaccaacaagaaactcttggtatgagtgggagtgttgtcccagacttgcctgtcttccttcctgttcctccaaatccaattgctacctttaatgctccttccaaatggcctgagccccaaagcactgtctcatatggacttgcagtccagggtgctatacagattttgcctttgggctcaggacacactcctcaatcatcatcaaactcagagaaaaattcattacctccagtaatggctataagcaatgtagaaaatgagaagcaggttcatataagcttcctgccagctaacactcaggggttcccattagcccctgagagaggactcttccatgcttcactgggtatagcccaactctctcaggctggtcctagcaaatcagacagagggagctcccaggtcagtgtaaccagcacagttcatgttgtcaacaccacagtggtgactatgccagtgccaatggtcagtacctcctcttcttcctataccactttgctaccgactttggaaaagaagaaaagaaagcgatgtggggtctgtgaaccctgccagcagaagaccaactgtggtgaatgcacttactgcaagaacagaaagaacagccatcagatctgtaagaaaagaaaatgtgaggagctgaaaaagaaaccatctgttgttgtgcctctggaggtaagcaaacagtcaaggggctgggagacagctgacacttggtatagtgatctatatgcagagacacttctagtgtctctagtgtctctatgtaatagtgaattgcttcactattacatatttttactttggtacaatgttactttaagttatccataaaagaattcctggacctacctgaagtatgtcttgtgcagtgatgccttagctagcttatttttagaatttgtcccagaaaactagaacatacagtttttttctcattacaggatttgatggaaacatagagaaattgtatgaaatgtgtttttgcagagatttcccctatgcctcttttggctagttgcatgtcttttttggcagtcacagatttaaaaattaagagtggaacaaattcattaactccatagcagcctgaaaaaccagaggaattaaacatctttccttttgaaagaacacagttgcatccctaatcttgaaactttgttttggagacatagcaataatacagcttttgtctcaacttttggtgagtgatttctacctgctctaccaacctcatagggttgttgggattaaaggaaaatggcttgtaaactccaaagtgatacacaaacattagttcttattatagtttatgaacctaaggtagttaaaggatctgttgatttagaatttatttaaaaacttttagggagcttggttaaaacccagtattgcttttttggccttttgaaacacctgtcaaatatgatgttttgtgatttttagatcacgcattaaagttatgtttattacatctactatgaatgcaggtatggtagaatagatggacttagaagtattgtaggcctggtgtggtggcttacgcctgtaatcccaacactttgaaaggccgaggcgggcagatcacctgaggtcaggagtttgggacgagcctggctgacgtggtgaaaccccatctctactaaaaacacaaaaattagctgggcgtggtggcgggtgcctgtaatcccagctactctggaggctgaggcaggaaaatcacttgaacccaggaggcagaggttacagtgagccaagattgcgccattgcattccagcctaggccacaaaagcgaaactctgtctcaaaaataaataaataaataaataaataaataaataaagtattgtggttgggcatggtggtttacacctgtaatcccaggactttgggaggccaaggtggcggatcacttgaggtcaggagttcgagaccaacatggggtgaaaccccatctctactaaaaatacaaaattagctgggcatagtggtgcacactggtagtcccagctactcaggaggctgaggcagtagaatcgcttgaacccgggaggcggaggtttcagtgagacgtcatcgtgccactgcactacagcctggacaacaagagtgaaactccatctcaaataaataaataaataaataaataaataaataaataggccgggcgcggtggctcacacctgtaatcccagtactttgggaggccgaggtgggccgatcacaaggtcaggagatcgagaccatcctggctaacacggtgaaaccccgtctctactaaaaatacaaaaattagccgggcgtgacggcgtgcgcctgcagttccagctgctggggaggctgaggcaggagaatggcgtgaacccgggaggcggagcttgcagtgagccgagattgtgccactgcactccagcctgggtgacagagtgagactccatctcaaaaaaaaaaaaaaattaaataaataaataaatgaataaataaaagtgttgtgaggctggtcatggtggctcacacctgtaatcccagaactttgggaggctgaggtggacagatcacttgaggagttcgagaccagcctggccaacctggcaaaaccccatctctactaacaatacaaaaattagccaggagtggtggtgcatgcctgtagtccaagctactttggaggctcaggcacaagaatcacttgaacctcggaagcagaagttgcagcgagtggaggttgcgccactgcactccagcaggggcaacagagagaccctgtctcaaaaaaaaaaaaaaaagtattgtgaggtttaggccaggcatggtggctcatgtctgtaatctcagcactttgggagggctcaggcaggtggactgcttgagcctaggaggtcgaaatcagcctgggcaacatagcaagacctcatctctactaaagatacaaaactaactgggtgtgatggcacgctcctgtagtcccaactacttgggaggctgcagtgagaggatcgcctgatcctgggaagtcaaggctgcagtgaacagtgatggtgccactgcattccagcctggttgacagcaatgagaccctgtctcaaaaataaataaataaataaaaagtactgtgaacttaaaattcaggaaactgtttctatttctttttttgtttttcattttcttttctgagacagagtctcactctgtcacccaggctgaagtacagtggcatgatctcggctcccaagttcaagcaacttctccctcccaagttcaagtgattctctcttgcttcaacctcctgcatagctgggattacaggcacccaccaccatacctggctaatttttgtattttttttttttgagagagtctcactctgttgcccaggctggagtgcagtggcgcgatctcggctcactgcaagctctgcctcctgggttcacgccattctcctgcctcagcctcctgagtagctgtgactacaggtgcccgccaccgcgcccggctaattttttttgtatttttagtagagacagggtttcaccgtgttagccaggatggtcccgatctcctgacctcacgatccacccgccttggcctcccaaagtgctgggattacaggcgtgagccaccgtgcccagccttaatttttgtatttttaatagagacagggttttgccatgttggccaggctggtctccatctcctgacctcagatgatctgcctgcattggcctcccaaagtgctgggattacaggcgtgagccaccgtgcctggccttctatttcattcttgacttaaattatcagtttaaaaatgctgattttggctgcttgtggcacttcgagaggctgaggggagaggattacttgaggccaggagtttgagaccaacataagcaacatagcaagacctcatcaaaaaacaaaaaacaaacaaacaaacaaaatcatagctgggccgggtgcattggctcactcctagaatcccagaactttgggaggccaaggcaggcagatcacctgaggtcaggagtttgagaccagcctggccaacatggtgaaaccctgtctctactaaaaatacaaaaaatagcagagcatggtggtgcccacctgttaatcccagctactctggaggctaaggcaggagaatcgcttgaacctggaggggggcgttgcagtgagccaagatcgcataattgcactccagcatgggcgacagagcaagacactgtctcaaaaaacaagaaacaaaaaaacatatctgggtatgttggcatgcacctgtattcccagttacatgagaggctgaggtgggaggatagcttgagcccaagagttcaaggctgcagttagctatgatggcaccattgcataccagcttcagtgacagagcctgaccctgtctcaataaataaataaataacactgattttttatttgtctgagccactgcaaatgagaaatcagacatttaataaatcatgtattgatgggcatttaaagtgtttctaaaatactttgttgtaaaaaatcttactgagcctgtaatcccagcactttgagagaggccaatgtatgctgggcgcggtggctggcaagaggattgcttgagcccaagactttgagataaataaactgggcaacatagcgacataaacctctacaccaaaattttattttattttattttatttatttatttttgagacaaagtctcgctctgtcacccaggctggagtgcagtggcgtgatctcagctcactgcgacctccacctcccgggttcaagcaattctcctgcctcagcctgccgagtagctgggattacaggcacctgccaccatgcccggctaatttttgtatttttagtagagacgaggtttcaccacgttggccagcctggtcatgaactcctgactcaggtgatctgcctgcctcggcctcacaaagtgctgcgattactgcgcgtggctgatttttgattctttataatattttaattctttttttaaagccccaaccatggcaaggacagattttgaagtttttaacgagtcctgataagaatttttacatttagctaggatttggacaaagccacccattcagacattttcaggagcaaaatggaaaaagatcttatttgatgctgagtgacggatacacatgggggacaaaggggatgcttttgctttgaatagtgttgctaattgccaatttctggtctaacttggggtgctgggattgtaggcatgagtcaccatgcccagccccaaaatttaaaaaaaagaaaaaatttgccgggcgtgatagctcatgcctgtggtcccagctacttgggatgctgaggtgggaagattgcgtgaacctgtgaagctgaggttgcagtgagctatgatcgcgccactgcactccagcctgggtgacatagcaagaccctgtctgaaaaaaaataataactaccttactgaaatgtataatcttttactcaatcaagtcacgtcacacatgtgggaatagataaaatgtggccagttactgatggtttacaaagtaacatttagcaatatctctagtagagagacctcccttgtaagttactggtttgtagcattgccaaatgacatcattgtaaaaaacactgtatctctaatggatatgaacacatttgttctattctttctcaaacctgctctttctcttgcattacatgtttggttcagtgccataacaaatgattacccaaaatagaatattcagtatcctcgcctcctttgctcatccatccaaattctcttgttctacaagttctgagcgctaccacctctccattttcttggccactgctatattgaggcctttatttcttcatcaggataacttcagtgctatctttactatcaacaagtattgcacttctcctaggctatgcactggaaatccaatcatgagcattctagccaccagggaaatcaggaagctgaataacaagctccccttaggggagttcaagttttccttctgaaaaacatgattctcctatctaactacatgtagtgttctctttatgtgatatatttcactcaaaataaaagaaatagagcaaaactttcagggccttcgaatgattagatgaagcctagattcattagcagggaatacagcacctttaagatttttgcaaaacccacttctgtcttgtttgccttcatgtatcttcaccttctacttgctgcagcagtatacgactgcatacatttccccagtgcatactcttgcctcagtctccaggcccaagtgatgcccttcttcctttctctctcttctttttttgagacagactctcacaccttccttcttctttttttttttttcagatagaatttcactcttgttgcccaggctggagtgcagtggtgcaatctcagctcactggaacctctgcctcccggattcaagtcattctcctgcctcagcctacctagtagctgggattacaggtgcacaccaccacgcccagctaattttgtatttttaatagagatggggtttctccatgttggtcaggctggtctcaaactcctctcctcaggtgatccaccccccttggcctcccaaagtgctgggattataggcatgagccactgtgcccggccgagtctcactctttcacctggcctattttattattaatttttatcttatttttcagtatgaaccaatgcatttttattatattcaatttttttttttttttttttttttttgagacagagtcttgctctgtcacccaggttggagtgaggtggcatggtcatggctcactgcagccctgacctccgggctcaagtcattcacccacctcagcctcccagtagctggtactacaggcacatgtctggccaacttaaaaatcttttgtagaaggccgggcacggtggctcatgcctgtaatcctagcacttcgggaggccaaggaaggtagatcacttgaggtcaggagttcaagaccagcctggccacatggtgaaaacccatctctaccaaaaattcaaaaaaaattagccgggtgtggtggtgcatgcctataatctcagctatttgggaggctgaggcaggagaatggcgtgaacccaggagacggaggttggggtgagccaagatcgcaccattgcactccagcctgggcaacaagagcgaaactccatctcaaaaaaaaaaaaaaaaaaaaaaaatatatatatatatatatggcgtgatggtggcccacacttttgtaatcccaactactcaggaggctgaggtggcagatggcttgagcctgggaggttgaggctgcagtgagctgtgatctctccaccgcactctagccttggtggcagtgagactgtgtctcagaaaatatgtgtaaattctgaaggagtctctgaatttattctcgtttgaaggttgcctgtaagaaataaaatatatttagcccctaaagccatgtaccatttctcagaatgttgactgctaactcctcggataagtgaaaacaaccttagactttattaagtcatagattacattgtagtctcccattctttaattgtatgacagtgtgttatgtaatcttctgagaggtatcttttggtcatggaaaaaaacttaatttgtcatctgtcaagcctaattcagcttactcttcttgatgttcagaattacagataattaaaactgctagctttgtcactctcagtcatctaggaatttgctttcggttagggttttccttctatgtgtttgtaattttgaaaatactataaatagggtagtgcattttgaaacatatgcactaccctatttattgaacagtgagagattgttacaaaaaaggaacgggggactgtagagctattcgcagacattagagagtaggtgctttggctaagctacactttcacaagtaatttttagtatgtgtgaaagccaaagaaaacaaaattggccatggggactggcacatgcctgtaaccccaccactttaggaggccgtggcaggcagattgcttgagccctggcattggagaccagcccaggcaacatggtgaaaccccgtttctccaaaaaaatacaaaaatattagctgcgcatggtggcatgtgcctatagtaccagcttctcgggaggctgaggcaggaggatagcttgagctcaggaggtggaggctgtagtgagcttagatcacactacagcctgggcgacagagtgagaccgtgtctcaaaaaaaaaaaaaggaaagcaatctaaagtcgtggactatatccctgaagatagggtcttcatatatctctagccaggtgattttggtgtagtatcatgcatttaattaactttcattgaatgactggacaattagtttgcaagtttagtcaaactgaaataatctctcatatttactctggttaatgtattttttgtctaaaatattaaagggctattatgtacttggttagtttaaatagaagcatattagatgacactattttttttttttttttatggaaatggagttttgctcttgttgcccaagctgttgtgcaatggcacaatcttggtcaccacaacctccacctcctggattcaagcaattctcctgcctcagcctcccgagtagctgggattacaggcatgcaccactacgcctggctaattttgtatttttagtagagacaatgtttctccatgttggtcaggctggtcttgaactaacctcaggtgatccgcccacctcgtcctcccaaagagctgggattacaggcatgagccaccgcacctggccttagatgacactattaagtcagctaatgtgccatgttcattaccacgctagcctcttaattaatgcaaattccactggaaaaaaaattgtaatacctacatgggctgtgtttcaggagctaaaaagttaagtagtgttaatatgatacaaattgaacgactgactgtccactattttatgtgcaggcctttccatgtgataattgtctagttccagggctgtcatttcagaattacttgacacacttgtattattttatcccttttggtggcagtgggggtggggctagcctctcttggccattgcttttctcagttttcaaacagccgtatctcattatggcatatgttacatatggcatatggaacaaatttttgctaccaactctttcaattgagggcagatgttatatgtacttaaatatgcctttaaggaatctctttgtatcactactgagacttcagtagcatactgcaccacagaactggacttggggaaaaaaaccaaaaaacaaacttttgttgtttagtagatattcgtgtataacctccaagtttgtcagtataaaggcatgtagactgattctgacccatgggtgttaatttctgaaattttgtcacagcagttcaaatcttaccctgtcatttcgtatgtgttatcttttccaggaagaaaaatttgtaaaactggccaacatcttcatctagtgtcagcataatccaagttacactgtgatgtaatattgagcaccctattatcgtgcatgtttattttgctgcagggcttaacttcagatctctttttgttggtcaggcttttggttttttattccagggtggtatttcaagaattgactatatcaaagctgcaaaagtccttttcaagtagccagccactgtgggactatgatggataatggcacaaatgttaccaggaggggtaggagaaagcatctccttttgcattattatcatactaaaataagacacaacttccaaatgaatcagactaatctaaacaattcagggcattaccttgacaatgagacccagtgctcaagacatatccagaaggtgttggctaattatcatcagcttttcatgtctgctatgagtgcaacaaaagagaaattttgctttttactgatttaattatgcaccattaacaccaagtcactgtttctaaagaaggccctgatgttctcctgcagagagagcagtagaagtgagatgcttgaccggacacggtggctctcgcctgtaatcccagcacttcgggaggccgaggcaagcagatcatgacgtcaagagatcaagaccatcctggctaacatggtgaaaccccatctctactaaaaatacaaaaattagctgggcatgatggcgcgtgtctgtagtcctagctactcaggaggctgaggcaagaggatcgcttgaacctgggaggcggaggttgcagtaagctgagattgaaccactgcacaccagtctggcgacagagactctgtctccaaaaaaaaaagacatgcttatattaacttccaaagcccaagccctggattagggggtgctaacagcacataacaagtgctcaagaaatatttgttgaacaaatgattgaattagtgaatgaataaaatatctttttttttttttaatttttttgagacagtcttgctttgtcgcccaggctagaatgcggtggcgcgatctcggctcactgcaacctccgcctcccaggttcaagcgattctcctgtctcagcctcccgagtagctgggattataggcacaccccaccacacccagctaatttttttttatttttattagagatggggtttcaccatgttggccaggctggtcttgaactcctgacctcaggtgatccatctgcctcagcctcccaaagtgctgggattacaggagtgagccactgcgcccggccatgagtgagtaaaatcttacaaatacatatgagtcagcctatttttcatatgacaatgtctgttaaaagaaaaaaaaagaaaatgggctgggtgcagtggttcaggcctgtaatcccagcactttgggagtccagggctggcagatcacttgaggccagaagttcgagaccagcctggccaacatggttaaaccccgtctctacgaaaaatgcaaaaattagccaggcgtggtggcatgcacctgtaatcccagctatgagggaggctgaggcaggagaattgcttgaacccaggaggcaaaggttgcagagagctgagatcgcaccactgcactccagcccgggtgacagagtgagactccgtctcagggaacaaacaaaacaaaaaaagtatactgtaaaccatacattttattccatatgcagtatactatagcagctagtaccccaaaacaacattgtattagtttattctacacatatctcttttttttttttaggcaaaatctcgccctgttgcccagtctggagtgcagtggtgcgatctaagctcactgcaacctccgtctcccgggttcaagcgattttcctgcctcagcctccagaatagctgggactacaggcgcctgccaccatgcccagctaatttttttgtgtttttgttttgttttgctttgttcgagtcagagttttgctattgttgcccagtcttgagtgcaatggcatgatcttggctcactgaatcctctgcctcccgggttcaatcgattctcctgcctcagcctcccgagtagctgggattaaaggcatgcgccaccacaccaggctaattttgtatttttagtagagacagggcttctccatgttggtcaggctggtcttgaactcctgacctcaggtgatcctcccgtctcggcctcccaaagtgctgggattacaggcgtgaggcactgcgtccagtcttgtgtttttaatagagacgtgatttcaccatgttgaccagggtggtcttgaactcctgacgtcaggtgatcagcctgcctcagcttcccaacgtgctgggattacagatgtgagccactgtgcctggccaagaatttctagaacgaatttgatcctagtttaaatgatcccaacatcatactttcatatgatttagaaatcataaaactgcaacttctacatcagaggttcttactctgggtaggcttcaatggtctgtgatcccaccccctcagaattatatgcagcatattgcatttatatgcattttttatggtgagcttacccatagcttgtattggatttcagagaaaggaaatcatatgtccactccctgaaataaaaacaaatcaaagaatcagaccacttaaaaaaaatttttttgggccgggcacggtggcgcacacctgtaatctcagcactttgggaggctgaggcgggcgatcacaaggtcaagagattgagaccatcctggccaacatggtgaaaccccgtctccactaaaagtacaaaaattagccaggcatggtggtgtgcgcctgtagtcccagctactcaggaggctgaggcaggagaattgcttgaaccctggagacggaggttgcagtcagctgagatagcgccactgtactccagtctggtgacacagactccatctcaaaaaaaaaaaaaaaaaatttttttttgagatagagttgttctgtccccaggctaagctgcagtggcatggtcatagctcactgtaaccttgaacctctgggctcaagggatccttctgcctcagcctcctaactagctaggactatacatgtgtgccactatgcctggtttatgtttttggttttgtgttttgagaaggagtcttgctctgttgcctaggctggattgcagtggtgcaatctcggctcactgcaatcagtacctcccaggtttaagtgattctcctgcctcagcctccctcatagctgggattacaggcgccaaccaccactcccagctaatttttgtatttttagcagagacagggtttcaccatgttggtcaggctggtttcaaactcctgacctcaggtgatctgcttgcctcggcctcccagcttgctgggattgcaggcgtgtgccattgcacccagccagctaacgttttttttttttttttaatttttattttttgtagaaatgtgatctcactatgttgcccaggctggtcttgaactcccggcctcaagtgatctttcctccagctttccaaagtgctggtattacaggcatgaggcactgtgcccagcctcacatcagtttttttttttttttaacagatttgaaggaatgcaattgaatattgtttctatggttaaggaaaaaacagtttgctaagaatttagttatttcctatatggtaaacagtgtgagagtggacctacttgtaacattgagatagtcatactgcaaagcagagatgccatgaggagcagagatgatgtctgtaaagcgtcttgcagtgtgtctgctatacaacagatgcttaaaagtggtgggtattgtatatgtttgaagagatttgtgtatttatttcattactttcacctgttttccatcttgccattttattcatgttatgtagaggaaagtaattaagttttctaagtattccatatgtaccatttctcagtatctgcaaaagcatttttcctgctggaggattaagatactttatgaatgaattggtttcactgttcccatgtgatgcagaattatagttgtggtttccagcgagatgactatgccgcagttattttcttgtgcttgtataatgagagggttttggtgtttctgctgtgttctagacagttacactatacagctcattttcatatcatatttcatacgcaacaccatattgtggtgagttttctgtaaaagtaggatcaagggacgaggaagtgggaggacaagacagtggaaggccagagttgatccaagccatggaattttggatggagtggatataggttagatttagagaaaaaagcgggtgtctgttggtttcttctatccttggaggagtaagtaatttgtacaggagttattacagaattgcagggagatttgtctactgggcaacacagaagttaagttgctttccttatttcccattttctagagactctgatactgcattatgagttggtaaaacagactaataaaacaagaaaatcaaaatagtgttctattttctcttcctttttaaagaaccaataacctttattaattaggtacattactaattcacattacttcattactaattaggtacacgcagttttaacaaaattgaaactttgcttgaaacacacacaggaagctggcaaaggaaaggaaggtggaaggagactaacatttttttgaggggcagacacagtgataaaagacttcctattactgtattcaatgctgacagtaaccctaacccatgaggtgtaagtattcggattctcattatgcagaatgggaaatagaaacacgtcttgttgtttttgttttgttttgttttttgagacagtctcactctatcacccaggctggagtgcagtggcgcaacctctgcctcctgggtgcaagagattctcgtgcctcagcctcccaagtagctgggagtacaggtgcgcaccattacgcctggctaatttttgtatttttagtagaggtggggtttcaccatgttggtcaggcgggtcttgaactcctgacctcacgtgatccacccgcctgggcctcccaagtgctgagattacaggcgtcggccaccttgcctggcttttattttttatatgtagaaatagagatggggttttatcatgttaccctggactcaagcaatctgcccgctgcagactcacaaagtgcagggattacaggtgtgcatcactatgctcagccttattcagtatttattaagtgagcagtatagcattaagaactcacatgctcattgtctcatacaatcttacaacaatcgtatgaaatatatgttctgctttaatttataaagtaagacactgaggcttagagatgccaggtaacttgcttaagaacatagttgatctgggattagaatccctgggttgaatggtatgtgttcattttagtcaccatatctctgagctaaggcaatgaggaaaatgtgaaaggcccaaaagatggagagtagtgagactgagaggtggactggttgaggaataagtcatgttgaggttattgctgtcatcttttagacttgttaaatttggagagatgtgagcatcttctagcttcatttcacacaaaaaacaaaaatgttaacatgatttaaatacttcaaatctttgagtttgtcaattctactgctgctatattttaatattaaggtgttcctttaactgtgtttaactctttccatttttaattttacttaaaatatttttagtgagaccctgtctcaaaaaaaaaaaaatgttggctgggtgtggtggctcacagctgtaatcccagcactttgggaggctgaggcagaaggatcccttgagccctggtgtttgagacaagcctgggtaacaaactgagaccctcatctctacaaaaaatgcaggaattagctgggcatggtggtgagtgcctgtagtctcagctagtagggacgctgaggcgagaggattgcttgagctggggagatggaggctgcagtgagctatgattgcaccactgcacagcaacctgggcagaagaccctttctcaaaaaaaagaaaaaaaagaaaaagtttttacactccctggaccttatttccctctgaatcatggtctggtaattcttcactatcatggtaatgattcacattcactctcctattccttcaagcagatgactttgtattttgtccagcttttctaattgtcttcagcaggaggtttctcccagattatcaatttcattatcactagaagtgaaagtttcttattctcttttacttaataagtgtaaggttatattatgatgcaattagcatggagctagcctatcccaatactagtagcaaacttgtttaatacttagatgcatatatctatatgtgtgtatatatatactttaaaaagaaatttataaaaagagatggggtttcactgtgttgcccaggctggtcttgaactcctgggctcaagtgatccacctgcctcggcctcccaaagtgctgggctgacaggagtgagccacctagcccagccttagtgctctgggagaggttccagtgccccaaaatactgtgctcggttaatatctccaatttttttttttttttttttttttttggagacaagagtctcactctgtcacccaggctggaatacagtagtgacatctcagctcactacaacctctgcctcttgggttcaagcaattctcatgcctctacctcccaagtagcggggactacaggcatgcaccaccatgctcactaattttttgtatttttagcagaaatggggcttcactgtgttggccaggctggtctcgtactcctggcctcaagccttctgcctgccttggctttccaaagtgctgagattacaagtgtgagccaccatgcctggccttccaatttttatattaaatgaattttaactgctcattacatggtttacgtgtacactgttttcttaattagtggcagccatggttctccattgctacagttgtacggactgagagtcaagtgccataacacatgcttttcttttttctttttttgtgtgtgacagggtcctgctctgttgcccagtctggagtgcagtagtgtgatcatggctcattgcagcttcgacctcccagactcaagtgattctcccatctcagcctcctgagtagctgggaccagaggcatgtaccaccatgcccggctagtgtttttgtttgtttgtttgtttttgtttttgttttagagatgggtctcattatgttgcccaggctggtctcaaactcctgggctcaagcaatcctcctgccttggcttcccaaattgttgggattacaggcatgagccaccacacccagctactacatgcttttcatatccaatattgcatataactctaatgttagtatttccccccattgagtctactggaggttgacttgctcatggtcccatcattgggatttggatctccccaaggatatcctcgttttgtataagatcccagcactttgagaggccaaggtgggatgatcacttgaggccaggagtttgagaccagcctgggcaacatattgagaccctgtctctacaaaacataaaaacaattggaggctgaggtggaaggatcacttgagcccaggagttcactgcatgtctgccttgagccatgactgcactagtgtacaccaccctgggtgacagagcaaggccctgtctctaaataaataaataaatatttaaaaaatatataaagctattttcttttttttttctttttttcttctcttttctcttttttgagatggagttttgctcttcttgcccaggctggagtgcaatggcacgatctcggctcattgcaacctccacctcccaggttcaagcgattctcctgcctcagcctcccaagtagctgggattacaggcatgcaccaccaccctcagctaattttgtatttttagtagagatggggtttcttcatgttggtcaggctggtctcgaactcccgacctcaggtgatccacctgcctcagcctcccaaagtgctgggattacaggcatgagccaccgcatcccatttatgcattttaaacaaaaaaagctaatgtgtcattgactaagtatttggatatcaggaaaatcaaacagactttggaaagttaattgtagaaattctgttgtaaatattatgagttcaatgataagtctttttattttttggttcctctcttttttctatctgagttatgttccatggaaaagtgcttttcaataagaaccacagccattaagcagtgtcctcgaacatagctgttgttctgtattctatttctggaatgaacaaagtaagagcatcccctacttccaacatcagaagcatctgtgcagtacagggtcatccagctgagagagtaactcatttgtaggcagtcaaatcttgcttctccatagattgtgtgagactcgagtaaatgaatttagaaactaaagaaataagccttttctgaataactggtctcatctcaacaaaaacagcctacataaaggccgggcacagtggctcacacctgtaatcccagcactttggatgaccgaggtgggtggatcatgagatcaggagattgagaacatcctggctaacacggtgaaaccccgtctccactaaaaaatacaaaaaattagctgggcgtggtggtgggcacctgtagtcccagctactggctggaggctgaggcaggagaatggtgtgaacccaagaggcagagcttgcagtgagccgagattacaccactgcactccagcctgggtgacagagcaagactccctctcaaaaacaaacaaacaaacaaacaaacaaacaaaaacagcctacataatatccattctcaaaataattgcttttctctgattaggagacttagttatacaagggtgttttctagcttaaaaacaaaagagttgactgggtatggtggctcacgcctgtaatcccaaaactttgggaggccgaggtgggtggatcacctgaggtcaggagtttgagaccagcctgaccaacatggtgaaaccttgtctctactatttacaaaaattagctgggcatggtggcgggcgcctgtaatcccagctactcgggaggctgaggcatgagaattgcttgaacccaggaggcaggggttgcagtgagccgagatcgtgccactgcatgccagcctgggtgacaagagactttgtctcaaaaagaaaaagaaaaaacaaaaaacaaaacaaaacaagagtttcaggtctgggacaaaccaatcacctctctttagttctccccttgaaaaggtaacttatatttttgataatcgtcttaacaggagcgttattcttggcttttcaaagaaacaattatggacaattgaaagaacaacaaaaataattctaacgggaacggtagagaagtaaaggctggcatctcttcatatgcatgctcagtaaccttgctacccaagtggtggcatatttattgatatttgtatctccccatggccccttaacaaccacactggaatgttacctcagcaacttagtgctccagtgtctttgtgggtgctgttacctccatgtggggcacactcctttcttctctccctctatatcttgccaactcctacctgccaacccttgggtttcagtgggaaatattgcttcccctgggaagcctcctctgggtactatatacctcctgggctcatctcattctacattacatcatgaatatgtgtttatttgtttgtgtctcttagaagatggtagtttccgggtgggtggcaacaatgacattcctccagttatacactcagcactatgtctgcatgagagaggtgctcaaggctggggcacagtggctcatgcctgtaatcccagcactttcagaggccaaggcaggtggatcacgaggtcaagagatcgagaccatcctggccaacatagtgaaatctctactaaatatacaaaaaaaattacctgggcgtggtggcatgcacttgtagtcctagctacttgggaggctgaggcaggagaatcgcttgaacccgaaagttgaaggtcgcagtgagctgagattgcgccactgcactccagcctggcgagagagtgaaactctgtctcaaaaaaaaaaaaaaaaaaaaaaaaaagaggtgatcaacatacattacattgttttaaggggttttggttattaaatggggaaagttattgtgaaaaacaaattaatacatttaaagaaaacatttttggacctgggttcttttaaggttcttcaataattttaagttctctgaaatggaagggaaaaaaataaagtttttttaaaaaaatttttaattttttcactttttatgatggagtctcactctgttgcccaggctggagtgcagtggcagcattttggctcactctctgcctccggggttcaagggattctcttgcctcaggctcctgagtagctgggactacaggcatgcgccaccatacctggctaatttttgtattattattattattttcagacagagtttcgctcttgttgcacaggctggagagcaaatggtgcgatctcggctcactgcaacctccgcctctcaggttcaagcgattatcctgcctcagcctcccaagtacctgggattacaggcacccgccaccacgcccagctaattttttgtatttttagtagagacagggtttcactatgctggcctggctggtctccaactcctgacctcaggcgatccacctgccttggcctaccaaaatgctgggattacaggcgtgagccactgcgcctgagctattttttttttttttttttttttttttttgagacagagtctctctctgttgcccaggctggaatgcagttgcaagatcccagctcactggaacctgtgcctactgggttcaagcgattctcctgcctcagcctcctgactagctgggactacaggcatgcgccaccatgcctggctaatttttgtatttttagtaaagacggggttccaccatgttggccaggctggtctcaaactcctgacctcaagtgatcctcccgccttggcctcccaaagtgctgggattacaggcatgaggcaccatgcccagccctgttattggatttttctgtccaaattttgaatctagacactgacacagggagtaggccttccagtttctagttggtacaaagaagagttgagaaatttgagagaggcaataatttcagccccattcttacaacagtttgtctcagttggtaactgttgaagattattcacctactttttcctcaattcttgctttagaagagccatcaaggaacagctattaccagcagaactgctggaaggaatccagtagatctggccccttgggagagtgggggaagagcaagagtagcctcagggaaaggggtcagggagagatccagcaggaaaggctcttctagtggaccaaccgcttacatccggactattactccacccagtcttccaaggagattctccagtgttagcctttcaggttcctatgtgtcacaggaaataaaaccaaactagcttttttaaatctatgagagagaacgggcgcggtgactcatgtctgtactccctgcactttgggaggctgaggtaggctgaccacttgaggtcaggagtttaagaccagcctggccaacatagtgaaaccctaactctattgaaaatacaaaaattagccgggcgtggtggcacgtgcctgtaatcccaggtactcaggagcctgaggcaggagaatcccttgaacccgggaggcggaggttgcagtgagcagagatctcgccattgcactccagcctgggcaacagtgctcaagacaccatctcaaaaaaaaaaaaaaaagaagaaaagaaaaaaaaaattagcttgttgtggtagcacatgcctatttgggacactgacatgggaggatcgcttgagcccaggagttcgaggttgcagtgggctatgattggagcattgcactccagtctggggaagagagtgagaccctatcaagaaaaaaaaaaaaaatctctgaaaggtacaagacattcttttcttattccttaaatttttaaaaagtttttaatttttatgggtacatagtacatgtgtacttattcttattgattggaagtttataatagatggtacttggaatatctttagttatcactgcaaaattgtagcccccaaaatcagaagaaaaataaagaatttcttgggagaggagagcgcgggacatattggaaggaaattgtgtttcggtcttcagtcttgaggaaaggtgaattactcctgagattaatttggaagaaaattccttgtagtatgctgctgttgttttaatctaggtagtttgtacttacagtttcttatcaatccagaggtgcatatacccagaaagagaagtggagttttggaattattcataattttaatcctgaagccacaacacacacacacacacagcttcttttttttttttttttttttttgaggtgtagtctcattatgtcacccaggctggagtgcggtggtgtgatctcagcttaactgcaaactccgcctgccggtttccagcaattctcttgcctcagcctcccaggtacctgggattacaggcaagcgccaccaggtctggctaatttttgtatatttagtagagacagggtttcatcatgttggtcaggcttgtcttgagctcctaaccttgtgatcagcccgccatggcctcccaaagtttgggattataggtgtgagccactgcgcccagccaaaacatatatatatatatatatatatatatatatatatatatatatacacacacacacacacatatatacacacacacacacacacacacacacacacacacacacacacacatatatatatatatatacacattttttttttgagacagtctcttcctgttgcccaggctgcagtgcagtggcgcaatctcagctcactacaaactccgcctcctgggttcaagcgattctcctgcctcaggctcctgagtagcttgagattacaggcacgtgccaccatgcccagcggaagacatttcttttaaggttattttaggatatttacaaatgtcttttgttagatactgaaaatcaagaggatttgtagagagagctgtatagatggttagaagtgggatcaactcaaattctatatattttcatattttttctgtatattaataaacatcttatggtacatgctcaagtcaagttctaacctgctgtgcaagctgagatatttttacttctttgggcctctgaattatttcatagctaatatttaattttttttgtagagatgtgtctccgctatgtagcttaggctagccttgaaatcctgggcttaagtgatccttcaaccttggcctctcaaagtgcttggattgcagatgtgagccactgcacctggcctctgctcagaatttctgactattctctcccatcaaaactcgcccagagctcagaccaccaaatcacttagtataggaattgaaacacctgatctatgctgtgttcaaacaagtatagatcttcgtggtgaagcatcaatttgatatttggagttaatgttagttctgatcacattcattaactttcatatatagctaggatgagccttggctttatttattatccaattttacagaagagtgcacacacaggccttcgatgtttgcttaggttgtcaagtgcaatgttgtatggcttcatgagtatcctatacagtgaaaacacctgtctttgggcctttacaaaacagacctctcagcaatatagatattctgtacacctaaccctctgagcctgatttcattttattttattttattttcatgatcacacagctaatggatttttttttttttttttttttgagaccgagtctcattctgttgcctaggctggagtgcagtggcacgatctcggctcactgcaacctccacctcccaggttcaagtgatcctcctgcctcagtctcccgagtagttgggactataggtgcatgccaccactcctggctaatttttgtatttttagtagagatgaggtttcatcatattggccaggctggtcttgaactcctgacctgaagtgatccacctgcctcagccttccaaagtgctaggattacaggcgtgagctaccacgcccggctgatcgacttaaattatacaattctatcataatatatcatggccactttactaaatattgaacaattaacctggaaaaaaatgttcattttttaaagttatattcaaacattcaacagaagaggcataatgtgtaactgaaatgcaaggcacttcaagaaatgtaggactacccttgtgcaaagctgatgggaatgtaaaatggtgcggctgctatggtaaacaatttggtagttcctcagaaagttaaacatagccttatcatatgattcagcaattctactccaaggtgtatactacttgtatacctacttgtacacctatgttcatagcagtaatattcataatcaccaaaaagtacaaatgtctaacaacagaataagggaaaaacaaaatgtgttatgtacatacaaaggaatattgttcagccttcaaaatgaatgaaattctgatacattctacaacatggatgaaccttgtaaatattatgctattaataagtgaagcaaagagaaacgaaaagaaaaatactatatgaaaaatactatatgattccaattataggaggtacttagagtagtccatttcatagacagaaagtagaatggaagtcagtatgggctgggggaaggcaaatgaggagttattgtttaatgggtatggagtttctgtttacaaggaagaaaaagttctggaaatggagaggtgatagttgcatagcagttgtgaatgtacttaatgtcactgaacgatacacttaaatatagttaaaatgggctgggcgcagtggctcactcctgtaatcccagcactttgggaggccaaggtgggcggcccacctgaggtcaagagtccgagaccagcctgaccaacatggtgaaacctcgtctccaccaaaaaatacaaaaaattagccaggcgtgatggcgcatgtctgtaatcccagctactcgggagactgaggcagcagaatcatttgaacccggaaggcggaggttgcagtgagctgagatcgcaccattgcatctaggcgacaagagtgaaactcgatctccaaaaaaatagttaaaatgataaattttatgttacatatatttcatcacaatttaaaaaaaaatcaccaaaaatgggatgtacagctaaaagattttgtacctattttcaaatcttactgtatttgattatttttctgccagtttcaatgctgctttattcctcacagagagcttcttatagatagtgtgggcttagtgtgctcaaagttgcactggtggatgtgcatatttcagagtccattggttttgttacaagtgttgcaggaagagttgagaacaccatattcattaggttttttttttctttttctttcttttttttttttttttggagacggagtctggctcagccatctaggctggagtgcggtggtgctcactgcaactactgtctcctgggttcaagcgattctcctgtctcagcctcccgagtaggtgggattacaggcacccaccatcatgcccggctaatttttgtattttagtggagacagggtttcctgttggccaggctggtctcaaacgcctgacctcaggtgatcttcctgcctcggcctcccaaagtgttaggattacaggcgtgagccactgtgcccggccaatagtttttttcttacatgaatttgttaaaaatgtgggtgaggggtgggtgagtgagaggtaatttaaaagtggaaaaacaacgcatgccggacttcacgttccaacacggaaagcatgcttttgtggcaaactgaaaggctagggattaagggtgatgaaatgcaggccttccggccctcactctgttcctgatttctggttgtgggaatctgttctgaatccagctgcaagtggaaaacccatctttggctgagcagccggggaggccctcctgccaatccccgaaatgtgctgctgaaactttggccctgcaaggctggagctagggctgtcttccccagatctgtgcagctgtcaaggtggctgtgatgggactgtgaccgccctctacactgcattttggcagtgaccttgagaccagccagctcaccacagctgccctgctctgctgccgctgttgcaatgccaggtggcttaagaggggtcgtggggggcacggctcccggtccagtctttcccagtgtctggcaggtgctagctgtggtgccagctgtcccactgcctaccacccactgggcgtgggggcagtccaggtgtgtgtcgggagatggtggtttgttctacccctggctcaggtcccgatccctgggaagtgggtggttccgtctgaccgcgagtctggtgcgcagaccggccccacgtggggacttgcttggcaggtctgcggatatagatgctcagtgacagttgatcttgggagacagaagagccaaaggtgtccttttgtcccaaagatatgagtccgaattttccttctcgtaggggagaaattttatttggaaatgaaggtcatcagaaatgcccagagcaagagagaaaatcctttctctctagccactcagagtggcaagtgtattttgaaaactcctccctctctttttgtcctcatcctgtccttttccttttcagtggctttactgttattttttaattcgccattgtcattggacatttattgacagaaatcaaattgctgtgtttctgggcaaagcgcctgctgcaaagaggtgtggttcctgaggaatgagacacgcagcccaacagctgagcctacactgtcctcacataacctccctgccttaaatatcgccaatatttagccttgccttataaagtaaaaatgcacaataccttccagagtttcagcaagcccaaatgcccccctaggctcagttatgtctcctgtacattggaggcagagcagcgcacccctcccccatgcagacctgccctcggaaccgccaagaggttactaatcaggaaggctctaccatcgatccaatggtggtgacctgggggatttgtgtgcattgtttttgttgaagcctcctgtgatttcggcgcgaccagatcctctgcagcgaactccatgtcgcagcttgtggctgcctgtgtcctgtggtgagagccgagccgcacaggagatcctttgtctaggaagggctaggctgagaagatcactttggagttgctaagctctgcattgccattggctgcactctttgtggggctgtttttgcaaaaggcatgcccagcacgtctacagtgctggcaggccagggctgcctttaaacaccatgataataataccaaaaagcagtttgcagaactgttccactgtagaggcttcctctgcagaagcaagcaagatggctacctcgtgggcttcgctgtgaagaatgcagaggctaattaagacagactttaaggggaaaaaagggtatttccctgcttcatctttatgcaagatttttttagtgacttttaaagtatacattttacataagctctttaggttctgcctagcaaacatgttgatgattttaaatggtataaatagttttacagagaaatagccaaaaattttggggatgtgggagctaattttatttcttaaacagaggctcattttgcaatttgattttttttaggttataaaggaaaacaagaggccccagagggaaaagaagcccaaagttttaaaggtaatcagctgttgattaaataatatttcattatttttccatttcatatagtatttttctgcacttgggtatatttggagtacagtatatgtgaattctcccagattttcagtagatggatgaatttccactcaactaaagtgttttctctctcttttttttgatgtgctgcataatgtgcatattagcatcctttattttcaactccactcaagtctacagaaagaaaagtttgtatgcagagtgttgtgaataaaatttgtttttctttatagctccctttgtagcatctgcatttgtggtgttgcaccagtgtgtaaacttaagccctttagaagaaaggcactatttgaagttgacagctatgatccattgtgattttaatagactgtccattaaaggctattttaaaatgtatgattcttttccaaagaaaaagtccttaatgtgtaagtagtggagatcttacagccaaattatagttgtttaatctcaaattctcataatatcatctttaattttggctttcatgaagccataagaatatgcatgttttctttattttctatagtttgcctgatgagtattaatagtaacctaattcagttataagctcacagtctgtgtgatgagatttgtacagtgtttagaagggttaatttaaaagcatatggcatcactaaaagttcaaggctagctttagtctaacgaataggtgcttatgtgtttaagatttcaagtggtgtattgctattacaaatgtaagcaacctttgcaagccaccttttaaattcatgaagaaatactaagcaataaaatgacttatctttaattattttgtgtacatttaatttaaaatagttttacctaatcctagctttccttttttacacataaagttttagcactcaaagaggaacaacatgttgaactatgaatgtggcagaattttatttcatttgttgccccagtgtgtaacttgaaaatgttgacacggagaaccaaaccttgccctgctttcaaatttgcctgaccacattgagtttctgcttcctgtgtatatacagcattttcatgtacctgtttcatcaaccaacaagtatttatttaatatttaccacatagtcagcaatgtgctaggcactgtgaaatgaatgaaattgcttgacacaaattttcactgggcctggacaaatagaatcatggttattctcaaggtaaattaaacccttttctgtttttcttctttgtgttgatccatcgacccccatttattccttttccttccaacagagatagaagtttatcattaaaagctccttctatactttctgtgttggctatatccatctcaggcattttgtgaaaaatagatttagtcttcctcttaaaaatggctctcatttgttggggttgtggatggggattagcaggagaaagggatagattatgtggagaaactaatacagaccaagcctagtatctatgtcttcccctgccttggctaggaagtagaattggactttgggaatgcaatttaattctatgtttattttgttagattgtgagtgtcctgtcacctgaaataaatgtaaaaagtaaatatgccatgtgttgctttttggaatcacggtagtggactctggcttaaaagaaaaagaataaaagtgcctgtgggtggccacatttcatctgcaacagcaagcagaaccaaattgttgctcacgttcctctatagttagcaattactgtacaagagcaggaaaatattctaaaaggaaaaaaaatttctgatgttggcatttaaaaatggttttccacattttctgttagacataattttttttctcatccaaagaaagctttgtttctctgcttcacagtagaaatgctaaaaaaaactttcagattttagcttgatgtgtataaaattcatagagcaaatgtagaatattatataatcctatagaagacataaaaaaaatgaaacctgtgtttgggagggagagtgggagaggaatacaactgtcagcttgaggttttatgagtgaggacttcaacattctaggagcatgctacctgggggaccagtgatgggaatctcacagtttatgatttggtcttccatcattatttgctgtctttacatttggtgtcattccagaaatttagtctgcttcctttgactttatccttttagatgttgaaatctcctggatcatttaccctttgtcagggtggatgctgcaggtatcctgattgacttttcattttcatcatctattagaaagtagttggatacgtgaagaacctgattcaagaagttgggtatagaatttgagacttgtttcatcctacactgacctgaacctgataactattgaatccagttgtggggctgaaattggctggcatgtcttatatccctctcctcttaaaaacatacctgttatccaccaggtatgatgactcatatgtgtaatcccagaactttgggaggccaaggcgggaggattgcttgaggccaggagtttgagaccagcctgcaaaacctagcaaaatcctgtctctatgaaaaatttaaaaattagctgggtgcgacggtgtgcacttctagtcctagctactcaggaggctgaggagggaggattgcttgagcctaggagttggaggctgcagtgagctataatcacatgagctatatgcactccagcctcaggaatagaatgagaccttgtctcccaccaccaaaagaacactattatccatatttataccatattcattctattgtacttcaaaattaaaaactaaatagcgatctaaatcctgattagagattcttcctgtagctgaaatgacagctctggccaaagcactctaaaggccagaatgggtatcagctaatggtgcactagtggtgggtgggggtagctcagcatcaacttcctattcaagcctattggtgatcactagttattttcatatatagatgacatcttgttagcaatgttattattggaaacacaagcatttccttgactcttgatctaggtagaggtgtggtctaattccagtccttcaatcacgaacttagccttttaagtgacgtggtttggaattcctcttggaagaaacatttgtgtaaataacttttactttgtgtgtgtgtggtgggagcaggtgagtaggagtgtatactccctttaagaaagtcaattttaagatgataatagttttgttagattgttagtcattgtccctggagaaaatcagacagcacagtcaattgggggtttgaacagagtttaataaaggaattactttcaatagtgtgggagggttaaggaaagaactaaggatggtgaagaaatccagatctaatgaaggcagagctattactaatcctaggcctgaagggggatggtgagtggaaaccaggtaatgtagctacagctgagtagaggaagcatgggctggagcctttggtaaagagatgctcttgcaaggagtcaagtggggggtgggtgtgggataaatgccctgctctccagtctcctgctgctttgattggttgatcccaatggggagccagagtgaaaggggagacctctgatgtagtacacgctggtcagccttctgggatgtgtaagaaggttatggaaggtggaatgtaggcctggaagggaaaacaacatactgggcatgactagtgaccacaggggtggtatggtagagtgaacaatagtactagaactgtgattacataagatggtaacattaggcaaagatggctgaagagtacataagaactctatactatttttgcaactcatctgtaaatctaaaattatttcccaataagcatgaggatccttgaggggatgcatttatacattctgtaattagatagtctttttggctggtaaggaatattttctagctatttaattataaaatatcatcagagtagtatttggaagagctgggtgaacaaatataaagaaatgtcagtggatattaaactaggagagtgtctccagaggttgattttaaaaaggcaaaatgaaaactaagggatcttcctgcagggttcagcactgacttgctcttctcttttccttcattccttgatgatgctgataaagaacaagtggggccaggagagtggctcaggcctgtaatcccaacacattgggaggctgaggcgggcagatcacctgaggttgggtgttcgagaccagcctgaccaacatagagaaacccccatctctactaaaaatacaaaattagccaggggtagtggcgcatgcctgtaatcccacctactcgggaggctgcggtaggagaatcacttgaatccaggaggcggaggttacagtgaggaaacaagcaaaaattgccgagatgatgaaggaaaacatcatctagggaaagatacttaacattcccatcatttataaattgtttttattgaatttatttacttatttatttgagacagagtctcactctgtcactaaggctggagtgcagtggtgcagtcttggctcactgcaacctctgccacctgggttcaaatgattctcctgcctcagcctactaagaactgggattacacacatgtgccaccacgcccagctaatttttttgtatttttagtagagacgaggttttgccatgctggccagtctggtctcaaactcctggcctcaagtgatctgcccactgcagcctcccaaaatgctgggattacaggtgtgagcaaccacgcctagcccataaattatttttatatatactagaccagtgctggtttaaaaggactaaattatactctggttatgtttgttgtttgttgtttgtttgtttgttgagctgaggtcttgccgtgctgcccaggctggttttcaactcctgggctcaaactattttcctttctcattctcctgagtagctaggattacagccaccctcccctgctaaaattactaaattagatacaattgagttacattgtttattttaaaattctattaagctataaataggccaggttcggtggctcatgtctgtaatcccagcactttgagaggccaggatgagtggatcacttgaggtcaggggttcaagaccaccctggccaacatggtgaaaccctgtctctactaaaaatacaaatattcgccaggtgtggtggcaggtgcctgtaatcgcagctaattgggaggctgaggcaggagaatcgcttgaacctggaaggcggaggtggcagtcagccgagattgtgcctctgcactccagcctgggcgacagagggagactccctctcaaacaaacaaacaaaaaaccctacaaatgaaagataacatagttgctaatgattttcttctgcttatttgtctataactttgtttcagttagtaaaataaatcattggtaaagtaatttctttagagtttttaaacagacggttataatgcaacattctattacttgtagcaacatgttgcaaatttaagtactagatcaaatactaagcttgaccatccttcaggggaaaaacaaaaacaaaaaaaaaaacacatgtcattttgataggtccttatagtcccaggcaactaatcccagacttctggatttaatgggccagtgaggaaaaaaatcagagtgggtgttgaaaatattcacaagggaataccagctttaatttttaaaaatggaaagaagataatatcagaacacaggaaggtcatagaaatttaataatttagttttatgacaacacattgtctttattgaactcattttgtcataaactggcaaaaactgttaaggacgtgtgctcacccatcagtgtttattcacacaatcaaagacacacatgggcttcgtttgtatacccagaaactgtaatacagcattttgcctggagatcagactggatttcagggctgagttctcactaaaccagctcatatacaggcattcgtttatcactgcagcatgtatatttccagtgactcaagactcatgtccattctgtgatttctaggaatgatcccaaacagagaatcaaagtgaataaaagccaaatggagttggacgggtttaaggaaaatttcattcaggctattaaaaaaaaaaaaaagacttgaattcttcctagtccacaaaagaacatatgccttgtatcctgaatacttaggctcatctggtacgtgtttgtgttttgatagtgccggattcatactgtttctgagttgtactttctttactgtatagctctccatttactgactagaatatattctcatgagtcagatgaaaagagccaactaataactttatttaagttttgtttggatcttaagttttttttttttgttttttttgtttgtttgtttatttgttcttgagacaggtctcactctgttgcccaggctggtgtggagtggcacaatcttggttcgttgcaacctttgcctccggggttcaagagattctgtagcctcagcctcccaaatagctgggatcacaggcacacaccaccatgcccagataatttttgtattttttgtagagacaaggttttgccaggctggtctagaactctgagctcaaagcaatccattctcctcaggctcccaaagtgcaggcctgcaccactgcacctggccttcttaattcatttttaagtgaaatatttttaataatggaatgtcttgcaatgtcattcatatatatatatgaatatatatattctctctatatatagaatatataaatatgtttatatatataaatataaatatatatttcattttcaaagatttgatggtaaggtttgccaaccaaaatggcctatgcaagagaacgtgggtaacagaggtaacagtgtcttttttttttttggacagagtcttgctctgtcaccaggctggagcacagtggtgcaatctcggctcactgcagcctccatctcccgggttcaagcagttctcctgcctcagcctccggagtagctgggactacaggtgcataccaccgcacccagctaatttttgtatttttagtagagactggggtttcatcatgttggccaggatggtctcaatctcttgacctcatgatccaccctccttggcctcccaaagtgctgggattataggcatgagccaccgtgcccagccgacaatgtcctatttatttatttattgagacggagtctcactctgtagcccaggctggagtgcagtggcatgatctcagctcactgcaacctccgtctcccaggttcaagcgattctcctacctcaacctcccgagtaactgggattacaggcgtccgccaccatgcctggctaattttctttattttcagtagagatggggtttcaccatcttagccaggctggtctcgtactcctgacctcgtgatctacccgccttggcctccctaagtgctgggattataggcgtgagccaccgcgccaggcctattatttatttatttttgagatggagtcttggtttgtcacccaggcaggagtgcagtggtgtgatcttggctcactgcaacctccacctccggggttcaagtgattctcctacctcagcctcctgagtagctgggactaaaagtgtgtgccaccaagcccagctaattttttgtagttttagtagagacagggtttcaccatgttggccaggctggccgccaactcctgacctcaggtgatccgcctacctcagcctcccaatgtgttgggattacaggcatgagccaacatgcccagccatatttattttttaattaaaaaaaaattttttttaatacaaaagaggggtctcaaatgttgcccagggtggtctcaacctcctggattcaagcgatcttcctgccttggcctccaaaagtgttggaattacaggcatgagcaacctttcctggcccatagttttgtttgtttgtttatatgtttttatgacagggtctcactttgtcacctaggctggagtgcagtggctctgctcactgcagccaaaacctactgggctcacgtgatcttcccacctcagtctcctgagtacctaggttgacaagtgtgtgccaccaagcctgactaattttatttttttttgagatggagtttcgctcttgttgcccaggctggagtgcaatggcgtgatcttggctcactgcaacctccacctcccaggttcaagtgattctcctgcctcaccctccctagtggttgggattacaggcatgtgccaccacgcctggctaattttgtatttttagtagagatggggtttctccatgttggtcaggctggtctcgaactcctgacctcaggtgatccaccctcctcggcctcccaaagtgctgggattacaggcatgagccactgcccccggccaagcctgactatttttaaaattttttgcagagaccaggtttccctgtgttgcccagggtgatcttgaacttctgggcttaagcaatcatcctgccttagcctcctcaagtgttatcccacagttttaaatagtaactccttttctgtacttctgaagtttttgtcatctatgtgtaaaattcagtgatgtcacatgaatttgattaaagcatagattattttcataattctaggaaatcagatattaaataataaacttattctaggagtttggttattttatatatatatagcgtgtgagagcattttaaaatatttcatttatttatttttaaatattttatatacatatacaccatatcataggattatctgggagttgggtgaattatttaaaatatgttaggcagggcacagtggctcatacctgtaatcccagcactttgggaggctaaggctagtgggttgcctgagctcagaagtttgagaccagcctgggcaacatgagaaaactacatctctatatatttataaaaaataaggcagggcacggtggctcacccttataatcacagcactgtgggaggccgagacaggaggatcacgaggtcaggagatcaagatcatcctggctaacacagtgataccccatctctactaaaaatacaaaaaattagccaggcgtggtggcgggcgcctgtagtcccagctacttgggaggctgatgcaagagaatgatgtgaacccgggagatggagcttgcagtgagctgatattgcgccactgcactccagcctgggtgacagtgcgagactctgtctcaaaaaacaaacaaacaaaaaggccaggcatggtgacttatgcctgtaatcccagtactttgtgaggccgaggcggtggatcacttgaggtcaggagctcaaccagcctggccaacatggtgaaaccccatctctactaaaaaaaaggaaataacaaaaattagccaggcatggtggtggttgcctgcagtcccagctactcgggaagctgaggtgggagaattgcttgaacccagggggcggaggttgcagtgagttgagatcgcccactgcactccaccctgggtgacagagggagattccttctcaaaagataaaaaaacacaaaaataaaaaatatgttaaatgtttagaaccgcttggcatactgtggtttttttgtttttacttttttttgacaaggtcttcctcggtcacccaggctagagtgtagtggtgtgatcatggctcactgcagccttgacctcctggatcaattgatcttttacttcagcctcccaaatagctgggaccataggtgtgcaccaccaatcccgcctaatttttatattttttgtagagatgaggttttgccatgttacccaggctggtctcaaactcctgggctcaagcaaacccaaagtactagcactacaggcatgagctaccttgcccagctagtaattttttaatagtgattataattacaagtaaaggtgtaatttatgttcataagaatatgaagtgaactaggctgggcgcagtggctcatgcctgtaatcccagcactttgggaggccgaaggtggtgggtcacaaggtcaggagttcgagacaggcctggccagcatggtgaaaccccgtctctactaaacacaaaaattagccagacatggtggcgggcacctgtaatcccagctactcgggaggctgaggtaggaaaattgcttgacctcaggaggcggaggttgcagtgagctgagattgtgccactgcactgtagcctgggcaacagagcgagactccttctcaaaaaaaaaaaagtgacctttccaaaaaatgtggatttcagtcaggtgcagtagcacactcatgtagtcctagctactcagaaggctaaagcaagaggattgcttgaactatggagctcaagaccgtggtatgctatgagagctcctgtgaagccaccgcactccagcctgggcaacatagcaagactccatctcttcaagaaaaaaataagtgggttgggcatagtggcttatgactgtcattccagttactcaggaggctagggtgagaggatcatttgagcttgggagttccaggctgcaatgagttgtaatcatgctactgcactccagcctaggccaattgtcagagaccctttctttcttttcttttcttttcttttctttcttttcttttcttttcttttctttttctttcttttttttttagagggagtctcgctctgttgcccaggctggagtgtaatggtgcgatctccgctcactgcaacctctgcctcctggattcaagtgattctcctgcctcagtctccatgagtagctcgggaggtggggggggtggggagagagggagagagagagagagagagggagggaggggagaaaggaaggaaggaaggaagaaaggaagggagggaggaaggggaaaagaaaataatattatttcctcttggtatattcacttgatagccttactgagaaatataagcctatattcaacagaggcttttcattccttttgaaaatgtcacttctgttttaatttacttacaatggatgaggcatatcttgttgttgttttcttttttttttttatttgacagagtctcactctgtcacccaggctgaagtgcagtggctcgatcttggctcactgcaacctccgcctcctgggttcaagtgattctcctgtctcagcctcctgactagctgggacaacaggggcacaccaccacacccagctaatttttgtatttttggtatagacgaggtttcaccatgttggccaggctggtcttgaacttctgacctcaggtgatccaccagcctcagccttccaaagtggtgagattaccagcatgagccaccgggcccggccagtcattttgttttaatgtgatcagcaggtactaggacccaattctataatcccagcagtgtgggaggctaagtttggagaatccactgatccccggagtttgagaccagcctgggcaacatgttgggatccagtttgaaaactgaaaaataaaataaagtcctttatagtctattaatttgcttaagtttttatttgcatttattattctatatgtatgggggttttttgtttttgttttgtttaggagatagagtctcactttgtcacccaggccgtagtgcagtggcaagatctcggctcactgtagcctcacctctcaggctcaagcgatcctcccacctcagtcccccaagtagctgggactacaggtacacaccaccacgcccagctaatttttgtgtttttcatagagacgggtttacagcatgttgcccaggctggtcttgaactcttgagctcaactgatctgcccacctcagactcccaaagtgctggaattacaggcatgacccaccatgcctggctgcttttatgaatcattacaaatcctttaagggtagagtagtattcacctttttgttctccacagtgtctaacagaatatcttgtgtttacaactcaatacatttatctttttaatgaataattgaattcatacacattatagcttaacttcagtcagttaagtcagaactacaaaatttgtgtaattgcatcttggtgtaaaggaaaaactacttcctcaaatcattgatccagcgttgatagtctctgtaattaattgctatggcaaatcaagatacatatttaatacatttattttaatttggttaacttttctctgacatgttacatttaaaagaacccaaacctacagaaaagtctttctttttgatgatggttgcatagactacttgttccattttgtaaaaaaatcttttgatttgatggtcaagtgatttgggtaactgacagtaaatttcagtaagtttcaggtaggttgtccaatctatgtttaactgttggagtctttgttggagactgtccaaagttcctaattacaggagattagcagattggaaaaaataatgtaattgggtaaactcagagattaaattgatctgctgcatccaccccagtggtttcagggaatgaagataaaagaatgccttaatcattggttcattgaaaaaacaacatggaaaaaaaaagtaatgatataatagagcaatggggaagcactcacaaaaacactactggttggccggacacagtggctcagcctgtaatccctagcactttgggaggccgaggcaggtggatcacctgaggtcaggagttcgagaccagcctagccaacatggtgaaaccctgtctctacctaaagtacagaaaattagctgggcatggtggtacgcacctgtaatcccagctactcaggaggctgaggcaggagaatcgcttgaacccgggagacactggttgcagtgagccgagatcgtgccattgcactccagactggaggacaagagcgagacttcgtctcaaaaaaaaaaaaaaaaattgctgtttaaagtattttggtgaaccttatttgaaggttatttgctgattaagataagtagaagctatttcaatgttaattttgtccctccacccatgaaatctggtttatgctctcacttaatggatagtgtaaaatagctgaactgaagattggaacatttcatgagaaatttaatccacctgtccagggtttatttaaagcctgtgatatttgatcacttcactaaaacaacttaggaccatgctgaccatgctgatttagttgggccacattttctaagatgctatgcattatcacaaatgatacaattatactataaggtctaacagctaatttctgctcaatagaatttctagggggaaatactgaagattaatttatgtgctgttcatggtcagaaataaaaaacagtgtaaatactgtgttttccttcaaaagtggagaaaggaaaaaatgtatttttctgtcctgacttttcaaaaaactcagtcaaattcactgcccaagaaatgtgatttgctaaattctgaaatgaaaaagtatcctgtcttctcacttcttaattttttgagacaagagtcttgctctgttatccagggtggagtgtggtggcacgatctcagctcactgcaacctaaccttcacctcttaggttcaagcgattcttgtgcctcagccacctgagtagctgggactacaggtgtgctcactgcattctccacctcctgggttcaagcagttctcgtgcctgagtctcttgagtagctgggattacaggtgtatgccatcacacctggctaaattttgtatattttatagagacagggttttttcatgttgcccaggctggtctcaaactcctgagctcaagcaatccgcccaccttggcctcctaaactcctgggcttacaggcgtgagccatcacacccagccattctcacttctttcttgtgtgtttcataaaaaatttaaaatttttatggctttttttttttgagttttacttttttgcccatgttggcactccaacgtggtgtgatatcggctcactgcatcctccgtctcccaggttgaagcaattcttttgcctcagcctcctgaatagctgggattacaggcgtgtgccaccacacccggctaatttttgtatttttagtagagatggtttcaccatgttggccaggctggtctcgaactcctgacctcgtgatccacccgcctgggcctcctgaagggctgagattacaggcttgagccaccgctcccagcctggcatagtacacagtattcccttataccctaccctgaggtttcttttttttcctctctctctccacacagtttttaccctgaattctttgagagtaagtttcagaatggtgtttcttttcttttctttttttgagatggagactcactcttttgcccaggctggagtgcagtggcatgatttcagctcactgcaacctccacctcccaggttcaagcgattctcctgcctcagcttcctgagtagctgggactgcaggcacccaccactacgcctggctaatttttgtatttttagcagagatggggtttctgcatgttggccaggctggtcacgaactcctgacctcaagtgatccacctgcctcggcctcccaaagtgctaggattacaggcatgagccactgcgtccaggcaagaacagtgttttttattttttatattttgagacagagtttcactcttattgtccaggctggagtgcaatggcgcgatctcagctcaccgtaacctctgtctcccaggttcaagcctcccaagtagctgggattacaggcatgtgccactacgcctacgcccggctaattttgtatttttagtagagatggggtttctccatgttggtcaggctggtctcgaactcccgacctcaggtgatccgcccgctttggcctcccaaagtgctgggattacaggcataagccaccacgtccggcctaagaatggtgttttttaaactccttactagagtatttcctataaataaggacatcttagcttactgtaaatcatcaaattaaggaaatgaacatttatacaatgctattattatctaatgtactaatgtactgataaggaaattaacattgatacaatgctattattatttaatctactaataaggaaattaacattgatacaatgctattatttcatcagataataatttactcatcagtacctattcagatgtcaccaattgtcctaataccttgtaattcagacgctcattatgcattgcattcagttgctatatctctttagtctttcaatctgatattttccaagcgtacaggtcagctatttttgaagaatttccctcaaattgagttttgcatttgctgatgattacattcaagttatgcattttcacaagagtatcacagaagtgagtttgtgatctctgcagcatcgtatctggagacacatgtcaatttgtgaccttaacagatcacttggttaaggtgtatctgccaggtttctccagtactaacttagtctttcattttgtaattaagcaatcttttgagaatttttttttttaatgagacatggtctcactctcaccctggcgggaatgcagtagctcaatcacagctcacggcagtctcaaacttttgggctcacacgatcctctcgattcagcctccaaaattgctgggattacaggtgcatgtaagtatgcccagataatatttaaacttttttttttttttgagacggagtcttgctctgtcgcccaggctggagtgcagtggcgcaatctcggctcacggcaacctctgcctcccgggttcatgccattctcctgcctcagcctcccgagcagctggggctacaggcgcccaccacgacgcccagctaattttttgtatttttagtagagacggggtttcactgtgttagccaggatggtctcaatctcctgacctcgtgatccacccgcctcggcctcccaaagtcctgggattacaggcatgagccaccgcgcctggccttttttttttttttttttttttttttttttttttttttgagacggagtcttgctctatcgcccaggctggagtgcagtggcgcgatctcactgcaagctccgcttcccgggttcacactattctcctgcctcagcctcccgagtagctgggactataggcgcctgccaccacgcctggctaatttttttttgtatttttagtagagacggggtttcaccatgttaaccagtatggtctcgatctcctgacctcgtgatccacccacctcggcctcccaaagtgctaggattacaggcgttagccaccgcgcctggccaatttttaaacttttttacagacatggagtcttgttacattgccctggctggtcttgaactcccagcctcaagcgatccttctgcctcagcctcccaaaatgctggggatacagggacaccctaccaagcacagcctgagaagatacattaagactatgtcaatatactgttaattctctttggtttttagcatccattgaggatctttgttttttttgtttgtttgtttgtttgttttgagagggagtctcactcttgttgcctaggctggagtgcaatggcatgatctcggctcaccacaacctccacctcccgggttcaagcgattctcctgcttcagcctcctgagtagctgggacttataggcatgcgccaccacgtctggctaattttgtatttttagtagaggcggggtttcaccatgttggtcagactggtctggaactcccagcctcaggtgatccacccgcctcgacctcccaatgtgctgggattacaggcgtgagccaccgcgcctggccaatggactctatttttaacccaaacattttatcttgtaccatgttacctttacgtcatcttgaatttctttctttctctttttttttttttaaagagacagtgtcttgctctgttgtccatgctggtgtgcagtagtacaattatggctcattgtagcctgaacctcctgggctcaagtgatcctcctgaggcattgggattacaggcgttagtcaccatacctggctttgaattttgggggtggggagggcatagcaatggtacctcttgagtttttaagagtaaaggaggaaaccttttaagtaatagtaaaaaatgcttatggcttcttgtgtcactccactcatgaaatctagtttataccttcacttaaactagatcaatatctgattgcacagtgtagttaaaatggctaagtttggtttaagaaagttggagtcaggttactgtatggtaaaatgtggctgtagtaactggcatattttttaaaaaaaataggtattagggaatgaggctaactaggcatagaattccacgggaatgtgacatagacttcattccttctttatcttgcccttcctgctcttatcttccacagagctttatcttaccaggaccttaatacaaacaaaagaagcccaatgctgaaagtcaatggagataaagtaaaatagaagataaccaattaatcagtgacaacctactcctccaatctgggaccacctagctgtgaacaaaagaaaaaagatttgtttatgtaccagataggaaacaaatagcagaaaatgcccttcaggtcatgtacaaacacaaaaattacctctgagtgaaattttagcttattataatagcataagtatagtacaatcctatgtacaactgataatccaagggcaacatgtcaaagtgtagtcaaaattaatttgttatgaaagaaaatgcagattaatcagtatgatttaaaaggaaatctgggcctggcctggtagcaaatggtgtcatctcagcactttgggaggttgagctgggaggatcacctgagcccaggatttcaaggctgcagtgagttatgatcttgccacgtcactccagcttgggtgacagaattagaccctgtctcttaaaaagcaaataaataattaagtaaaaagaaattcaatgaattcatttaatagtagttttaaattttcgaaaggaattaaaggtacaaaggaaaagtaaacattctcctgtatacttgttcctcccttctttcaatcttagtctcatatatcagaggtgcagtcttgatagttttgtgggtatctttctaggtatagtctatatacatacaagtatctctatagttacatatgtgtagtatagacacatgtgtccaccccttccgttattctctttttttgagccagagtctctatcacccaggctggtgtgcagtggtagaagctcatcagctcactgtaacctccgcctcccgggctcaagcgatcctcccacctcagtctcctaagtagctgggaacacacatgctcaccaccacacctggctttttaaaatattttttgtagagacagaggggtctcacttttttgccctgagctcaagtaatctagccccctcagcctcccaaagtgctggggttacgggtgtgagccaactgcacccaaccacgcccattcattttgaatggcagaattatttttaaagtttatttttattgtaaattgacaaacaatagttgcatatattcatggggtacaaaacaacattgcatttttatgaatacaacgtggaaaattaatctaattaacatatttatcaccttaaataacttatggtgaggatatttgaaatgtactcagcaaatttgcagtgcacagtacactaatagctatatttaacatgctgtgcaggtgtcattagtttttgaagtgcattttacatattgtgaaatactcagatcacaaatatattattcagcgagttttgatgactgatttccccagtctcattgagatatgatttgtataccatacagttcactcatttaaagtgtacaattcaggctgggcatggtggttcattcctgtaatcccagcactttgggaggccgagctgggcagatcacttgagtttaggagttcaagaccagcctggccaatatggtgaaacccccgtctctactaaaaatacaaaaattagccaggcgtggtggcaggggcctgtaaccccagatacctgggaggctgaggcagagagaattgcttgaacacaggaggcggagattgcagtgagccaggcactccagcttgagcgacagagcgagactttgtctcaaaaataaataaataaaataaagtgtacaattcagtggcttttagtacattcaccaatgtgcatctatcatgacaatcaattttagaacattttcattacctaagaagtaaccctgttctccttagctgtcattccccaatccttccatttaccccagcccttggcaaccactagtgtacttcctgtctctggatttgcctattccagacatttcaaacaatggcatcatatagtacgtgatacttagtgactgactttcactttgcataatcttttccaagtttatctgttgtagcatatatcactacttttcttgagtaatgtttcaatgtatgtattatgtatatagctcattttctttctatatcctccagttgttggccatttgtacaccacccccacccccaaacacacacactttttaactactatgaagaatcctgctatagtcattcatgtggaactttttgtgtggacatgttttcactcttcttgggtacataccaagaagtggaactactggttcctatgttaactctatgcttgactttaagagccactgccagacctttccaaagcagcttcatccttttatgttcccactaccagtggatgaaaggttcagtttctctacatcctggtcaacacttattaatgtccatcttaaaaattttagcctcctagtgggtggcaaactggtatcttgaatagctaatggtatttaacatcttttcatgtgcctcttggccatttgtatgttttctttggagaactatctattcatatttaaattgcgccatttgactgtttattattgaattataatagtactttatgtcctacacacaagtcctttatcaaatgtatggtttgcagttattttattctgttagttatggtctcataattttggttgtgttcagtttatctttttctttgggtaattatggttttggtgttaaaaacagttggccaggcatggtggctcatgcttgtaatcccagcaatttgggaagccaaggtgggaggattgcttgagcctaggtgtttcttgttgttgttgttgttgttgttttgagacggagtttcactcttgttgcccaggctggagttcagtggcgtgatctcggctcaaagcaacctacacctcttgggttcaagtggttctcctgcctcagcctcctgagctcaggagtttgagactagcctgggcaacgtggtgaaaccccgtatttactaaaaatacaaaaattaactgagcttggtggcttgcacctgtagttccagctactcaagaggctgaggcaggagaatctcttgaatccgggaggcggttacagtgagctgagatcgcaccattgcactccagcctgggtgacagagtgagactccatctcaaaaaaaataaataaataaaattttaaaatctggctgattaaataccagtttcccctgagtagacgatttggggtgtttcttctggttttccttctctacatctgttgcattttcaatttttttctgtagtgagactttaataaaatcaaagaaatttcaaattataatgaaaaacacaaaggctaaccttaggattaaagaactgagtgatcaacgtcatgtacattatgaaatccattccctatatctaaaagttctgtttaaacctgagccttgagggagaaaaagggtcttgggaacaggagtatgggctctaaactgagatagttatatgtttgtcttttttttatttggatatcatttgatatttataaaatgattacaaaagtagtacaaagaattctcttatactctttatccaacatccccaaatgttatcttacatagccttagtatcagtcaaaactaagatgttaacaataacacagtgctattaactatgttaaagatgtaactcaaatttggccaatattcccacgaatgtccttttttgggtgcaggattccatataggatacctatgcccttccttccttccttccttccttccttccttccttccttccttccttccttccttccctccttcctcccttccctccctccctccctccttccctctctccctcttccctctttggacaaggccttgctctgtcgcccagtctggatggagtgcagtggcatgatctcgggtcactgcagtctctacctcccaggttctaacaattctcctgcctcagcctccagagtagctgggattgcaggtgtctgacaccagacccagctaatttttgtattttttttagtagagacggtttcaccatgttcgccaggctggtctggaactcctaatctcaggtgatctgcctgcctcggcctcccaaagtgctgggattacaggcatgagccaccacacccggcccctcattgcatttagttgtcatttctccttgatctccaacacagttccacacagttcctcagtgttgaacagttccacagtcctctttcaacatagtttctcagtgtttgcctttcatgacattggcagttttaaagaatcttggtctgttattttgtagaatgtccctgaaattggtttttaagaaaatttttgtagagacagtgtctcgccgtgttgtccagattgatctcaaactctttccctcaaaggaccctcccgccttagcctcccagggtgctaggattacaggcgtgagctactgctcttggctactcaaattgggcttgtttggtacttcctcataattaaatttaggatatgcatttttggcaataatccacaggagtcaggtgccctgctgtgtatcatgtcagaaaatcacattatctgggttaactttgatctcttggcttaagggttttacagagatccttggccaggtttcacctctgtaaaattactgtttccctttgtaattaacaaatattaatatattgtggggagatacttggagactatgcaagtcctttaatcgtatttagcatctactttgcctccaatacatattaatgtggtgtttgccaaatggtcattttctgtttctaccattccttctacatctattaatggaaattctactgtaaaaaaagtgttgtcctttttctcccatttctttgttcatcaattatttgttatattaatataaacttacagctatttattttattctatgggctataaactattactgacaaatatatgaaaggttaaaataggactgttggatagaagggaggaggaaacagcctactacatactgtttcgaggtagttagtttcctgttgctttggatacttggcaaaggttgaggaatcacttaatagagttaacagagtccacccctggcatcagtagatggactcgatgcccttgaaggtctcttctacctttgagatcctctcaacggcttaagcagaaaacacagatggccacttcataacttacttaactactaagcttgcatagtcagggttagcctctggtgtatctgtcacataattagtaaaatccagcaacaccaccaggcaacgggtaaagtgtgtagaaattcagtgtacatcgaaacagaccatccctgatgattccaccacactcatttagctgaggtctcacttgcaagactcaatatactgatgcctaagtagctcaaagcgacttttccttggcatgtacaaagaagattatttcattttctggtgttgttttctagtaacagctacactgctgtgtgatgtgttgtctgctgccaccccaaatccttttccagcactttttcctttgaatttcagccttggattattctcccccagacatttccatatttttcagctgacttgtgtacatgtttcctgcctcccccatttgtgaaatattttcatgaagcaatataatagttttaacacacatattttcttttttctttctttctttcttttcttttttttttgaaatggagtctcgatctgttgcccaggctggagtgcagtgtcgcaatctcggcccactgaaacttccccatcccgggttcaagcaattctcctgcctcagcctcccaagtagctgggattacaggcgcgtgccaccatgcctggctaattcttgtgtgtgtgttttttgtttgtttgtttctttctttttttagacggagtcttgctcttgttgcccaggctggagtgcaatggcgctatcttggctcaccgcaacctccgccttccgggttcaagcaattctcctgcctcagccttccgagtagctgggattacaggcatgcgccaccacacccagctaagtttatatttttagtagaggcagggtttctccatgttggtcaggctggtctggaactcccgacctcaggtgatctgcccacctcagcctcccaaagtgctgggattacaggcgtgagccaccgtgcctggccttattttctttttctctttctttctttctttctttctttctttctttctttctttctttctttctttctttctctctctctctctctctctctctctctctctctctctttctttcttttccttccttctttctttccttctttctttctttcttttttttgagacggagtcttgctctgtcgcccaggctggagtgcagtggcgcaatctcagctcactgcaagctccgccttccgggttcacgccattctcctgactcagcctcccgagtagctgggactacaggagtccgccatcacgcccagctaatttttttttgtatttttagtagagatggggtttcaccgtgttagccagggtggtctcgatctcctgacctcgtgatctgcccgcctcggcctcccaaagtgctgggattacaggcgtgagccagtgcgcccggcttctttttcttactgtatgttctcttacaacatcagttaaattttcttcccttttagtagcctgtagttattggtctcatttattattggcccaacacttggattttactcattttcacttaattgttaaatttagaaggtcttaggttttatttgaatttctactagccaagtttgcccgctcctggcaagggtcctttgttgactgtatttgatccagtatctagtccctatgattgcactgtctcaagccgatttgtttgaatcagttttgcaaagaaaatgccaagaagccttgtagaaattgctttattattaatattcagatgtagaatgcctgccaaggcttcatcacacaggagccttggggtctcaaaagtcccattagtttttgctgctgtcatctcatttgttagcaggcatcaaagtcgcttaaaagcgggtcacaaaaggctacttggcaacgttccacagaggtgtagattaaagatattttagggtcaggatgtaactttaacagaaaaccttcagtgttcacatatcaggaaatcacatggttttctggtgttatttttacctattttcataaaaagccttacactcagctgtgttggtctttgcaaccttccttaattgtatgattttaagattcattgttgtttttagttgtgtaacaccaatctttttggacctctggaattcatactattgaagtaatgcagtcccagatttgaatttatctgtttataactgttaggaaatacttagagtgagccaagtgtaatggctcacacctgtaatctcagcactttgggaggctgaggcaggtggatcgcttgagcccaggagtttgagaccagcctgggaaacatgaagagacccagtgtctataaaatacaaaaaagcctggcatggtatctacatgcctgcagtcccatctactcagaaggctgaggggggagaatcacttcagcccacaagttccagagtgaggtgaaccgagatggtgccactgcactccagcctgggcaacagagtaagaacgagaccctatctcaaaaaaaagaaaaaaaaaaagaaaagaaaaagaaaagaaaatacttaaagggggagggaaaatacggtgtccttttctgtatggttgtactgacttctaatgtcttttaaaaatgttttcttttttactttgtctctctctttttctctttactcgtttttttattttttgttttgttttgttttgttttgtttggacacaaggtctcattctgtttcccaggctggagtaaggtggcatgagcagctgggacctagatactatttatttgcttgcttgtttgtttgtttatgtagatacagagcctctctatgtttcccaggctggtctcgaactcctggcctcaagggatcctcctgcctcagcctccgaaagtgctggggtaacaggtgtgagcaactgcacctggcctagacatttattattgtctttttctttattttaaatttattttattactttattattattattttgtttttgagacagtctcactctgtcaccaggctggggtgcagtggcatgatctcagctcactgcaacctctgcctcctgggttcaagcagttctcctgcctcagcctctcgagtagctgggattataggtatgcgccaccacacccagcaatttttttatatttttggtagagacggggcttcaccatgttagtcaggctggtctcgaactcctgacctcaagtgatctgccctcagactcccaaagtgctgggattacagatgcaagctactatgactggccccttgttattttattatttatttatttattttgagatattctcattctatcgccgaggtttaaactttaggttgtgaaatattcatgcaagtctgtctttaagacatttgtacagttaagaattattagaaaaagaacacttggatgggcgtattggctcatgcctgtaatcccaacactttgggaggccgaggcggtggatcacctgaggtaagaagttcgagaccagcctggccaacattgtgaaaccccgtctgtattaaaaatacaagaattaggctgggcgcagtggctcatgcctgtaatcccagcactttgggaggccaaggcgggcggatcacctgaggtcaggagttcaagaccagcctggccaacacggtaaaaccccgtctctactaataaaatacaaaaatgagccaggtgtggtggtccgtgcctgtaatcctagctactcaggaggctgagacaggagaatcacttgaatccgggaggcagaggttgcagtgagccaagctcacgccaccgtactccagcctgggtgacagcaagattctgtctccgaaaaaaaaaataaataaataaaataaaaatacaaaaattaggcggatatggtgctggacgcctgtaatcccagctactcgggaggctgagttaggagaatcgcttgaacccgtgaggcagaggctgcagtgagccgagatcgtgctactgcactccggtctgggtgacagagcgagactctgtctcaaaaaaaagtaaaaagaaaactcaatcaccatgcagttaagaaataaagtggccgggcgcggtggctcacgctgtaatcctagcactctgggaggccgagacggcaaatcacccgaggtcaggagttcaagaccagcctggccatcatggtgaaaccccgtctctaccaaaaaaataaaaaaatacaaaaattagccaggcgtgatggcaggtgcctgtaatcccagcgacttgggaggctgagatgggacaatctcttgaacctgagaggcggaggttgcagtgagctgagatcgcaccactgcactccagccggggcggctgagcgagactatgtctaaaaaaaaaagaagaaagaaagcactgccgtgcccggcccccaaatatttattattattattactattattatttttgggggggacagagtcttactctgttgctcaggctggagtgcagtggcgtgatctcggctcacttggctgggattataggcacccaccaacacgcccagctaattttttgtatttttagtagagatgggtttcgccatgttggccaggctggtctccaactcctgatgttaggtgatccgcccgccttggcctcccaaagtgttggggttacaggcatgagccactgcccccggccgaaatgacagttttttaacaaaacaaattgagagaagaatgcaataaaggccactaaatctgttttctcaagaaaacaagtctttttctctgagtgaatgactagaaggtgtcgtcgttaagtttaaatctcttaataagagttttctacatgattatgccagtattacaattcctttacattatcaaagttcatccttagatttctccagttgtttcccaaataaaacaattttgagcctgggggacaagcaccaagatctgtccttgaagtccaggaagggatagcattgcaatcaaatcagtaagtacaatcaatggatttgatagagagctgtgtagggatagtaaagggaggggtgcttagttttatctaactgaagctggtgaagaaatgtgtagtttactgtcacctttgtccagttcttagagatgaatgggtgattttggggctgctggaccggggaaggatcgaataacaagggcattctaggacttgaagcaaggctgcttgaaatagcatttggcaaggctccagacctaaggaaatcatgcagaggctgtggttttctaaaacccctcctaggtgatgttgatgtttagcaggtgcagaatgcagcctgaaggaatgagagtttcatattagaaggagccccttaaaactgcagtctaatgtttgaaatttgggtagggcagctaagaaactgactttgtgatttcatttcaatcaatttaaatttgaaaactgaagcaacagaaaacatttttctctaaaatagaaattcatcgttttggtatccctgcattttattttagtcactaaaaatttagcatgtatgccgggcgcggtggctcatgcctggaatctcagcacttgggaagcctgaggtgggggggtcacctgaggtcaggagtttgagatcagcctgaaccacatggtgaaaccctgtctctactaaaaatgtgaaaattatctgggtgtggtggcgagtgcctgtaaccccagctacttgggaggctgagagaggagaatcgcttgaacttgagagacagaggttgcagtgagccgagattgtgccactgcactccagcctgggcgacagagaaagatctcgtctcaaaaaataataataataattaaataaaaatgtagcatcaaattgagatgtattaattgtaacttttactttaaaatatatctatgaaatataatcagatatttagcttgtaagtatttttgaaatgttgagatatttttaatattgccttaaataaaagtatattattatttttaattttttttttttgagacaaagtctccctctgtcaccagcttggagtgcagtggcatgatctcggctcactgcaacttctgcctcccgggttcaagtgattcttctgcctcggcctcccctcccagtagttgggactacaggtgcctgccaccacacccggccaattttttgtattttagtagagacggagtttcaccatgttggccaggatggtctcgatctcctgatcttgtgatccacccaatttggcctcccaaagtgctgggattacaggcgtgagccactgcacccagccaaaagtatattattaatattaatttcatctggttctgttggtcagtgcttacctaaaacaatatgaacgattggaagtgctacatacttaaagtcaccctcaattctgagactaatcctgtaagggtgtgagttgatagaagattaggttctgaaaatatttgtcagaacaaccactagagtgtaatctccataaatctggtatctttttttattttcttaaccatttctagagcatgttttaggtactctatatttgttgagtgaagacagtgaggcagaaggagtatgagtagaggacacgggctggatggaagaggtgctaagtagatcgactctgctgaacttggtggctgaatttgggtcttgaacataggggtattttgagaggagccttgggttattattaagtgggtactgggattaaagcaggtatggggaagaggttactcataacttttagacatggttgagttttgttgttgttgttgttttgacacggagtgtcgctctgttgcccaggctggagggcagtggtgctattttggctcactgcaacctctgcctcccatgttcaagatattctcctgcctcagcctcctcctgagtagctaggattttaggcacctgccaccacgcccagctcatttttgtattattagtagagatggggtttcaccatgttggccaggttggtctcaaactgctgacgtcaggtggtctgtttgcctcggcctcccaaagcgctgggattacaggcatcagccactgtgcctggcctagacgtggttgacttttgtctggtgaagatatccagttggtggttgactgagtttggaattcaggagaaagatcttgtcttgataggggagttatcagcaaataagtgtaggttgatgccaagtatgtggacaagtggagagattggacagagggcataggggaacaccatcatttataggtggacgtgggagccagcaaaggtaagtgaaataaagagtggagaattgaagtgacgacgatcctaaagaagtgagtaatactatcaaaatatattctagtcaggtgcgggggcactcagccttttatcccaatactttgggaggctgaggcaggaggatccctagagcccaggagtttgagaccagcgtgggcaacataatgagaccttgtctctacaaaaaattttaaaattagccaggcatgatggtgtgtgcctgtattcccagctacttgggaggctgaggcaggaggagactcgaacccaggaattcaaaggtgcagtgagttgtgattctgccactgaattccagcctaggcaatagtgccaaactttgtcacaaaaaacaaaacaaaacaaaagaaatatattaaaaacaaagatgattctggcattccattgaatttggcagtggggactacgttggtgaatagtttcaacatagtggtgggaacaaaaacctaattgtagtagatcgaagagtgcatgttagacagacagtgattgcagacaattatttggaggactttggttgtaaaatggtgcaatgtggtagggtattagctaactatccccagaagattttgttttctttcttcttttttttttttttttttttttgtatttttagtagagctgggttttgccatgttagacaggatgatctccatctccttatccgcccacttcagcctcccaaaagtgctgggattacaggcgtgagccaccacccaggttttgttttcttaagataggaaagacctgcttgttattgcctgtggggaaagagccagcaggggacgatttacagatctccaaactttggctccagaaagctgatttttctcttaggaatgtgtaaacacgtctgtgcatattaccaccagctaagtgcttgatggtaaataaatactcggtattcttgcagcttatgttcttagaaagctgagacgtaaatagacattacttttttctttaaggggtaacatttgaggaactgactagagacccaagaccacaggggcaatagtgaaagaactaaaagcctaaacgttgattggtggcttgtcggatcatgaattaactagttatctgatggccttctgcttggagttaggcaaggtccctgaaagctatctttgatcatgagggagcattccacgaaagatgacttgatattggctaaaccctagtagaaaacaggatctggccgggcgtggtggctcatgcctgtaatcgcagcactttggaaggcctaggcgggtggatcacgatgtcagatcgagaccatcgtggctaacatggtgaaaccctgtctctactaaaaatacaaaaaaattagcggggcgtggtggcgggcgcctgtagtcctagctactcaggaggctgaggcaggagaatggcgtgaacccgggaggcggagcttgcagtgagccgagatcccgccactgcactccagcctgggtgacagagccagattccctttcaaaaaaaaaagaaagggtgcagggcgggtggagtcgcggagtagtcctcatggcctccacgccggagcccggtgagcccgaggagaggaagtcccttaagctcctaggatttttagatgttgaaaatactccctgcgcccggcattcaatattgtatggttcattaggatctgttgtggctggctttggacattttttgttcactagtagaattagaagatcatgtgatgttggagtaggggggtttatcttggtgactttgggatgctggtttcactgtaggtataattatgcaaggcaaagaatccaggaaagaattgccagagaagaaattaaaaagaagatattatatgaaggtacccacctcgatcctgaaagaaaacacaacggcggcagcagcaattgaacaatcttgagcatagaaaagaagtcaatgtaaacgaagttaagatcaaccacataaaacatttcatgtgcaataagctctcaatcaagtaaataaagtttaagttgtaaaaaaaaaaaaaaaaagaaagaaaacaaaattgtcttaagaaaaccagatttgtcataggaagaatctcctgaactcttaaggagcatttaaatggtatttgaattttaaaaaaaaaaggacagatcacctgaggtcaggagttcgagagcagcttgtctaacgtggtgaaaccccgtctctactaaaaatacaaaaattagctgggcgtggtggtgggcgcctgtaatcccagctactagtgaggctgaggcaggacaatcacttgaacccaggaggtggaggttgcggtgagccaagattgccccacagcattccaccctgggtgacagagtgagacctcatctcaaaaaaaacaaaaacaaaaaaacaaagtgttgttgaagtctgccttctatattgagcctttacagtatgagtgaacataaaccttatttgtaaaactagtgtgatttaatcttgtctgattaatctatatttgtatggtcttttaatttgtttttttaaaaattaatatggaaatttatactgggttttttttttattgtcttgttttgttttttgagagacagtcttcctctgtcacccaggctggagtacagtggtgtgaccacggttcactgcaaactctgcctcccagactccagtgatcccttccactttagcctcctgagtagctgggacggcaggcatgcatcaccatgcctggctaatttttgtattaggttagtgcaaaagtaactgcggtttttgccattacttgtaatattttttgtagagatagggtttcaccatattgaaggtgaaaccccacgctggtcctgacctcaagtgatctgctcaccttggccttccaaagtgctgggattgcaggcatgagccacggtgcccagccctggggtattttttaatgctaataagttttcactggctcttagtctcccagttatatgaaagtataaaatatgatgaaaaaggtaaaaatatagaacatatcaggattatagagaaatgaggagggtttgtagtccaaggaatatttggagggaaaatggaccatgacctttgaccacatcctcaaggaatggattatttttgtgagaaacagtctcactctcagctcactgcagctttgaccagctgggctcaagcgattctcctgcctcagcctcttgagcagctaggacttcaggcacgcaccactacacctggctgatttttaaattttttgtagatacggggtttcaccatgttgcctagactgttcttgatctcctggactcaagcaatcctcttgtctaggcctcccaaggtgctggctggcattacaggcatgagccaccgcaactagctaaggattggattctaaattgagttctaaatttacccattttccctagcagcttgctctgaactcagtgtgtactgtaaatattgattttggacataagatggtaatattttgaagagcaatgctatactcctacaactcacagttaacatcctttgacacacaaatgaataaaacaggccagtggatttggaaatttgataatctgtacaatctaagaaagtaaactaccaaaagaagtaacttaaattcattgtaactttaattcagtgcatcttagttagcattagtatccagtggaattcattgtgaatgttaacacttactatttgctactgaattgttaattttaaaacagtgcctgggggttagacactaggaccttgttgttagacctctggtttgaggcctggttcttgatactgatctgaataagaaatgttcagtgagtggaaatactaatattacttagtgggagatgcaaatgagagaattcctatgaagtactgttcataatgatacctggcaagtagtaaattctcagtacataataataggtattcataaatgttcttttttgtttgtttgtttgttttgagatgtagtctcactctgtcgcccagtctggagtgcggtgctgtgatagctcactgcatcctccgcctcccaggttcaagcaattctcctgcctcagcctcctgtgtagctgagattacaggtgtgtgccaccatgcctggctaatttttgtatttttagtagagacttggttgtatattttgtatattttagtagagactgggtttcaccatgttggccaggctggtctcaaacacctgacctcgtgatccgcccacctcagcctcccaaagtgctgggattacaggcatgagccaccatgcctggcgcaatatatatatataatatatatattttttccaatattcttttattaattgtgagtttgagactggaattactaggtttttctcaaatgttggaggacaagtagaaaaggaaaggtttttctcaaatgttggaggacaagtagaaaaatgcctatctaataggcatttttcctttaaataagtcagttcatttcaacatatactaaagtccagcaatttggctgggtctggtgtctcacacctgtaatcccagcactttgggaagctaaagtgagaggactgcttaagcccaggagtttgagaccagcctgggcaacatagcaagaccctgtctcttaacagaaacaacaacctacagtttataggaatacattgattcatttaatcctcacaatgaacttctttaatacatgttattactagctctgctccaaagtttgttgtttgattcctgccaaacccatgttcttaaaaatatataaaatagctaagatactgaaaagaataatacactaatcaccagagttggttattaaccttaagcatgggtgggggattgttcatggtaagtgtgaagaatgagaaggtagtaggttttgctttagagtcctctagggcctgggcaaggtggcatatgcctgtaatcccagccttttgggaggctgaggcaggcggatcacgtgagctcagaagtttacagaccagcctaggcaacaaaccgagactcagtctctaccaaaaacaaaacaacgaagtgaaaataaagtagagtcctctaggagtaggctcatcaaggggccaagaggtgtgagagtgaagcttcaaggaagatctacattttagagagttttaagtgaaaattctccttggaggtctacaaaccagaccattaaggggtcatggcaagttaagtctgtggtatttaagaaatgattgaatctgactgataattcaattataatttggtagaagtttaagatatttgaataaggagggaaattggtagaatgacagtttgaggcagattgggtggtcttagaaggtttttcctcctttgggaataaattatactggctcatagccccaaagaaaaaggaagatagccaggaatacttgtgaacagagagcattaactcttaggtcagtcatgatttgctacacatttggagccaatcttcaatttgcacgttaaaaaaaattaaatagaggtttttgatccctccctcaattaacaacctgctcaacttcccctctgcccttcactccagccctgatttgaaaggatttcttgtgagttctaagaagccctggacagatgagggtggagttctcgtttggggtaggaatgagaaaattagaatatcaaagtaatcccagcactttgggaggccaaggcaggaggatatctttagcccaggaatttgacactactagcctgggcaacagagtgagaccttgtctctacaaaagcaaaagtagctgagcttcaggggatcccttgagcctgagagatcgagactgtagtgagctgtgatcctcttactgcactacagcctcggtgataaagtgaaaaggaaagaagcctggctctagtgaagagattctggaaacttctgaagcctctgctgtggctcccatccagcctagatatggaagagccatgaggccctacatcaccaaggtaaggagagtggagtctagggtcacacagtttctcagatccacttttggggcagcactttctttgaccctgactttctgtggacttcgaatctctcagctgatggctgtagtcagtagggaaacggatcagaggcaaagctccaagaatattaggtattcgacacttggtttagcagctgacttttgttttctattattttactcgttgtgtgtgtgtgtgtgtgtgtgtgtgtgagtgtgtgtgacagagtcttgctctgtcacccaggctggagtgcagtggtgcaatttcggctcactgcaacctccgccttccgggttcaagtgattctcctgcctcagcctcccaagtagctgggattacaggcacgtgccaccatgttccgctaatttttgtgtttttagtagagatgggttttcactgtgttggtcaggctggtctcgaactcctgacctctggtgattcggcctcccaaagttctgggattataggcatgattcactgctcctggccagctttctttttatccctaaaaaaagaaaaataaattgatggctgaaattctgaactagtcaaattagttcatttcacttctttgggaaaataaggttgttggaaaaactttgggaaaaactgttgtacaggtcttctttgaagagatttttgttgcttttgccttaaatgttcattttagatttctccttaggtgaatctttggtgggtagccagttgtttcctattctttttttttttttttttttttaagagacagagcctcattctctcgccctcaggctggagtgctgtggtgccatcttggcttactgcaacctctgccttccaggttcaagagatctcgtggtcgggcacagtggctcacaccctgtaatcccagcattttgggaggccaacatggcaaaccccgtctctagtaaaaatacaaaaattagcccagtgtggtagggcacacctgtaattctagctactcaggaggctgaggcaggagaatcacttgaacctgggagatggttgcagtgagccaagatggcgccactacactccagcatgggtgacagagtgagactccgtctcaaaaaaaaaaaaaagattctagtacctcagcctccaaagtagctgggattacaggcatgtgccacctcgcctggctaatttttgtagttttcgtagagccagggttttgccatgttggccaggctggtcttgaactccttacctcaagtgacccactcactgcagcttccaaactgttgggattacaggcgtgagccaccatgaccagccaatcttttctttttatttaaatttggtttaattaaatggccagtggtactgggcactgtatggtggttggttgcagaacagggcctgacctctatacttcttagtagtgtcagtgggaggaagtgaatacagtatcttaaagtcaacattatgaaggcaccagtggttgtctctgagttttttccaaaaacactcagttttcaggctgacagcataggtcctgacagtgtcatttctgattagacaaatactttgtggtctgcccattgtagtgtttcacataatactttgttaataatttggtctttcctcaacaatttgatatatttactttatgcattctcaagagaaatgaaaattggatgttggtgagtggaggacaatctgagacattacaattgggtcacagtacccaaatggtatgtccgtggtattaaaatttcacggagagggttattagggaaaaaaatgtctaaaaaagcctggagggaatggttattggtgaagatgaaaaacagttgacaaaccctgagctacctctagtaaaggtcttacttgaccatgtcaatgaacagacttcgaaaggctttatttttctatatgatttgagtagctgtttctttatgggttgttgttgtttttggagtagctgtttcttgatacaggaaatactgcatgtatggagtttgtgtgtgtgtgtgtgtgtgtgtgtgtgtgtgtgtgtgtgtgtgtggtggaggggctatagtcagattctgttcaaatgactcagtcatttcagaataaaacaccacattgctcctttagactgggtataagattatcaagacaatgggaatctggaaaaatgagaaaatggagagggcgtaggaactactagacccagacttgatctaaggagttcaacattattcttgcttcagggtgggtaggatggtcccagagcaagttctcgtcttaggataatttttaaaagtgatatgaaatataactaataaaaaagttcaagggttcttaattaagctcattaattaatgtgaatgtcttatgaagattttcttttctttctttcttttttttttcttttaagacagagtttcactctgttgctcaggctagagtgtagtgaggtcaggagtgcgagaccagcctggccaacatggcaaaacccagtccctactaaaaatacaaaatttagttgggtgtggtcctgtgagcctgtaatcccagctactcaggtggctgaggcgggagaatcacttgaagctgggagacggaggttgcagtgagctgagatcttgccactgcactccagctcgggtgacagagcaagactccgtctcaaagattactattactattattattactactactactactactactattattattattattattattattttagacagggtctctcgcccaggctgcagtgcagtggttcacactgggctcactggaacctgtgcctcccaggttcacgtgatcctcccgcttcagcctcccaagtagatgggactataggcgtgcaccaccacgcttggctaatttttagtagagaccgagtttcactatgtcacccaggctggtttcaaacttcaagcatgctggagtcaagtctgcctgccacggccttccaaagtgctgggaatacaggcgtgagccaccatgccccgccctttctgtacataaatcttagaaggacctcaagatctttcctatagagaaatacatacactgaaattctcagtgttcttggatatgcacatctgtaaaattaaaagtaccaagtcaaaaaatgagactcctctttctgcaatcctattagtgttaaacactagtaactttttatttttttaagatggaggctcgccctgtcgcccaggctggagtggagtggtgctatctcggctcactgcaacctcctcctcccgagttcaagcgattttcatgctttagccatccgagtagctggaattacaggcatgtgtcacctcgccaggtaatttttgtctttttagtagaaccggggtttcaccatgttggtcaggctggtcttgaactcctgacctcaggtgatccgcctgcctcgacctcccaaagtgctgggattacaggcggaagctgacatgccctgtctgtcatttattttatagcggaagactttctctaccttaaatttttttttttttctgagagggagtctcactctgtcgcccaggctggagtgcagtggctcaatctcggctcactgcaacctctgcccgccaggttcaagtgattctcctgcctcagccttccgagttgctgggattataggcgcctgccaccgtgtccagctaatttttttatttttagtagagatggggtttcaccatcttggccaggctggtcttgatctcctgaactcgtgagccactgtgcttggcctaaatattctttttctttctttctttctttttttttttttttttttttttttgagatggagtcttgttctgtcgcccaggctggagtgcagtggcgctatctaggctcactgcaggctccgcttcccaggttcacgccattctcctgcctcagcctcccaagtagctgggactacaggcgcctgccaccacacccggctaatttttttgtattttagtagagatgggatttcaccatgttagccaggatggtctctatctcctgacctcgtgatctgcccgccttggcctcccaaagtgctgggattacaggtgtgagccaccacccagcctaaatattatttttcttacatctcttgtgtatgtatgtgacatgtaatatttatacaatatttatatgatttttatgtaatgatattatgtaaataaaaatatttatgtaatatttatatgatggtcgcattttagtgtccatagtcttattgcaatactactacactcattagtttgcatattatttttgaggctgcttactagatacaacaggagtaactgtgacaggttgtatggcacatgaagcctaaaatatttactatctgaccctttacagaaaagttcgccgaaccttggtgtaaacaatgtgtcttttggcaacatgataatctgtttaatcttagacatttttattcttttttttctttttgagttggagttttgctcttgttgcccaggctagagtgtaatggcacgatctcggctcactgcaacctctacctcctgggttcaagcgattctcctgcctgagaggcagggtgtcactttgttgctcaggctggagtgcagtgattccaccactgatcagttatagttttgaatttctatgtttgtgacctaggccagttcacatctccttaggcaacctagtctagtggtctcctattcccaggaggttaccatttatttatttatttatttatttatttaattttattttatttgtttatttttttttaagacagactctcaggctggagtgcagtggcacgatctcggctcactgcagtctccgcctcccgggttcaagcgattcccctacctcagcttctcgagtacctgggactacaggcgtacgccaccctgcccggctaattttttttttgtattttggtagagacagggtttcaccatattggtcaagatggtctcgatctcctgacctcgtgatccgctcacgtttgcctcccaaagtgctgggattacaggcatgagccaccgcacctggcctatttatttatttattgagacgatgtctcattcttttaacctggctggggaacagtggcataatagtatctcactgcagccttgaactccaagtctcaagggatcctctggcttcagcctccccagtaggtaggactacaggttcatgccactgcatgcggctctttgttttttcatttattcttttactaaatttacaaataaatattgtgtatatttatcatgtacaacatgaagttttcaaatgtgtatacactgtgtaattggagttatcattctttttacaattggtatcaatgggaacactccactgtctcgattcctgtggtatgtctgatgagctgtttcaaggttttacaaaattagtctgtagtcccagcttctctagagctgaggcaggagacttgcttcagtccagcacttcaaaatcaggcttggcaacatagagagaccctgtctctacaaaaaataggaaaaatataaattaaccagttgtggttacaggcgcctgtagacccagctactcagaagggtgagatggaaggataacttgaacctgggagttcgaggctacagtgagccgttatcgtgccactgcactccagcctggggaacagagtgagaccttgtctcaaaaaaaaaagaaaataaagtagataaataaggattagaggaggaaatagggagtgattgcttaaacagggcacagcatttctctttggggttttgaaaatgctctggaagtagagaatggctatgttgtacaacagtacaaataaactaaaaaccactgaattgtacacttttcttcttttttttttgagatggagtttcactcctattgcctaaggtggagtgtagcagcacaatcttggctcactgcaacctctgcctcccgggttcaagcgattctcctgcctcagcctcctgagtagctgggattacaggcaccctccaccacgcccagctaatttttgtatttttagtagatacggggttttgccctgttgggcaggctggtcttgaactcctgatctcaggtgatctgcttgtctaggcctcccaaagtgctaggattacaggtatgcgctactgtacccagctgtattgtacactttgcaactgtaaagtgatggatttcatgtcatgtaaattcatctcaataagaaaaattaggttgggtgcagcggctcgtgtctgtaaccccagtactttgggaggtcaaggtgagcagaccacttgaatccaggagttttgagaccagcctgggcaacatggtgatatcctgtctctacaacaaatacaaaaaaattagccaggcatggtggtatgtgcctgtggtcccagctactcgggaggctgagcttgggaggatcatctaagcctgggaggttgaagccacggtgaactgtgattgtaccactgcactccagcctgggtgacagagtgagaccctgtctcaaaaaaaaaaaaaaaaaaatgaaagaaagaaagaaattgaaactatagcagttactctaaagacccaaacactaaaaataacacaatgcccatgtccagcagaaaaaataacattgttatgtatttaatcagtgaacttactatacagtgagaatggactacaagtatacttaacagctcattttgtgaaaacttaacaagctatatacttatgatttgtacacctttctatgtgtatgttctacttgaaaacagtttgtatcaaaataataggtatggctgtgcacggtggctcacacctgtaatgccagcactttgggaggctgaggcgggcagatcaccagaggtcaggagtccaagaccagcctggccaacattgtgaaaccccatctctattaaaaatacaaaaattagctgagtgtggtggctgtaatcccagctacttgggaggctgaggaggaaaattgctcgaacccgggaggcagaggttgcagtgatctgagatcacacaactgcactccagcctgggcaacacagcaagaccccgtctgaaaaaaaataaattatttaaaacataaaataaaaaataaataaaatagatattgcctaatgaacactaccgatgtaaaagtagtttatttttttattttttattttttttgagacagagtctcactcagtcacccaggctggagtacagtggcatgatcttggcccactgcaacctctgcctcccgggttcaagcgattcttgtgcttctgcctcccaagtagctgggattacaggtgtgcaccaccacgtcctgctaatttttgtatttttagtagagacagggtttcaccatattggccatgctggtcttgaactcctgaccttgtgatccgcccaccttggcctcccaaagtgctaggattacaggcatgagccaccacccctggcctttgattttgtttcttggagaagaggtctcactttgtcacccaggctggagtatagtagcacagtcctggctcattggaacctccacctcctgtgctgaagcgatgctgtcaccatcagcctcccgggtagctggggccgcaggtgtgcatcaccacacctgactaattttttttgtatttttggtagagactgggtttcaccatcttgctcaggctggtcttgaattcctgggctcaagcgatcctcccatcttgtcctcccaaagtgctgcgattacaggtgtgagtcactatgcctagcctagttgtcttttctttttgtatattatgtccttttggtattttatgacttcgctgaatgtgtgaaaagcaaaaataatattttaggctgtatccacaggggctttacatttagttgttattaaattttaatcttctatggctgttattcagatatttaagtagatgacataagtaatttctgtattttacaggcagattttgacaacaaaccagtaaatggccccaagtcagaatccatggactacagtagatgtggtcatggggaagaacaaaaattggaattgaacccacatactgttgaaaatgtaactaaaaatgaagacagcatgacaggcatcgaggtggagaagtggacacaaaacaagaaatcacagttaactgatcacgtgaaaggagattttagtgctaatgtcccagaagctgaaaaatcgaaaaactctgaagttgacaagaaacgaaccaaatctccaaaattgtttgtacaaaccgtaagaaatggcattaaacatgtacactgtttaccagctgaaacaaatgtttcatttaaaaaattcaatattgaagaattcggcaagacattggaaaacaattcttataaattcctaaaagacactgcaaaccataaaaacgctatgagctctgttgctactgatatgagttgtgatcatctcaaggggagaagtaacgttttagtattccagcagcctggctttaactgcagttccattccacattcttcacactccatcataaatcatcatgctagtatacacaatgaaggtgatcaaccaaaaactcctgagaatataccaagtaaagaaccaaaagatggatctcccgttcaaccaagtctcttatcgttaatgaaagataggagattaacattggagcaagtggtagccatagaggccctgactcaactctcagaagccccatcagagaattcctccccatcaaagtcagagaaggatgaggaatcagagcagagaacagccagtttgcttaatagctgcaaagctatcctctacactgtaagaaaagacctccaagacccaaacttacagggagagccaccaaaacttaatcactgtccatctttggaaaaacaaagttcatgcaacacggtggttttcaatgggcaaactactaccctttccaactcacatatcaactcagctactaaccaagcatccacaaagtcacatgaatattcaaaagtcacaaattcattatctctttttataccaaaatcaaattcatccaagattgacaccaataaaagtattgctcaagggataattactcttgacaattgttccaatgatttgcatcagttgccaccaagaaataatgaagtggagtattgcaaccagttactggacagcagcaaaaaattggactcagatgatctatcatgtcaggatgcaacccatacccaaattgaggaagatgttgcaacacagttgacacaacttgcttcgataattaagatcaattatataaaaccagaggacaaaaaagttgaaagtacaccaacaagccttgtcacatgtaatgtacagcaaaaatacaatcaggagaagggcacaatacaacagaaaccaccttcaagtgtacacaataatcatggttcatcattaacaaaacaaaagaacccaacccagaaaaagacaaaatccaccccatcaagagatcggcggaaaaagaagcccacagttgtaagttatcaagaaaatgatcggcagaagtgggaaaagttgtcctatatgtatggcacaatatgcgacatttggatagcatcgaaatttcaaaattttgggcaattttgtccacatgattttcctactgtatttgggaaaatttcttcctcgaccaaaatatggaaaccactggctcaaacgaggtccattatgcaacccaaaacagtatttccaccactcactcagataaaattacagagatatcctgaatcagcagaggaaaaggtgaaggttgaaccattggattcactcagcttatttcatcttaaaacggaatccaacgggaaggcattcactgataaagcttataattctcaggtacagttaacggtgaatgccaatcagaaagcccatcctttgacccagccctcctctccacctaaccagtgtgctaacgtgatggcaggcgatgaccaaatacggtttcagcaggttgttaaggagcaactcatgcatcagagactgccaacattgcctggtatctctcatgaaacacccttaccggagtcagcactaactctcaggaatgtaaatgtagtgtgttcaggtggaattacagtggtttctaccaaaagtgaagaggaagtctgttcatccagttttggaacatcagaattttccacagtggacagtgcacagaaaaattttaatgattatgccatgaacttctttactaaccctacaaaaaacctagtgtctataactaaagattctgaactgcccacctgcagctgtcttggtgagtacttgtgtgcatgtgttcttatttcacctgcacaaattacctcaatcatgactgaagcaaattctgattcatcttttttgtgtgatattttttccccattcttattctaactaagatggattaagtaaatctataaccatttttctgtgggaacttttggttctgccacaagaatggaaaattcagctcataatttggaaaaacaaacttggaaaaggtaaacccgctcaagtggaaaaataggctgatatatctctcaatgttgaatgtctgtcaatttatcgtgcgtagcataagaatgaatttcgtaggccaggcgcaatggctcttgcctgtaatcccaacattttgggaggccgagtcagatggatcacttgaggtcaagagtttgatactagcctggccaacatggtgaaaccctgtatttacttaaaattcaaaaattagttgagcatggtggtgcacgcctgcaatcccagctactcggttggctgaggcaggagaatcacttgaacctgggaggtggaggttacagtgagccaagattgtgccactcccctccagcttgggcaacagagcaagaccctgtcttaaaaaaaaaagaaagaaagaaataacttaatagtttattacagtttgtttattcttcctatattcaaaaaaatttcaacttacaagcctttcattatatttttgtgtgtgtgagatagaagatacatatagagaatgtaaaacatatgtataagttaacagttaagaaatatatagctggcagttgccgtcctactctagaattgaagctggtttatgtctttttcagtgtctagtgcttttacgctctgtccagtacaagatctaatactgtctttttttgtccaaagagcacttgatattctggaataatatatttctatttctctgcaatacaaagtgtacttatgtataaagaaattccataatcttggccacttgaagaattcataagcctttctgaattttaacatattttaacaaatttgtttaatcctgatttcctatttcaaaaaatcaaagaataaccagtgtgctaacatgagtcatgtgctaatagctgactcatggactgatccctaaccaatgtatttctacatttttgtgccttaggagtcattgaaagagaacattctgaaccaattagttttattagtgtgttaaaagccctgagaaaatcttgctgggtaaagattctcaggcagaccttatgagaaatttcctcagtatttgaaacatgtgaaagcttaatttgaatcctgtactgattagttactgtctatggccaaatttcaggtaagcactcttctaagaaacctgttgactctaatatagctgtaaaaaaatagggaaattcaatagattgtgtcattaaagttcgttaggctgcttgaagccccattactttgtttaccatacaactatgttagaataaattttgtgaaaaatctgttttgaacctcatccaaataggtttagttattggaagtcttacttaaaatatggctccaaatcacaaagactcaagatttgccttgaccaaaggtgatgtttttattagaagcaggtggttccatagggaggctaagtatatcacactgattttttaacaacagtagaaaatatagtgttgtgtagtaataatattgaattcttgtctttccaaagtacacttgttgttctgaaataatatccttccatttctctgctcattgttcaatacacagtgttttttaggtttttgttttgtttgtggatatgaggtctcactttgttactcagactggtcttgaactcctgggctcaagtgatcctcgtgcctcagcttcctaaagtgctgggattacagacatgaaccaccacaccagctaacacacagttttgacaaactgcaatgtgccagttatcaaggataggctgttctgagaagaatctcacaatttggaaagagtgacaatgctgtctgagtggagttgaattgggagaaaaagtttcttgaattaaggagagaagaaagtaatcatcataatggcttccattctggagatcttactacaagtctgatattgtgcttgccttgacttgttattttcacagaagctcttcaaagagagggtttattatccccattatacaaatgcagaaactgaggcacagagaatttcatagctatccagtaactgaactgggactcagagacagcagtctcaactccagaacctatccttataacgaacactctggtgcttaataaaggtgaattataaaagagagaacacttttcggctgggtgcagtggctcacgcctgtaatcccagcactttgggaggccgaggcgggcagatcacgaggtcaggagatgagaccatcctggctaacacggtgaaaccccgtctctactaaaaaatacaaaaaattagccgggcatggtggcaggtgcctgtagtcccagctacttgggaggctgaggcaggagaatggcgtgaactgggaggcagagcttgtagtgagccgagatcacgccactgcactccagcctggatgacacagcgagactctgtctcaaaaaaaaaaaaaaaaaagggagagaacacttttctaaatatccttacaaatggaaataaggcctgtagttcaacaaacacgtgcctttaaagtttatatacctgagctagactactttttctatgtgcatggttctaaaaggatgattgtctagtttgaagaccctttccttatgcaaaataactagtcacagcatataggaatagacagccaggcattcaaagttgaataaatacctgcaggggactcagctgttttatctactgtcactaacatgtcattagtaaatcattacatgtaagtttattgtgctcattgtgtagaaaaaggcacttaaagacagagaaacaaaaagttacttacccagtcactttttatcaaatcatcccaagtagtaccatccatatctgagggtaaagaatttccatggtggaattatgttctagcaaaataatctctagattaggattcctcaaactgagcagtattggtgttttatccttcgtaattctttgttgtggggagctgtcctgtgcattgtgggatgtttagcagcatctctatcttccacccactagatgccagtagtaatgcacacacataactgccaaattgtcacgaccaaaaatgtctccaggtatttccatgagtccccttagcggcaacattcccctggttcagaatcagtgctgtagatcactaagaataagataaaatctatcaagtgtatcttacttaagaagccacagaagtaggctgggtgccgtgactcacacctgtaatcccagcactttgggagggggaggcgggtgggtcacctgaggtcaggagttcgagaccagcctggccaacatggtgaagctaaaagtacaaaattagccaggcatggtggtgcatgcctgtaatcccagctacttgggaggctgagacaggagaatcgcttgaacccaggaggcgaagattgcagtgagccaagatctcatcactgtgctccagcctgggcaacaagagtgaaacgccatctcaaaaaaataataataaaaaataaaggtgaaaaaggaagccacagaagtaattcccctagtatttgacatccagtgaaaatgactttttggtgtaggtataccatggctagaaattcatgaaacgcagaaattccccagtaattcttactacacatgagtctaaggggccaagttaaaaatagcattttttaagaaacataaaattcatgctcacaaaaattcaagtggtgcagaaatacgacgcaaacatcttcctatactcccattctatacaaaagaacattattgattttaattttgtttccatttttacaaaaatttaaaacaatctttctacttggttttttaatataatgatattgtggatgtctaaatgttttataaatattattgtttcaatagatttattgtataccactatataaacatcccataatttatttaaaccacatgttattgacagatgttgagtgttttgctctctttttgatattacaaataattgtaacaaggaacattcttttgtaattgtgcaaatgtatagtagaataaattgtctgcaatgaaattgctcaattttcccagcactttgggaggcacaaggtcaggagattgagaccatcctggctaacatggtgaaaccccgtctctactaaaaaatacaaaaaaaaaattagccgggcgtggtggcgggtgcctatagtcccagctacttgggaggctgaggcagaatggtgtgaacccgggaggcggagcttgcagtgagccgagatcgcgccactgcactccagcctgggcgacagagcaagactctgtctcaaaaaaaaaaggggattgctcaattttaataggattctaagggcaacctttaacatttattgttcttggataacttttagtattacacctcaattaatacagattttttttttaagcaggagataggagtataaatatgacccacatcttaaaatattttttttctcctctgattttcagaggaagaaagaattcgttaggggcaggaagaaaggaacattaaaagttaaatttcatgggctgttgtccttgcctttaattatcaaatcttaccaaaaccttgtcaagattcatggttctgaattgagggggaacaaaaagtataaaagtagcttctcctgtcccctatgcaattctgtaaagctttgggtctaataatcttattccttccacagatcgagttatacaaaaagacaaaggcccatattatacacaccttggggcaggaccaagtgttgctgctgtcagggaaatcatggagaataggtgaggaaatacgcttccctgttaaaatcattcttactgtggatctgactcaacggagataaatcatctctaagaacaaacgccgtgattgaaaaatgatcaggagtatgagttggatgtttcttagggcccaacaaaagaggggtgtcctcgtgtccctactgagccacccatcatacaagctgttgggcacataaaagcacccacaaagcaagactagttgtctttgataaactcagaagtactttttatatatcgcataatggtagaaataggtcaaattaccacccttgacactgcataccctacattcccattgcttgtctggcactcagcctattttttaaagagtgatctttgaggataagtgagtaggactggttaacaaattaaaatacctgccacacaaaagcaaatgtttaacaagagtaaattacgaagagtgtctaatttttgaacttctgtacatctatatcttatatacattaagatgttcaaagccaaagccttcaagtacagattgcaattaattagtacattcccttcactgtgttttatactcaggtatggtcaaaaaggaaacgcaataaggatagaaatagtagtgtacaccggtaaagaagggaaaagctctcatgggtgtccaattgctaagtgggtaagtatttcctatttatacatttttttgaagcttgttattccagagctgatatttatacatttacaatagccagagtgatctttattttatttattcatttatttatttaatttttgagacaggctttgtcgccccggctggattgcagtggtgcaatcacacctcactgcagccttgatctcccaggctcaagcaatctttccaccttagcctccaagtacttaagacttgccaccaaacccggctaatttttttttttttttttttttttttagtggagagctcaagtgatcctcccgcctcagtcccctaaagtgctgggattacaggcgtgagctactgtactgggccagattttttaatagatttttaagtaaattggccatttgtgatgaaagttgcaaatatattttctcagtttgttgtggttttaccagttagattttttttttgactgtaatcagctttttcatcttttatagctttagggtattttatcttaattagaaaaatctttaccacttgtaggttataaatctttcattttcttttgtagtattttaatgattttattttttctataatgaagtattttatatttatcctggtttagaatattggtagctatgtacacttctccagatggctactcagttatccaacaccactcatttaattgtacatctcttcattattgatgtgtatttgtttatatgtgagaattccctattgtgttaaatcactgtctttaatcagcatgagattgctctaattatttagattttataatgtttccatgtctgataggctaattccttttaatttttcaaaagtggtctgactattctggtttattttatcatattagtatataaacaccacgtttcattacaagaataaaatcctactggtaattttattggaatcatgttaacagaatttggagaatttacatatatttcatgttcagtcttcctattctacatattgcatctttacatttacatatgccttcttttgtcctttagaaccattttaaggtagaatttaagggagaatttacatgtttcttgtttttgtacatatttctcttgtgtatcctctaatacagttagtccaacagactaactctaattttatattgctttagtaacgatggtctccttactttgtttctctcttcccatggggatctttccagggttttcccattaagtgtgggttgtcggcccagcacggtggctcacgcctgtaatcctaacactttgggaggccgaggtgggcagatcaccagaggtcaggagttcaaaatcagcctggccaacatggtgaaaccccgtctctactaaaaatacataaattagctgggcatggtgatgggcacctgtagtcccagctacttgggaggctgaggcaggagaatcacttgaacccaggaggcagaggttgtagtgagccaagatcgggccactgcactccagcctgggcaacaagagcaaaaatgtctccaaaaaaaaaaaaaaaaaaagcatggattgtcagggaatgcctttcgggggagggaacatttaagctgagaaaggagtgacaaaaaacaaaaaagagctaagtaggcagaggataagcaggaagtagcattcctaagcagagaaaacagcaagaacaaaggtcttgggtttagaaataagagtccagtaaaaaaaatctaagcagagtcagttgaaattaaggggataggccaggcgcagtggctcacgcctgtaatcccagcactatgggaggccgagtggggcagatcaccagaggtcaggagatcgagcctatcctggctaacatggtgaaaccccgtctctactaaaaatagaaaaaattagccgggcgtggtggcgcgagcctatagtcccagctactcgggaggctgaggcaggagaattgcttgaacccccgaggtggaggttgcagtgggcctagatcgtgcctctgcactccagcctgggagacagagtgagactccgtctcaaaaaaaacaaaaatgaaaaacgaaattaaggagataattaatagaaccaggtgggggtaaaaaggtgaatgattttgtaggccatagtgaggagctgaggttttagcccatgagtaacatgaaggccttcatgtttgaataacaaacaggtattatctcctgcagtttttgtgggttaggaatccaagtggtgcttctgacataggctcctatgaggatgcaatcatctgaaaacttgactgggggagagtggtgcagctggaagacccacttccaagctcccttacaggaggccttagctctttgatggctgttggctggaggcctcagttcctcctcatcttaaatgttttcataacacagcagcttggtttcccccagagtgagtgaatcaaaagagagcaagaaggaaactacagtgtctttctttcatcacctcaagaggttgaggccaggagttcaaggtcacagtgtactatggtggctcctgtgaatccatagccagccactgcactccagcctgagcaacatagcaagaccccacatctcttttgtttgtttaaagaaagaaacaaagaaaataaactagattctcagaagccccagttataaatctcccaacctggctttgtggtaataattttcttgctttccacctttccctgctacttatatatttctcaaacagtatagttttattttgttttgttcttttgtgtctggcctatccatagtaccttgtatatttgaaataaatcacacaattggttcccaatatctggcgctgatagttgttaccaatttattgagctatatctgttagctatttctgaattgttcactcctttgtctattaagtggtaaggaatgaatatgtcctcatgttgtggcagctggcttctcctacagtgagtccaaaagagagaaatgtaactaggcttattggtgggattgggatgatttctttttcctctctttaaaaccttttctaatataataataatgacagtgatataaagaattgtagtgtatagtttttttgtttttgtttttgttttccttaagaaggcaaatataaatgctgtagcttaaagatttcggtaacaactttctattagtatttttccctagcgaaattttatttgttttggatatctgtctgtgttgcctgggctagagtgcactaacccaggggactccaacccctgagccatgggccaataggaacctgacttcatggcagaaggtgagtggcaggagagcaagtgaagcttcatctgtatttacagccactcctcattgctagtattaccacctgagctctgccttctgtcagatcagcagtgggattagactctcataggactgcaaaccctgttgtcaactgtacattcaagggatgtaggttgtgctctccttatgagaatctgatgcttgatgatctgtcactgtcccacctcacccccagatgggaccgtctagttttaggaaaacaagctcagggctcccactgattctttattatgatgagttgtataattactttattatatattacaatgtaataataatagaaataaagtgcacaataaatgtaacgtactcgaatcatcccaaaacctctgcccctggccccacctctgtggaaaaattgtcttccatgaaatgacagactctggctgttgcccaggctggagtgcagtggctcaatctcggctcactgcaagctccgcctcctgggttcacaccattctcctgcctcagcctcctgagtagctgggactacaggcgcctgccaccacacctggctaattttttgtatttttagtagagacgtggtttcactgcattagccaggatggtcttgatctcctaacctcatgatctgcccacctcagcctcccaaagtgctaaaatagattttttaacagattttatgtcagaaaaatcgtaatgttagtcaaactttatttttccaaactttccaggttatcttacttaaaatattcatatcacttactgcttttgcagagagcaatgccgagcctagaattagcactcaataaatttgtgttgagtgaatgaatatggagcttaaatatggctatttagaaaatgtattttagggctgggtgaggtggctcacgcctgtaatcccagcactttgggaggtcgaggcgggtggatcacctgagctcaggaatttgagaccatcctggacaatacggtgaaactccgtctctagtaaaatacaaaaaattagccagacatggtggcacgtgcctatagtcccagctactcaggaggctgaggcacgagaatcacttgaacccaggaggcggaggttgccgtcagccaagatggtgccacggcactccagcctgtgcaacatccagagtctagctccaaaaaaaaaaaaaaaaatttcccatttgggtgcggtggctcatttctgtatatctgtaatcccagcactttgggaggctgaggcgggaggaccactggagcccagtagttggagaccagcttggacaacatagtgagactctacaaaaaaaattttttttctttttttttgagagggagcctcgctctgtcgcccaggctggagtgcagtggcgtgatctcggctcactgcaagctccacctcccaagttcacgccattctcctgcctcagcctcccgagtagctaggactacaggcgcctgccaccacaactggctaatttttcgtatttttagtagagacggggtttcgccgtgttagccaggatggtctcgatctcccgacctcgtgatccgcccacctcagcctcccaaagtgcggggattacaggcgtaagccaccacgcccggccaaaaattttttaaattagccaactgtggtggtgtgcacctgtggtcccagctactctggaggctggacgattgcttgagcataggaagaggaggttgcagtgagccattattgggccactacactctagcctgagtaacggaatgagccctgcctacagagagaaaagaaagttgagtatcttgaatttgaattggtatcttgaaatagtatggctatggtattcattattagctatattctgaggcatgagaaactgaggattagagctgggaatctgctggagttgtccaccccacgcttaaactttaggtagaggttgaatgaaaattggaattaaaaaatgtccatgaaggaaggtgggaaaaattttaaaacaattttaaaaaagaattaatttgtctgtattctacatagtttgtagaactttatcatgaggttattttgaatgacactagtgcaattgggtggattatacgtgggtgagggaggaaatgaaggtcaaaaattttgaactaagaaatcgaatatacacatacagccagtgaattacattgctccaaatttacttttcatcttggatagtgtaccttttttgtgtatttgttataaaacattaatctatatcaagcatcgtttcatgatttcattttttaaaatctccatgtatatgcttaggtttgttaatagtattaaagttctgtcctaaactgccccctcaccttttttttaagttgtgtttctcttgtcttcttttttttgaatcttgctctgttgcccaggcttgagtgcagtggcacaatctcggctcactgcaacctctgcctcccagattcaagtgattttcctgcctcagccttcaccatgttgcccaggctggtctcaaactcctgacctcaagtaatccaccctcctccacctcccaaagtgctgggattacaggcgtgagccaccgcgacagccctcttgtcttctttgcttggaagagagatctattgcttctctttttaatgatcacacacaaaaagtctaacagcaaattctaactggccagcaccactttcttagccattcttatgttgttttgcctatgttcgcaacaccgttttattcttctcttgaaatgtttccttgccaggtggtcattaaaactctcacataattatagtctttggcagagatttttgactctttttctctgctgtcactttggatcttgtcagaaacaagttatcttgttcttcagtagattttgaagaaaagggtaatgtagtttcttagatgcaccttagatgttcaaggagaatcacttgaacctaggaggcagaggctgcagtgaactgagattgtgccactgccctccagcctgggtgatagcatgagaccctgtctcaagaaaaaaacaaaaaaaaatagtattttaaaaattagctggatgtcgtgagtaaatcacatttaagaatttcccagctggccagcgtggtggctcatgcctgtaaacccagcactttgggaggctgatgcaggcagatcacttgagaccaggagttcaagaccaggctggccaacgtggtgaaatcccatctttgctaaaaatacaaaattagccgggcgtggtggcataagcctgtaatcccagctactcaggaggctgaggcaggagtataactctttgtatacttcccctcttgagcttctggggtaatggcagaagtaggtagaagaagtcaaacagtggatggcctcattggccccaatgcctgagtgcttcacattgggcatcatatgatgagttcccctctgtgcgattgtgtattagtcaatagagcagatgtggcaatgaatacctacaagtgatttttttttctttggagatgaagtcttgctctgttgcccagggtggagtacagtagtgtgatcttggccctttgcctcccaggttcaagccattctccagcctcagcctctcgagtagctgggattacaggcgtgtgccaccatgctcagctaatttttgtatttttagtagaggtggggtttcaccatgttacccaggctggtctcgaactcctgaccttaagtgatccacccaccttggcctcccaaagtgctgtgattacaggcatgagccaccgcgcccggccaatattaaactgacttacatgtttttctttacttaagcttattgtctgctaaagtaccattagtactctttttatgttagtttgtttacttgcttatagagttcattttttaaggaaattttaattcaagtataatatacacacagaaaagtatacataccataaggtacagcccagtgaaattgtacaaagtgaacatacctatgtgaccagtggccagatcaagacattaccaaaacttcagaaccccgttgtgtgaactcagtcattaatccctttacaaaggtggaattgtattgtaaaagtctcattttcttgtaatatgtagatagctttaaatgatgttaactggtgacattttggaggagttggccactataattttgttttgaaaaatttactctactttgtctcttacatgattattgatgaaactcaaaatgacccttctttggaaagatacccgctacacttgacatgaatgttgctcccagatctgaatctgatctggaatttgtatgctgcccagatcatttgtgcactgacgaatcaccctattccctttggaaaccttacaaataagattgtgttacagggacttattttttgctttaaaaaaataatcttttaaaaaaattataatttacagcttggatacttccgcttagtttggtttttaatttaatttaacttttttttacttttttcttttcttcttcttcttctttttttttttttgagatggaatttcactcttgttgcccaggctggagtgcaatggcacaatctgggcttactgcgaccaccatctcctggtttcaagcgattctcctgtctcagcctgctaagtacctgggattacaggtgtcccccagccaagcccagctaatttttgtattttttagtagggatggggtttcaccatgttggccaggctagtctcaaactcctgacctcaggtgatctgcctgccttggcctcccaaagtgctgggattacaggtgtgcctggccaatttttttttttttttactttttaaaaaactattattacttttttgagacagagtttcactcttgtcgcccaggctggagtgcaatgacgcgatctcagcccactgaaacctctgcctcccaggttctagggattgtcctgcctcagcctcccaagtagatggtattacaggtgcccaccaccaagctcgactaattttttttgtatttttagtagacatggggtttcaccatgttggccatgctggtctcgaattcctgacttcaggtgatccacccgcctcggcctcccaaagtgttgggattacatgcgtgtgccaccgcgctagccgttttaaaccttaaaattttttttaattgtgtaatcttgctccttctaatattagttgttttttgtttttgtttttgttttttttgagacagagtcttgctctgtcgcccaggctggagtgcagtggtgcgatctcggctcactgcaagctccgcctcccgggttcacgccattctcctgcctcagcctcccgagtagctgggactacaggcgcctgccactgcgcctggctaatttttttttttttttttttttttttgtagttttagtagagacggggtttcaccatgttagccaggatgttctcgatctcctgacctcgtgatccgcccgcctcggcctcccaaagtgctaggattacaggcatgagccactgcacccagcctctaatattagtttttaaatttaaaaattatatatacacattatagatatatttcaaattttaaaagccattacaattttatcctgtgcttagagattataatttttagcagtttgggtatactcaaactaagagttaggctgtgaaaattttctgttttttgagacagggtcttgctctgtcacccaggctaaaagtacagtggcgcaactcactgcagccttgacccaggctcaagcaatcctccttcctcagcctcccaaggagctgaaaccataggcactcaccaccatgccagctagttttctggggtttgttgtagagacggggtctcatttcattgcccaggctggtctttaactcctgggctcaagaaatcctcctaccttggcctctcaatgtgttggggttacaggcatgagccaccatgcccagccagaacttttttcttttcttttctttgttaaaaaaacacacacacacacaaaaaaccaagtattgtgggttttttaatttaaaaaaaattttttttcttttttttttttttttgtgagatggagtttcactgttgcctcccaggctagagtgcagcagcacgatttcagctcactgcaacctctgtggttcaagcgattctcatgcgtcagcctccccagtagctggaactacaagttgcaccaccacactcgtctaacttttgtatttttaatagagacagggtttcaccatgttggccatgctggtctcaaactcctgaactcaggtggtctgcctgccctggcctcacaaattgctgggacaggcttgaaccactgtgccctgccctaatttttgtatttttagtagaggcgggatttcaccatgttggccaggccagtctcgaactcctgacctcaagtgatccacccgccttgacctcccaaattactgagattacaggcatgagctaccgtacccagcctgttgttaatagtcaaaaaaatagaaacaaaatactaagctaagagtgataatttttgtcattgtacatctaaggtgaaagttgacatcatgattcaatttgcattgtaactagcaaagttggatgtctttacttattattaatttttattaataataaattttacgtattattaatttttatttcttccatgaattcactcttcatagcctttttttaggttatcttctattatacttttgtaaatatgtataatagaccacatatatataatatgtgtatgtataatagaccatggctggttttatcatggctgggcgtgggccctcacacctgtaatcccagcactttgggaggctgaaatgcacagatcgcttgaggcctggagtttgagacaaacctgggcaacatagccagacctcatctctaccaaaaatacaaagaagtagccaagcacggtggcaagcacctgtagttctagctacttgggagggttaggcggaaggatcgaatgagcctggagagcttttaaatgatgttaaaggctgcatacagtgagccatgatcaaaccactgcactccagccaaggtgacatagtgagacactgtctccaaaaggaaaagaaaacaaaacaaaaaaagaacagttttaaaagaacaaacttcaatttagaagggcagttcccttatttgtttaaaaaacgtttctcttgagggttggagaattacctgttgggtacaatgttcactattttggaagtgagtatacaaaaagcccaagacttcaccactgcccaatatatccatgtaataaaactgcacttgtaccctctaattctttaaaaacaaattttcctgacatgatgctcatttacccttccatatgaaccttagaagcacgctaaatttgaacagactgggggagagatttgtggctagacatttagggttggctttctcatttaggaacactattatgttcttccaactgaactttcttttataaccttctctgcattttttatagttttattcttaggttttttgcatctttctgttttttaacaaccttactgagatatcagactttaaaccaaacttctatctggttattcccactatatagtaaagctattgcatcctcagtatataaggatccaattgttttactttctttaaaaatcaagtagatttttctgtgattctcttgaaaaatattctagaaagactattatagctataataattgtgtcctattattttaataccagtcatatatcatattgtctgtttcaaataggactgtagaacaattatgaagtctgtataccagcaagaagttagtgaatatagtagaaaaataattaaatgtcactatagtattcattgacattaggaatagatagtatatttttgtacacacagaacaagaatgtgtatacctttagtgttctcctggtttttggaaggagggtaattaaaaagctgtttaaatacttggtttttctgtttcctatatgcatgtgacatgactagaagccaaatttgcctgctgtagcaaaaacctctatggggctttgagctgcttctgtccaagcctcgaatattcaagaataatcttagctgcagttgcctcttggaaatttaacagtatctttatcacaacactctcttctctccaccaacgtaggtacctccttttttttttgagatggagtcttgctcccatcgcgcaggctgtagtgcagtgttgcagtcttggctcgctgcaacctccacctcccaaagtgctaggataacaggcatgagccacggtgccggcctgggtagctcctttttactgtgttttactttgctaggtgacaaatattgtcggacatatattcatatgctcatcatctattttcatattctctattgtgaagtgcctattcaattttttctgccaattttctatgggggcaattctctgtatatgttgtgtcgtatatattatgccaaatatatgtaatgtaaatatatataatgtgtatatatatatcatgtcaaatatatgtcatgtaaatatttctcctgcccttttgcttgccttctttatttttttattttttttaatttttttgagacagagtttctgtctcccatgctggagtgcagtggcgagatctgggcttactgcaacctcggctcccgcctaagcctcccaagtagctgggactgcaggcaggtgtccacacccggctcatttttgtgttttattgaagagacaaggtctcaccatgttgcccaagctggtctcaaattcccgacctcaagtgatctaaccacctcccaaagtgctgggaggtgcgcccagcctgcatttttttttttttttttttttttactctgttgcccaggctgaagttcatgatgatagccttgaactctcccatctcaagtgatcctcctgcttgccttctttatttttttattttattttttggcggggatggagtttctgtcgcccatgctggagtgcagtggtgcaagctgtgctcactgcaacctcggcttcccaggttcaagggatcctcccccctcagccttctgagcaactgggactacaggtacatgccactatgccgggtttattttattttttgtggagactgagtctcagtatgttgctcaggctggcctcgaactcttggcctcaagcaatcctctcacctctacgttccgaaatcctggcattacaagtgtgagctgcggcacccagccttttttatcttttcaattagcagatttggtgtaagccattttaaaatgctttgcccactcctaggtcatgaagatgttttcttctaaaattcttcattgctttattttttgtgtttagatacacattataattcaagttgatcaatgtgaggtaggggtcaagattcattttctttcataaactttggaacaattggtcagtttacacatacacacacacacacacacatacacacgaacctctgatagggttttgattgggattgcattgaatctagagatcaattttgggaaaattgacgtaattataataatgtctattccatgaatttatactcctctgcatatagttagtcctttgtttattttaataatagttttagtttccagaagccttacggatttaatatttaagcagtttatggagctcagatttgaatttaaagactcctaaccattgtgcttaattttctattgtacactgatggaaacttggaatatccagaaaaggcacaaatatcatcagtaaaaagctttttagcatttcctatacaaaaactttattaatataaattcattgttaattttgacaacttgaatattaaccaaaataattttggtactatatatatatataattttgcatttgagattatttgcaagcactgtgttattatttggctgtaagaggacgtataaatatagaaaaaattttaatataaataattgtgtctagggggaaggtcctaaagccaactctactcaagggatgccttggtagcaatgattgttaaccatctggagtgacagaagaaagtgatattgggtaactaacttcttaagaagtttcatctcaagttttgtaatattatagcaacaaaaaattatgctattggttgctccattctggtcacatggatgggcgttttcatcatgtcctggttatgtactgattaatgtggtcaatctctgcactttctaaatttttgatacatggaggcagttttaaatggttggatggttttatgtggtgacaacatttgtatagaattttttttttttgtagttaacactcagaccactgagcaaattttaaatactgccgaagcctttttaacatcccaataattggatgcagtattaaataaacaaataaatatttacaattaatttttctattttgcattcaccaagtcaagtagaccacattagtcttatgaataaaatgcatataatgcatccttccaataacatgtaaaaatcatagaaaccacagaggcattcctttgtgtatattaattctcgatagtaaaatgagtcacccaaaggaaaagccataacattcctcagatggccaaaattcgttgtcaagtttatttttaatgttgagagttcttggttatttccatctaactacattagatggtttttttccatcgtctacatttgttcccttgtgacatttgtggaatttcagtgcagttttctaccgggccctctcttgtctgttgtgcaaactataacagcagtgaaataaaacacagactgccttgtactacttctacaaataataaccacgtgtcacagatttttgttctgcctgttgtttgttagtcatataggttcaggtactcttgtgatgagtctcatggagggaactgttgaggcagtggaaagtcctacagggttttatcccttgagaagtagtaactttaaaaaaactaaaatatggccgggcatggaggcacatgtctgtaatcccagatctttgggaggccaaggaaggaggattgcttgaagctaggagtttgagaccagccttggtaacatagttagaccccgtctgtagaacagattttataaattaagtaaataaactaaaatataatcatggagaacatcaaaaggaatatccattgcattcaaatttggcatacttgtcttccatagatgaatgtattctgttttttcaggttttaagaagaagcagtgatgaagaaaaagttctttgtttggtccggcagcgtacaggccaccactgtccaactgctgtgatggtggtgctcatcatggtgtgggatggcatccctcttccaatggccgaccggctatacacagagctcacagagaatctaaagtcatacaatgggcaccctaccgacagaagatgcaccctcaatgaaaagtaattaaatctgttttatactgccttaccattcagatctctattacatattggtaaaattgttaattagctaccaactatgtatattatatgggagaataggatttgagtattgtggaattaaaaagaatgaacatttctgtaaagagagagtctctattttatagtgagttaaggttactttaaatcattctcctttggaatattacttcactgtgaccaggtgcagtggctcatgcctgtaatcccagcactttgggaggccgaggcaggaggatcatgaggtcagaagatcaagactatcctggctaatatgtctccactataaatacaaaaaattagccgggcgtggtggcgggcgcctacagtcccagctactcaggaggctgaggcaggagaatggtgtgaatccgggaggcggagcttgcagtgcgctgagattgtgccactgcactccagcctgggtgacagagcgagactccatctcaaaaaaaaaaaacaaaaaagaaaagaatattatttcattgcttcccaaaaagggaagcaatgaaagaatattgctgacccaactcacttctagagtctggaggaaagggattttgacttaaaagaatggtcttccacaggagtgtcatatcattttgcatttcctctattcaatgtaagagaatatctgtttttctgtagtcttaccaatgattatgttggcaaatgtgagtttttgcctattaagagaaatgacatcagtgtaattttgacctgaatttctcttatgaatgagagtatttttttcacatgactaaaaaccatttggctttttttgtttgtttgttttaaccacctgttaaataacctagcccatttttgcagagaattcctccatttatctattttctctctgatggtgctattaactcttattctgtgatataatttgcaaatatttttctcagtttgtctttttcctttggctatgttatctcccacaaaaggttttgtttttgatgcaatcaaacatacccatctttttccttatttggatctggatgttgagtggtatttaggcatgtttttctatgactttaagcaaagcaacatataatgaaaccaatatttttctcatcaacgctgtagcaatattgagcgatattcggggaactgctctaggtggtttcacttataatcagtttctaacagcctgttgacatcaagtgagaaatgactatacttgtttaaaatataaatttttgaaatttaaatctctcatacatttaatgaatcactggtgaatagttgtaagaggagataagttttgttgttgttcttgttgttttgtttttttgagacggagtctcgctctgtcaccaggctggagtgcggtggcgcaatcttggctcactgcaatgtctgcctcccgggttcaagcgattctcctgcctcagcctcctgagtagctgggactacaggcatgcgctttgggaggccgacaagggaggaccacttaaggccaagagttcaaaagccagaccaggcaacatagtaagactccatctctacaaaaatatttttttaaaaaaactgtttgggaatgatggcatatgcctgtagtccttaggtaattaggaggctgaggtggaaagattgctgttgcccaggaatttgaggctgcagtgaactatgatgatgccactgaactccaacctgagcaacatggcaaaaggagagagagagagagagagagagaacttcatgggcctgatgtactggctcatgcctgatcaaagcaggaggatttcttgaaaccaagagtttgagaacctatccctacacaaaatttttaaaaccaggcatagtggtgtgtgcctgtgttcctggctactttgaaagctgaggagggaggatggcttgaggccaggagtttgccgttacagtgagctctgattttgccagtgcacttgacagagcatgatcaagtcttcccctcaccaccccccacaaaaaaaaaacagttcacaaatacagaaagatgtaagaatacttcagcggagtcttttttttccttttttctttttgagacagagtctcactctgtcgcccaggttgagttgcggtggcgtgacctcagctcactgcaaactctgcatcccaggttcacgccattctcctgtctcagcctcccaagtagctgggactacaggcgcctgccaccatgcccagcttttttttttttttttttgtatttttttgtattttttgggggggtttttttttgtatttttagtagagacggggtttcaccatgttagccaggatggtcttgatctcctgacctcgtgattcgcccacctcggcctcccaaagtgctgggattacaggcgtgagccaccacgtccagcccagtgaactcttttaagacagagtctcgcactgtcgcccaggctggagtgcagtggtgcaatcttggctcactgcaacctccgcctcctgggttcaagcagttttcctgcctcagcctcccaagtacctgggattacaggcgcccgccaccacgtccagctaatttttgttgttgttgttgttgtatttttagtagagacgaggtttcactatgttggccaggctggtctcaaacccgcctcagcctcccaaagtgctgggattacagacgtgagccaccgtgcccggcctggtaaactcttatatacccttacttagattccacaattgttaacactatgttacatttgtttacgtacacatacaaacacgttactgttgtagacttatttctttcttgatcatttgagagctagatgtagactttgtctttttccctaaataatacttgaatgtatttatcctaaaaatgaggattgttctcttgtatatccccatataatgatcaaattcaggaaatttaaatttgataaaatactgtgatctcatcttagttcatattcaaatatcatccatttcccaataattttcccctgtccatgattgaatgcatttagttattttgtccttttgctcccttaatcctttttgttttctcagtttttgtctgtcatgacattgaaatttttgaagcgaaaaggctaattctatagactgttaatcaattttggtttatctgtttcttcctgacttaagtcaggctatgaaatacaacctatagccaaagatggctgaaacaaaagaaaaaataattaaaaagatgaaatataacctggactattacactcagtgcaatttgtcccactattggtgttgttgactatttaaaataatctgaggatgctcttctagatctcacaacttatcacatttcctctgtgtttcatttttaaaataatagtacatagtaagttaaacaacatttttctctccttccatgtctttttcaatgatatgaataaatttcttatgtttctatttgtttggcaactttaatttattctattcaaaatgttttaaccattttcattccatttgcatctcatttagtgaatttcatcgtagtctttcttttataagcaatgctaagttacgtatcaggcattttccaggctttcacagtgaaaacataaaaaatagtttttttctaaatttttatattattttcactttttcaaaataattggtttctttattgttttatattttaatcattatataagtacaatatatactaagttgtaagcattatgcaattttattttttacttaattattcttttactgttttttttgttctttctttctggtggaatttaaaatcatgcaatccttttttaactttcattttaggttcaggagtgcatttgcaggttttttatttaggtaaattcatgtcacaggggtttgttgtgcagattatttcaccagccagctactaagctagtatccaatggttattttttctgatcctctctgtcttcccaccctccatcctcaagtaggccccagtgtctgttgttcccctctttgggtccatgaattctcatcacttaactcctacttataagtgagaacatgcaatatttcatcttttgttcctgtgttagtttgctaaggatagtggcctttagctttattcatgttcccacaaaagacacgattatgttcttttctgtggctgcatactattctgtggtgtatgtgtaccacattttctttatctaatctgtcattgatgggcaattaggttgattacgtgtctttggtattgtgaatagcactgcagtgaacattcacatgcatgtgtctttatggtagaacgatttatactcctttgggtatatacccagtaatgggattggaagagcatacagttttataactacaagaagaatatatggtactttcgttgtcattcttagcatatagtttagtttaaggctttagaaatgccctaaaagttatacacttaagatttaattaaatgtaaccggttttctgctccatttttttctattatgcactttttaaagtttttaaaattcagaaactgttttgtttttgtttttgtttttgttttttgagatggagtcttgctctgtcacccaggctggagtgccatggcacgatctcagctcactgcaacctccgcctcctgggttcaagcaattctcctgccactgtgccaggctattttttgtacttttagtagagatggggtttccccatgttggtcagggtggtcttgaactcctgacctcatgatccgcccaccttggcctcccaagggctgggattacagtagtgagccaccacacctggccaagaaactgtttttatataaaatatatattgtttttcaatccttagaaaattatatccgtctcattttagatataaagcagctgaattccaaagcagtaataaaatgttctaaattttcatttgtgatatggaacaaatccaggatttaaaacccagatttaaaaaccaggttctgtccaggctcagtgcctcacacccgtaatcccagaactttgggagggtagataacttgaagtcaggagtttgagaccagcctggccaacctgatgaaacccgtctctactaaaaataaaaaaattagctgggcgtggtggcgcacacctgtaatctcggctactcaggaggctgaagcagcagaatcgattgaacttgggaggcagaggttgcagtgagccgagattgtgccacggcaatccacccttggtgacagggctagaccccatctcaaaaaaaaaaaaaaaaaaaaaaaacaccaaaaaaaaaaaaaagaaaaacccaggttctttatttccctatctcagacatctccaaatcaaacaatactgtgagtattttagatctgtatagtttattcccacttatttggatttgcaatcatgaccaaatatttctgctaaaaatttggttataataaagtatagttaaccctggtcccctagtcagatttcttgaaaaaacaaaagttagctttttattgttaacattaaactattttaaataagtaatataatagataagtgttataaccggttctttaggcatccatccttctaaagctatagaaacctgaaatgttctctctgaggtattgtaatgcttcatcaattcactctcttgaattacaatcttacagtcgtacctgtacatgtcaaggaattgatccagagacttgtggagcttcattctcttttggctgttcatggagtatgtactttaatggctgtaagtttggtagaagcccaagccccagaagatttagaattgatccaagctctcccttacatgtaagtgtccttctttattcaaataatttatttttgaattacacattgaatatgtaagtgcattcctttaacattttttgaaacactataaaaactaaatattgaaaagtagtaatcaaatagtaaaattatatttctattatataagtaaataaattaattaagactctaaataaattaggtaaagactttagctatctccccaaattccaattgtccctggcttcctcctcctgctctactaccccaccccagcaaaatcatcattaaaagaacctagaattttatactcagccaaaataggaaaaacccatttgccaaaatttcaaagactcagaaagtttactacccacagacctactatgaaagaattactaaaggacgtaatccagaaagaagatatatgaaaccggaacgaatcagtccgggacacgaggccatggtgagcaaagaaattagtcgaacttggtgttaagttaaataagttcaatacttatatattatattaaattaaaataacctataagtataactccacacctttatcagctcgtgggtgggtaggcagtgggagggggtggggcaccaataggaactaagtattctaatgtgttatgctttgtttgtgtagtgaggatttatatattgattaactataagattgatatcttttaatctttgagcagtgaccaagagtaaaaaacattttatattacaagccactatacacatacatagacataagaaaataattagacctatctgaaaacaatacttacctttcttacatgtaacagcagtaacatcaaaatatttaaaaagttaatatcaatgtagttattctaagagtctatgatacatcatttttttatcagatttctttctttttcttttttttttttctttttctttttcttttttttttttttttttgagacagagtttcgctcttgttgcccaggctggagtacaaaggtgtgatcttggctcactgcaacctccacttcctaggttcaagcagttctcctgccttagcctcccaaatagctgagattacaggcatgcaccaccatcatgcccagctaatttagtatttttagtagagatgaggtttcaccatgttggccaggctaatctcgaactccggatctcaggtgagatctgtagtcccagctactaaggaggctgaggtgggaggttggcttgaaccaaccagctaggttttctttctaaatattatatgataaaagtatctgtccctttttggctctctgagcagcactgtagtggttggcaagaataaggcagcacaaagggagccaagaagaaagtgcttgatccattttctaagaaagatttgtattacgtgaaagcatctgccatgttcaatataagaaatattgggaagacactagtcaccagaacccaaggaaccataattgaatctgatggcctcaagggtcgtgtatttgaagtgagtcttgctgatatgcagaatgataaagttgcatttagaaaattcagctgattactgaagatgttcaggggaatgattgcctgatgagcttccatggcgtggatcttacctgtgacaaaatatgtttcatggtcaaaaaatggcagacaatggttgaaggtcatgtcaatatcaagactaccggtgcttacttgcttcatgtgttctgtgttggttttactaaaaaatgcaacaatcagatacggaagacctcttatgcttagcaccaatgtttcggccaaatctggaacaagttgatggaaatcatgacccgagaggtgcagacaaattacttgaaagaagtggtcaataaattgattccagacaggattggaaaagacatagaaaaaattcttgccaatctatcctctccatgatgtctttgttagataagttaaaatgctgaagaagcctagctttgaattggggaaactcatggagctttatggtgaaggtagcagttctggaaaagccactgaggacaaaacaggtgctaaagtagaacgagctgatggatatgaaccactagtccaagaatctgtttaaagttcagacttatagtagtggcaaataaaaagtcatatttgtgggggaaaaaagtgtctgttagttgataaacataaaggatcttcaaaacattcaaggaaaatgcatattatgaataaactatgtatggatttcataataattttcaccaaaataaactcatacttacttgtaacatgcctgaatggggtctagtttgatgcactaagaaggataagatgtcagtttataaactgcctctatcagagcaacatgaattgtgctaaaattgaagcaagaacaaacatcaaatttctggtgaagcttgggtggaagaatgataaaatcgttgatgccttataaaaagcttatgggcactgccccaaagaaatctgcagtttacaaatggatagctcattttaagaacggatgggacgattttgaagatgaaggccaaagcgtcaaactatccacgtcatttttttttttttttttttgagtctgggtctcgctctgtcatccaggctggagtgcagtgatgtgatctcagctcactcactggacctgacctcaggtgatctgcctaactcagcctttcaaagtgctgggattacaggcatgagacactgtggccaggcagatttttagaaattaagataaaattggccctctctggctgttcaaggaaaaatatttggcccaagatcaatgacagtccctactccttgccaggtgcccaattaatacctaggctcttttataaagctattttgttgttgttgtcttgagatggagtttcgctcttattgcctaggctgacgtgcaatggcttgatctcggctcactgcaacctccacctcccgggttcaagtgattcacctatcccagcctcctgagtagttgggattacaggctcccgccaccatgcctggctaatttttggtatttttagtagagacggggtttcaccatcttggccaggctggtcttgtactcctgaccctgtgatccacccacctcagcctcccaaagtgctgggattataggtgtgagccacagcacctggccttttgtgtgtgtgtgtgtgtgtgtgtgtgtgtatacacaagatatatatgtatatatatacacatatatatgtatgtatgtgtatatatatatatatatatatatatatatatattttttttttttttttttttttttttttcttctgagacggagtcttgctctgtcacccaggctggagtgcagtggcgcgatctcatctcactgcaaactccgcctcccaggttcacgccattctcctgcctcagcctcccaagtggctgggactacaagcgcccaccaccacagccggctaattttctgtatttttagtagagatggggtttcactaggatgatctcaatctcttgaccttgtgatccgcctgcctcagcctcccaaagtgctaggattacaggcgtaagccaccgtgcctgacctggccatttgtatttttttttcgtagagatgggatttcatcatattggccaggctggtctcgaactcctgacctcagatgatctgccctcctccgcctcccaaagtgctgggattatagatgtgagccactgtgcctggcccacatcaatttttgaggaaacattaatcttgtttgttccctaactgaatagatatatcaactggttcagcctacacaattcttactgaaacattatagttgtgcaaacttcctacttgatgggttccaaaactgttgttcccagctcagctgcagaaaagaatagaaattttaaacaagtgggatcaagatcctgaggcattcttaaaattacaacaggagatggagcatggctttaccagcataatcctgaagacaaagcataatcaaagcaaacgccagcaagaggtataggaagtccagtcaaaaccaaagtggaccagtaaagagcaaagttcatggcaacagtttttttgggatgcttaaggcattttccttgctcactttttggagggccaaacaaaaataacatctgcttattatgaaagtgttttgagaaagttggagaaagctttagcagaaaatagcccaggaaggctccaccagagagtccttctccaccgcaagaatgctcctgctcattcctctcatcaaacgggggcagttttgcaaagtgtatcaatgggaactcattaggcatccaccctatagtcctgatttaactccttctgatttctttttgtttcctaatcttaaaaaaatccgtaaagggcacctatttttcttcacttaataatgtaaagaaacaacaacaacaacaaaactatattgacatggttaaattcccaaagtgctccatgctttagaaatggattaaatgtccaatattgtcacttacaaaagtgtcttgacctggatggaacttatgttcagaaataatgttattttattttttgatacggggcctcactatgttgctctggctggactcctgggctcaagggattctcctttctcaactccaaagctgggattacaggcatgtgccaccctgcctggcaatttttttaattgagacggagtttcggtcttgcccaggctggagtgcaatggtgtgatctcggctcactgcaactcctgcctcagcctcccaagtagctgggattacaggcatgcgccaccacgcccagctaattttgtatttttagtatagatggggtttctccatgttggccaggctggtcttgaactccccacttcaggtgattcgcctgccttggcctcccaaactgctgggattacaggcatgagccacaattgcagaccagtattttttatttttatttattttattttattttttgagaagggttctcactctgtcacccaggcagagtgaggagggaggccacccacctcggccttccaaagtcctgggattacaggcgtgagccaccacgcccagccagaatcaaagagttttaaggaggagagtgacatacttacacttgcccttgaatgagatccctctagatgctgtttgaacaatagactaaatgtaaccaagagtggatttagcaagatgagccaaccatctatgagcacaatccatggaggggataatggtcacttaaattatatggggtggggggttcatctttatcatcaggcacactggaaattggaccaggtttgtagagggcagatcagtaattcagtttagatatattggtattgagattcctaagggaaatctacatgggaatgtcaggtcaataataggaatctgaaacttaagaaatggtctaagtggtaagtatagctgtggatgaggatatgatggtcctagagattagatacagagtgtgaacagaggcctggtgtggtggcttacatctgtaatccccgtactttgggaggccaaggcaggtggatcacttgaggtcaggagtttgagaccagcctggctaacatggtgaaactccgtctccactaaaaatagaaaaattagccgggcatggtggcgggcacctgtaattccggctactcaagtgcctgaggcaggagaattgcttgaacctgagaggcagaggttgcagtgagctgagatcgcaccactgcacccccccacacacaaaaaaagagtgggagaaggagttaatcttgaccaccaataggtaaagatctgctaagtaattccctctgtatctgacatgcatgttcattctaatgaaataattagaaggtcaggattttacaatatgaataataagcctgtaatagtaaaataatactaatagggccgggcacagtggctcacacctgtaaccccagcactttggaaagctgaggcaggtggatcacttgaggtcaggagttcaagaccagcatggccaacatggtgaaatcctgtctctactaaaaatggaaaaaattatccgggcgtggtggctcatgcttgtaattccagctactcaggaggctgaggcaggagaattgcttgaacctgggaggtggaggatacagtgagccgagattgtgccgctgcactcacactccggcctgggcaacagagtgaaactctgtctcaaaaaataaaagatgaaaaataataaaataataccaacagtgaactgtacaaactatgagttgcttctagttgtctactttatttcagtgcttctacacaataaatgaggtaatttgagatgacctgttcctcagtaggacttgtgactctgtgtggtccacaacagaataaatattattacaaaatagagtaaagtgatgtgagaatattaaagaatttaaacctgatgctgcatacaaaaagtatagaatttacatgtgacttttccagtgttcatatcaatagcagtacacaagtgttaacatttctctgcattgttccacttgtagtaaaacacggttacccagcccactggatacttccagtgattgaagatataaatagaattgttttaatgggtgttgatttaaaagtttctcccaaataaacataataattagtgtatgggtttagcgagggcatgtttttaaagtagggtcatgactttcctgttttgttttgtttttttgagacagagtctggctctgtctcccaggctggagtgcaatgccatggtctcagctcactgcaatcttcacctcccagattcaatagattctcctgcctcagactcccaaatatctgggactacaggcgcatgccaccacacctggctaatttttgtatttttagtagaggctgggtttcaccttgttggccaggctggtctcgaactcctgacctcaggtgatctgcccacctcagcctcccaaagtgctgggattacaggcatgagccactgtgcccagctgactttcctgttttttaaactacaacggctaagataaaagtagcctgattaacagacaaatctatgaatggatcctatggattttttttgtgtaatcaagtcaatataaatcaataggaaaccaaaatgattatgagtcacacttacggttgctaagatggaggcttgtcagaaaccactaaataattgacttgctgtgtctaaattattgtgtagctttggcttttataataatttgatgcataccaaaggtcaattgattcatataatggtctcctttctgtgttaatggcatctccttccaccaaatctcacatgagcatatgaggcgaaagcctcactcaccctgtttagtccatgttctctatacgtgtttttcttttttgagacaagatctggctctgtcacccaggccggagtgcagtggcttgatatcatctcttgatctgccacttcagcctcccaggttctagcaaccttcccatctcagcctcccaagtagctgggactgcaagtatactccgtcacggccagctaattttttttatttcttggagaggtgtggagtttcaccaagttccccagactggtctcaaatttgtgagctcaagtgatctgcccgcctcggcctcccaaaatgttgggattacaggcgttagccaccatgctaatagagactcatgtgatagttttcctttgaaaaaatctgatgtctctatcagtagcaatccagatttcttgagtgttaatggtcctcatagtccttcaaagtcttcttcaatttgtagttattatggtgtagaaaagagaactatagacaaccacttgcccacttacttcctttgatctgcaggcatttactaaacctctcagttatcctgaccttgctctttcgtagagatcatgcgtaatattcctgtttcatgggccataaggacatgtgtttaattcataaggacatatggattccatttgaaacaggatctcacacagagtaggtgttttatgtatgtactctctcttctccgttataggaacctgttacattgtaaccaagttacttgccatttccccttgccagcaagaacgttgtttgcatttattccaagtgtgcaatactattgaataaatataaaacatagctctcatttttcacaacatgaacagtattgtaatttatctctaacactatttaaatttctaattaacttagaattttcatttcaaaagacttcattaaagcataacaatgtctaatagtttagatggagaaaagaagcagtgtaattttctgtggtagctattttatcaggataagtatgaattgtgcattaaccaccatcagccatgatttatgattcagttgtaccttaaacacatgaaggtgcgattataaaatacctaatggattctgttttcctataggaaaaaaaccttgaagataacttacagagtttggctacacgattagctccaatttataagcagtatgctccagtagcttaccaaaatcaggtatgtattggtatgaactttttatttatttattaatttgaggtggggtcttgctttgttgcccaggcagcagtacagtggcatgatcaaagcttactacaaactcctaagctcaagcaatgctcctgcctcaccctccaaaaatgctgggattacagatatgccagactgttttatatcttaaaaagtcattgttggccaagctcgttagctcacgcctgtaatcccagaactttgggaggccaaggcagtcggatcacctgaggtcaggagttcaagaatagcctggcccacatggtgaaaccccatctcaactaaaaatacaaaaattagctgggtgtggtgggtgtgcacctgtagtcccagctaatcaagaggctgaggcaggagaatcacttgaacccaggaggtggaggttgcattgagctgagatcatgccactgcactccagcctgggtgacagagcaagactctgtctcaaaaaaaaaaacaaaaaaaaccagtcattgttaatagaaaaattttcaaatttgaacaaatatatacatacacagcatatctatctaacatacatttatgtaattggactttttattgatctactcttttttttttttttttttttttttgagacagagtcttgctcttgttgcccaggctggagtgctgtggcgcaatctcagccttttggctcactgcaccctctgcctcccagcaggttcaagcaattctcctgcctcagcctcccgagtagctgggactacaggcatgcgccaccacaccccgctaatttttgtatttttagtagagatggggtttcaccatgtttcccaggctgctctcgaactcctggccacaagtgatctgcccgcctcagcctcccaaactgctgggattacaggcattagccaccctgcccagcatccaccttttcattttaaaaggagttacaaattgactttcagtaatggttcatgaaatgtatgtatatcttctttttacggatattgaaaactctgtgtatatgattaatgcgcttttattggtctttctttctaatggaatgattgagtctattttacttgcttatccatctccaacaagaattagtatcctcaccctgccttcccttgtaaattcagtgattttccttttactccatgtattgtcaagtgctttctcctgaatgttgctaagctacaccttcatgacaataatacatttagtctcagaaattacaaagtgtaattaattagaaacttcatgaggaaattatttttactctttactgaaggtaggtgatttccttctctctcttaagattgtgctccatgctttcttttctaggtggaatatgaaaatgttgcccgagaatgtcggcttggcagcaaggaaggtcgtcccttctctggggtcactgcttgcctggacttctgtgctcatccccacagggacattcacaacatgaataatggaagcactgtggtatgtacctgtgtgaatttgtattctaaaagctccatcactatatgcttaggctgcagtccttacgtatactgtgatgactattactgtgaaaaatcttaatttatgtgttattagaaataagtggaaaataaagtgaaaaaaaagaaataagtgtgtagtgcaggtcttcattaaatgcattatctatgcacttctaaaaagtaacagggccagcttcaaacaaacattttattgaaaggctatgttacatatttaattgttgtgtttttgctgggaggcaggagtacttttttttaaatttatttatttatttattttttgagacggagtctcactctgtcgcccaggctagagggtagtggcacgatctcagctcactgcaacctctgcctcctgggttcacgccattctcctgccttagcctcccaagtagctggggctacaggcgcccacgaccacacccggataattttttgtatttttagtagagatgggatttcactgtgttagccaggatggtcttgatctcatgacctcgtgatccacccaccttggcctcgaaaagtgctgggattacaggtgtgagtcaccacgcccagccaattttttgtatttttagtagagatggggtttcaccgtgttagccaggatggtcttgatctcatgacctcgtgatccgcccaccttggcctcccaaagtgctgggattacaggtgtgagccaacgcgctcggccaattttttaaagtaacaattctctgctatcaaactagtaggtatgaagttgagcatgttacttgatatttgtttttgccatctgcacttcagggtttttgtgaggcaactgtgccaattatcagcaatatttgcattctggtatgcctactatgtttatagttatgtaaatcatcacatgtccatcgcctgaagtcaattaagaaatacgtaaattaggcagaagacccagtggaaaatcttgaaatagtatttttgtctgtttgcttcacctgtttgtcttcctgtcatctagtaaagcaagatcaatagagagcaattgcttttgtttttctgctgcaccagttttttaggtttgccagagaattctaaaaccttcattaagtcttggctgcaggatgagcatgttggctcatgtctgtaatcccacctacttcggaggccaagataggaggattgcttgagccccgggagttctagaccagcctgggcaataagaccccgtctctttaaaatatacaatttttaaaaaataattttttttaggtttagctacagcctcttacagtgtgattgaaagtatatgatcagatctatcaacaggcagtctttcttccttgcttggtcagtagaagagtattggtgatagattaagccacaacaacttttttttttttttttgcgtatcattcctgtatacaaaaatgttttgcagagtctttgagaccaatgttatttctaagtgttgaagttatataaatccagcctggtaaatactagccaggcagtggttcatcaccatcacttggccaggacattttacctgaattacagaatatctgtgatcaggctgaagtcagttcagagtcaagctaagtttcagtttctcttctctgcgctctttgacttccagggcccggattactcactcaatgagggtcttatccggaacttgacatcactccaaattcccccatcttcaaacatgtgaactcttgaaattctaccactacctctcccttcaccctgttttaccataatttctattttttttattttttttattggtttactctctactccttattggtttactttctaattatgctcctcatgtcaactccttatgtccttcttagtctctctgtgaccaattaaattggttccagtaaacatttattgatgtgacattctgattttcagcatgactattattagttatgaacagattaccaccatgacagtttaatattgcaggctttctccaggcaccatggctcatgcctgtaatcccagcactttgggatgctgaggtggaaggattgcttgaacccaggatcttgagtgtagcctgggcaactttgtgagaccctgtctctacaattaaaaacaaaattagctatgcgtgatggtacacaactgtactcccagctactcgagagactgaggcaggagaaacactcaaacccaggagtttgaggctgaaacatatatttatattttagactttgctgaaaaatgtgactacagatattgaaaaaaatgaatttttttaacctttaactttgctttaccttggtatctatcaagttctaccatgaatacaaaaatgctttggaaatcaaatctgtttatttcatttatctccagtcttcgctatcactgaaagggtttacagctccgggatatatgtttttattattaaataaataaaacattttataggtttctgttggatttttaatatttgaaaattaatttggctgggcccagtggctcacacctgtaatcccagcacttagggaggccaaggtgggtagatcacttgaggaaaattaattacaattaaaatattagttttataataaaatgttagtttttaaagcagaatattaatattaggtatcaaaagtcaggaatcactatagtgcctatagttctgtattttcatttctccataataaatataacctttaatgtaaggaggagggctaaaataggttgcatttaagatgaaaaaagttggctattagtatttcatatccaaagaaaggcaaatttattgatatttattgatatggctcctcactggaatagagcagtaatagaacagaaagagaatatttatcaatataaaattaaaaaaaaattttttttaactgttagcgtataagtctttctggaaagagaaatcaattatgtccctgctatccaaggaatgtgacattcttgaaatatcagaaatatggtgctatgtgagctaaaatcatatcttcctaataagttatacttaatatgaacacaataaacatagttcaatagccattccttaatttaggcaatgaagtaagatgaaatgtaacaagaatgtttagtatcaaaaatacgtaagtattttataacgttatatttacttagaaaattaaatattattctggtctgcctacaaacaactgggaagttactatgattgaacagagttgggtggcttgatataaaataataatataccatcagcaaccaattgaaaataaaatgggaatacaaatctctttcccaaaggcaacaacacgaaggtaggaatagccacaatgaatgtgcacgacccgtatatctttcccatttcatgtttttctccctatcaggtttgtaccttaactcgagaagataaccgctctttgggtgttattcctcaagatgagcagctccatgtgctacctctttataagctttcagacacagatgagtttggctccaaggaaggaatggaagccaagatcaaatctggggccatcgaggtcctggcaccccgccgcaaaaaaagaacgtgtttcactcagcctgttccccgttctggaaagaagagggctgcgatgatgacagaggttcttgcacataagataagggcagtggaaaagaaacctattccccgaatcaagcggaagaataactcaacaacaacaaacaacagtaagccttcgtcactgccaaccttaggtgagccctatggaacctggtaatctctgcacaactttgatggatagatgtgtttggactttgccttgccttatttgtttagagttaaaactaagacactgaatatatttttacatataccagaaccaaaagtcaacaaaaaagtgacccatcagtatttcttggtaactttttcgacttatccttttttttttttttgagagggagtcttgctctgtcacccaggctggagtgcagtggcgcaatcttggctcactgcaagctctgcctcctgggttcacgccattctcctgcctcagcgtcctgcttagctgggaccacaggcgcccgccaccacgcccagctaattttttgtatttttagtagagacggggtttcaccgtgttaggcaggatggtctcgatctcctgacctcttgatccgcccccgcccccccgcccccgccttggcctcccaaagtgctgggattacaggtgtgagccaccgcgcccggcctacttatccttttttatactttaacatattctttttttatggcatggggaggggtctcactttattgcccaggctggcttggcacgccttggcttaagcaataatcccacctcagcctcctccagagtagctggaactacaggcacacagcactgtgcccagctaattttaacatgttcttatcattgttcctgtgaatttccccatctaattcgaagccctactcgttgttggcatagataagagacatgactttcgggatgccttccttggtcacctttaccatcaatttaagcaataattaaataaatattactaaacaccactttcaacagtggtattgtgggttgtcgttgttgtttttgttttgtttctttgttattttgtttttgtttgtggagacaagatctagctctcttgcccaggctctggagtgcatgcagtggcgtgatcatggctcaccacagcctcaaccttccaggctcaagcaatcctcccacctcagcctcccaagtagctgagactgtagtgtgtgtgccactgtgtctagctaattattgtattttttatagagatagggtttcacctgtttgccaggctgatctggaactcctggactcaaatgattctcccaaattggtgtaattacaggcatgagccatcacacctggcttgatttgttgattataaagtctcgttagttttggttttgggttttgggttttggggttttttttaaaagacagagtcttgctatgttgccaaagctggagtacaatggctattcacagacacaatcatagcacactgctgcctcaaactctgggatcccatgggaacctctctagcagctagaactataggcgtgcaccacacctggctcttaccagcttttcgcctaatatatattttgagtcagagtctcactctgtcacccaggctggagtacagtggcaccatcttggctcactgtaaccctccacctccttgattcaagcgattctcctgcctcagcctcccgagtagctgggattacaggtgcccgccaccacgcccagttaatttttgtatttttagttgagacggagtttcaccatgttggccaaactggtctcaaactcctgacctcaagtgatccacccgcctcggcctcacaaagtggtgagagccaccacgcccggctggcttctcagttcttttgtcacaacctcaattgtcttttgatagcttttttttttttttttttttttgagacagagtctcgctctgtctcccaggctggagtgcagtggcgcaatctcagctcactgcaagttgtgcctcccgggttcacgccattctcctgcctcaacctcccgagtagctgggactacaggcacccgccaccacgcctggctaattttttttatatatttttagtagagatggggtttcaccgtgttagccaggatggtctcgatctcctgacctcgtgatctgcccgcctcagcctcccaaagtgctgggattacaggcgtgagccaccgtgcccggcctactttcttaacttctataacaagttgttccaggcttatctatataattctgccccatatttaaaatcagccatttctttgatgagcctatagaaggaaaaaaaaatcatgaattcatactgacactcaaaattaacattataatgtattccttagcttctttcatttttacatttatgagaagctgtttatttgtttttataacatgagcagagttggcagtgcaggcatttatataatgctgaaagaaatgcaataatacagagaaatactgagaagaaatgtatattcccagatatttgtaagcataatgtacaatacttgggccataatgtccttttgtaattctacccctcagtcatttagtctttccttcccatcatttaccttctgtggacaacttaacctctataataatagtgccactgataacaatagaggtttcctgatgtaccatttctgggtcttatgtatgcgttatctttagaaatgagagctctcaaggctccaggttgtagcatctgagaggagaactgcagagcttctgaaattgatcattatgtattatattatcaatttattatatttttaattactttaaaacatggctgctttaccttttcttggtcctaagatttgctggttttgcacttccaaatagttttttagaagttcacaacaggggctaggcgtggtggctcatgcctgtaatcccatcactttgggaggcagaggcgggcggatcatgaggtcaggagttcaagaccatcctggtcaacatggtgaaaccccgtctctactaaaatacaaaaaattagccaggcgtggtggagattgagaccatcctggccaacatggtgaaaccccgtctctactaaaatacaaaaaattagctgggtgtggtggtggtgtgcgcttgtagtcccagctactcgggaggctgaggcgggggaatcgcttgaacctgggaggcagaaattgcagtgagccaggatcgcaccactgcactccagcctgggcaacagagcgagactccatctcaaaaaaaaaaaagaacttcataacagggagaatgtcctcaaggaaaatgttcccattggatgtgagatttatgtggatgtgtcagagcaaataacccacagttgacatcttgagagtaatgatctccttccttaatgagaaggaaactaagctgaaatactcttgcttttgagggtcacaaagatttatattcaagtacaatattttgcttgacttccctctgcctaaccttggactttgccagttaagatgttttgttacctagaaatatttataaactattacttgtttttactttttaaaatatagggtcatacaatgcctaaaacgtatctaaatatctttgaatagttaaatattgctgtatgtgattgtattacaatacctgcacaatattacaacatttagttgtattacttacttcctacctaattagttcaattctaatattttactatttcaaacaatgaacagccatccttttggctagatttttgcacttatttatgcctctttcccaaaggaagagttctttaaagaaaattatggccgggcgcagtagctcaagcctgtaatcccagcactttgggaggccgaggtgggtggatcatgaggtcaggagatcgagaccatcctggctaacacggtgaaaccctgtctctactaaaaaatacaaaaaattagccaggcgtggtggcaggcgcctgtagtcccagctactcgggaggttgaggcaagagaatggcatgagccgagatcgtgccactgcactccagcctgggggacagagcgagactccgtctccaaaaaaaacataaaaataaaaattattagatgaaaaattatacaaaactacataaaatttttaattcgtgtttgtgatttgaaatgaacagaacaaaaccaaccaacacaacatcagcgttttcttatataattctttgtacttgtctttgaaaatactttttaaaaggcaacccctaccaaaagtaatttgtatttttcttcacatttggtgtccttgtttagggagtaacactgagaccgtgcaacctgaagtaaaaagtgaaaccgaaccccattttatcttaaaaagttcagacaacactaaaacttattcgctgatgccatccgctcctcacccagtgaaagaggcatctccaggcttctcctggtccccgaagactgcttcagccacaccagctccactgaagaatgacgcaacagcctcatgcgggttttcagaaagaagcagcactccccactgtacgatgccttcgggaagactcagtggtgccaatgcagctgctgctgatggccctggcatttcacagcttggcgaagtggctcctctccccaccctgtctgctcctgtgatggagcccctcattaattctgagccttccactggtgtgactgagccgctaacgcctcatcagccaaaccaccagccctccttcctcacctctcctcaagaccttgcctcttctccaatggaagaagatgagcagcattctgaagcagatgagcctccatcagacgaacccctatctgatgaccccctgtcacctgctgaggagaaattgccccacattgatgagtattggtcagacagtgagcacatctttttggatgcaaatattggtggggtggccatcgcacctgctcacggctcggttttgattgagtgtgcccggcgagagctgcacgctaccactcctgttgagcaccccaaccgtaatcatccaacccgcctctcccttgtcttttaccagcacaaaaacctaaataagccccaacatggttttgaactaaacaagattaagtttgaggctaaagaagctaagaataagaaaatgaaggcctcagagcaaaaagaccaggcagctaatgaaggtccagaacagtcctctgaagtaaatgaattgaaccaaattccttctcataaagcattaacattaacccatgacaatgttgtcaccgtgtccccttatgctctcacacacgttgcggggccctataaccattgggtctgaaggcttttctccccctcttaatgcctttgctagtgcagtgtattttttcaaggtgctgttaaaagaaagtcatgttgtcgtttactatcttcatctcacccatttcaagtctgaggtaaaaaaataataatgataacaaaacggggtgggtattcttaactgtgactatattttgacaattggtagaaggtgcacattttaagcaaaaataaaagttttatagttttaaatacataaagaaatgtttcagttaggcattaaccttgatagaatcactcagtttggtgctttaaattaagtctgtttactatgaaacaagagtcatttttagaggattttaacaggttcatgttctatgatgtaaaatcaagacacacagtgttaactctacacagcttctggtgcttaaccacatccacacagttaaaaataagctgaattattatttcatggtgccattgttccaacatcttccaatcattgctagaaaattggcatattcctttgaaataaacttatgaaatgttttctctcttaaaatatttctcctgtgtaaaataaatcattgttgttagtaatggttggaggctgttcataaattgtaaatatatattttaaaagcactttctatttttaaaagtaacttgaaataatatagtataagaatcctattgtctattgtttgtgcatatttgcatacaagagaaatcatttatccttgctgtgtagagttccatcttgttaactgcagtatgtattctaatcatgtatatggtttgtgttcttttactgtgtcctctcacattcaagtattagcaacttgcagtatataaaatagttagataatgagaagttgttaattatctctaaaattggaattaggaagcatatcaccaatactgattaacattctctttggaactaggtaagagtggtctcttcttattgaacaacctcaatttagtttcatcccacctttctcagtataatccatgagaggtgtttccaaaaggagatgagggaacaggataggtttcagaagagtcaaatgcttctaatgtctcaaggtgataaaatacaaaaactaagtagacagatatttgtactgaagtctgatacagaattagaaaaaaaaaattcttgttgaaatattttgaaaacaaattccctactatcatcacatgcctccccaaccccaagtcaaaaacaagaggaatggtactacaaacatggctttgtccattaagagctaattcatttgtttatcttagcatactagatttgggaaaatgataactcatcttttctgataattgcctatgttctaggtaacaggaaaacaggcattaagtttattttagtcttcccattttcttcctattactttattgactcattttattgcaaaacaaaaaggattacccaaacaacatgtttcgaacaaggagaattttcaatgaaatacttgattctgttaaaatgcagaggtgctataacattcaaagtgtcagattccttgggagtatggaaaacctaatggtgcttctcccttggaaatgccataggaagcccacaaccgctaacacttacaattttggtgcaaaagcaaacagttccagcaggctctctaaagaaaaactcattgtaacttattaaaataatatctggtgcaaagtatctgttttgagcttttgactaatccaagtaaaggaatatgaagggattgtaaaaaacaaaatgtccattgatagaccatcgtgtacaagtagatttctgcttgttgaatatgtaaaatagggtaattcattgacttgttttagtattttgtgtgccttagatttccgttttaagacatgtatatttttgtgagcctaaggtttcttatatacatataagtatataaataagtgattgtttattgcttcagctgcttcaacaagatatttactagtattagactatcaggaatacacccttgcgagattatgttttagattttaggccttagctcccactagaaattatttcttcaccagatttaatggataaagttttatggctctttatgcatccactcatctactcattcttcgagtctacacttattgaatgcctgcaaaatctaagtatcacttttatttttctttggatcaccacctatgacatagtaaacttgaagaataaaaactaccctcagaaatatttttaaaagaagtagcaaattatcttcagtataatccatggtaatgtatgcagtaattcaaattgatctctctctcaataggtttcttaacaatctaaacttgaaacatcaatgttaatttttggaactattgggatttgtgacgcttgttgcagtttaccaaaacaagtatttgaaaatatatagtatcaactgaaatgtttccattccgttgttgtagttaacatcatgaatggacttcttaagctgattaccccactgtgggaaccaaattggattcctactttgttggactctctttcctgattttaacaatttaccatcccattctctgccctgtgattttttttaaaagcttattcaatgttctgcagcattgtgattgtatgctggctacactgcttttagaatgctctttctcatgaagcaaggaaataaatttgtttgaaatgacattttctctcataaaactggtcatctaacattatttctacccctctattatgttttactgtaatgatcaccttttcttatacctctcttataacacttaaattgggttttaaatctgcgtttgttcatagtatgatcattgaattcactgatacatgacctcctaatagcccactcagttcataatatgctacaaacttaccaattttaatgagagaataattcctgcctattgcagaatcgtacaaaatatcatgctgcccttgatattccatttcttttttcttttttcttctttttttttttttttttgtagagactgtctcactatgttgcccaggctggtctcaaactcttggccccaagagatcctcctgcttcagcctcctaaagtgcaaggatgataggcatgagccactccacctggcctgaaattccatttctaatggctcttcagccattgttgaaatttcttttttttcttgtgcttgtctgtctcacctacctcttgtttccaattcatctacaaagtaccaaatagaccaggtcataaacataattgaaatacattcttattggaaagtgaggctatctgaaaaggcatagctgtaggcaaattattgcaacatgtttacatcttaaataactttccaacatctttgttactcagtctgcatgttgataatttcatttattaaatatagaacttcaactagatgagatccataagtaatttacttaagacataaactcaatacatatttaattgaatgcatacccttgtgtaaataagctactgatttaattcacatgactaacctactttctaacattattacagtggatttctactgataacatttcacaatagcgtgtgtgaaaataaccctgaaccagtttttaaaacaaaaattatattgactttttatctgggacataggactttattgcacgaaacttccactgacaggggcacagcatttccttcgcatgtgccaactaaatcagtagctgtatgcaaactttaatagatttatagctactaccttcaatttcacaccttgatgcatggaaatcttttttatctagatttaatacaactgtgagttttgatcttttatagagatttatgacaagagaattttgaaataagttcatatagtagtggcctctcatagcaatggaagacacctgagaaatcacagagctcaatcactggggcccagagagcagatcttaatgctagattgtaattagaatttaaatagatgaaggccactttgtgttgagaactgtagggaaacttgattttcttacccaaagggtattttatcactgggaaataaacaagtatcagatgcttataaagtataggctttcaattcccctggaactagtgttaagcatatacaagaagttataaaggcatggatgattgaaataattaaggaaagtgtatttccactgtatatactacctagccatgcttacaaagttcattcatgccctttg

SEQ ID NO: 613 - DNA, 25881 bp, Homo sapiens
  source 1..25881: mol_type = genomic DNA
aatgttctaacccactatttcctttctgtctttctcaggatgcaaggattatattgggttcaggttttccaacataacaagcatctgtaaatccagatatgaatgaatggtatttaataagattgttttcgttttaaaatgagtatttatgtgtcattggaggcagagcagcaatgtatggctgtttatgaatgctattgtgcctgaggttaggatcccccacacaatctgagatgcagccaagaaaaacagccctgatagacaatgcttcacttcacctgctacaatgctgtgtgcatttcatttctgtcaagagtatgtacagttagggttcattcgcctcattattttgttacatctacgttacagttaaccagtctctctaggaaataataaataaccgctttaaaaaacaattgccgcgttgcgttctgagaatacactttccatttgaattcttttttaaacccaccattgttatgaattctctggcttcggaaaatagaattcagactccaccaactcgcgttcgtttgtcgagattgattttacactgccttccataaggagattagaaagcaaaaggctgcaaaatggacactctctaatgctttgcttccttggtccttcggaatgtcagagcgcaggaacaaatgtgaaatcctaccagtctgtctacctagacacttgttctgtggcctttcctctcaaccttccagttaaccacctccttttgcttgttaaaaatcctcttcacttccaaagcaaagaatttccaaatcagtttacaaaagctctggattcgccatctttatgcacaggaagtccttccttctctcagagctcagcacacagtcctcttattgtagaagacagataggagaggtctggagaggcaggcttcacagccctcccccatcctccccaccccacctcagagaacgttttgtatttctaaaaggttctaagaggagccctgtggtgataggaaggggtgggctggcatttaggggcaagcaggaaagattccagggatcaacatcatttcccactcccctctctacctcgagagctactgaagaacagcacagtagtaaattcatctctaaataaaatatgaaaataaatgggagacaatttgccctctctttccctgctacatgtatatttctgccactattccttttctcccgccagaaatctagagctggtctgagctcatttgcccgtcttagccgctgactaccctgagcaagcaagtgaaggttgaagtcggtatttcctttgtgctaatgaactaacaatttaaatctcagttatcctctgagacaaattccaaagcagttatggggggcgggggggggggctgttaggcggggggcctgctggtgggaagtttcttctgttcttctccatcttccttgtcatccttaacatttggtcctggagattttatattttggtttccaaaacacaaatgaaaacctaaaggatcaacataaataaaataaaactttatttttaataataaaattaatgtttctagtaaggaaaagacagtatgtcattcctttagcagtacaaacaatcttttatccaaaagaatacattgggttttattgtgtcatttgtctgaatacagacacagtggaatatctaaatgataccctgctctgaactccaagttgaaagtaagtttttattatacttgagggaaacaatgggttcagctgcttattgcaaggagcaattgccaagggagagttaaactcaattactgtaaccatactgaataaaaaatactgccaagaacaaaaatacgcctgggtaaagacagccactgaataaaaaaaaatcgacataaagcgtatcaaatatttatttatctgggcaacaaaggactatgatacattgacaggcatggaaactactgccagcacaactcaatacaatgcaactagaactgcttccaatatggccagtgaaaatacagaataccaggtggtcccaaatgtttgaagttctttgaacagaaagagagaggagagagagagagagaggaaaattccctaacccttggtttaaagacaatattcatttattgctcaaatgatgcttttaagggaggacagtggaataaaataaacttttttttttctccctacaatacatagaagggttatcaaaccactcaagtttcaaaatctttccagggtccaatatcactttttttctttcggttcaatgaaaagctaaatgtaataatactaattatagataaaattttattttactttttaaaaatttgtccagctgtttgtcacctttaacatgctacaacagggctaaattcatgaatcccagagaaaaaaatcccccaaacactggatttctaaatcagtaccatgaaccacatgaagaactaatagggaagattcaaaacccactaaacaagaggtaaacaagatcagataaataaaaaaaaaaaggcttaaaacagactcaccatatttacaattcccattaaattacacataaataaatatatacagagacgtgaacactgattcccttatataactgcgaatcgtgttgccagagaaagttcaagttggtcgctttaccttaaagaggaaaaacttctacaactgaagacatgacatggaacttcgtgtatttgtgttcaagtttattcacaatactgataaaaatgttgtcatcatcttttggctttttttttttttttaagtatggctacaatctgaactgaagtatgtaagggaaggtggtgactcagtcccatgaagcgcatataattttttttattttcactttttttttagaaaaaagtttttaatttttgttgttgttgttgctgttgttgatttgttgttttgtttaaaaaaaaaagggttcacaaacttggcagaacttttctctgctggcttcacggcctgttctgttctcttaggctccacatgagggcacaggggtgtgggagcgggtggggaggtcgaggcgggtgcagagtcggagaggctgccccactgacagtcgagagggcagtcccggagactcggggggacccaagggcagcggcggcggcggcggcggcagcagcagcagcagtagcagcagcaggaagggttgctgatcccggagctgtcacccgccggagggtgggcgcgcggggggctggtgaggcgtgggaggggcggggcgggaggagagcctcactttctgtgcttctcctctttgtcactgcttttggcgttgttgtccgtgtggctgttggggttgttgctgaggtacattttgtccatggccttgagggcctcggtgagatagttctgcagggccgtgaccgcggcacacaccgcggggctgccgaagccgtgggagatgaggttgaagtgggtcaagcagctctggatgccgggctccaggatggggttgggccgtgagttccccaggggagatcggtcctgagccagcaggtcggtgaactctttgcatatctgtctgcagcacaagtggagcagagagagagacataaggctccactatgggcagcactagcagcaaagagaaaacctccctccctgcagctacctctgccgggatccagccggtacctgacatgacccaagaccccagagacagacagtgtggccacatgttgggagatccagccacctttcagtgaccactaaaccatctctctttacttcctaccttcacaaatgactctctctctctttcctctcagatatggtaaacttttattcccacctttctccctcacacaaaacatcctagacataggaaaccatttcacacattggaagagaaagaaaggagtcacgcagaccggaagtcagaaacagtagcatcttgcgaacattatgctgcagccatcagccttcctattcaaaatgtcataaagaccctcttccctgctcctctagagagacctcagcagcagtttgtagaatgaagtccacactcgttcaccttcaaatcaaattcaggtcaatgtggacagagagacaaaactttacttgggattattttgcctttaaaaaacaagaataacaaaaaaacaaaacgggcccacacaagccctgttacttggagataattcaaagtagtgtttgggaagaagaaacagacatttcgatttcccattcctcctctttccccacatagctcaaaataaaaatactgcagggaaattgtggagatgggtgtgcttacgaagcctggggaaagagaaagttgaaatttcgcagaggtagatgaggcctgcactcaggaagctctgtctctgaatctgggaagcaagggctagctggggccttccaggggcagcagcagcctggcctggggggctggggagggggatgaatgaggagcctgggctggctcccttctccaaggccagctgatgtccccaggccagaaacagggtcccacccaaggcctcagcttctgccctctgcttccatgccctcctgtgacatcaactttgataattaagggcttccaaacaagccttttaatttccagaaaacacatcaaaacagtcattttcttttcacacatcacctggagaagcctattcagcccaggcaccgatgggaatataacttgggccattttgaaatctatttgacttctcgcctgtgggctaaaacttatgtggggtgtgggtctctctctctctctctctctctctgtctgtgtgtgtgtgtgtgtgtgtcactttcgagaaggggttgtgaaaggaaggtaagaaatggaataacagattagggttgaaactaggacagcttctggcttgcacattttgcaggccactgtttaatctttgcccttggagaacatattgataggatacaaaaactgatataggtaagcctgttacccctttgaggatttgattctggtctttctgaaacaacatagtcacaaatccacccttaacttcagtcaaacccctcctacaacccactcccatacacactcattaaaaaaaaaaaaaaatgagtaaatgggacagatgagaggaaaaagatgggagcgcccaagaatcccacctgtatttcttccttaacatagactatatataagatggtgttataactgcaacaaagctgattaacacaaaaggaaaacaagggagaaggaagagcaaaaacgatttttgtttctctttctcttgacaacgagacacagagaccccatagaggtaaatgccttactttgtagccaggagcatgttttttcttgtcacttgctcattgggatcggaatgttgtcggttgagaaattcagctactgctttggcaggaaattcggtttcgcacacgtacccaaagtccctggctaggtggacagcttctcctggcaagaggggagaggagggagccagtgcgagagaatgaagagtggggatcctaacttcctccccactcccaactccctaattcccttcaccccagatgttgcaggaaacacaaactacttgttttctcatttcaggcattttatttccttctctgtaggatctggtggatgcatttatcaggaaaaatgaccacttctcctagagggccaagaagacttgaaaatgaaaatctcatccaccaacctccagtcccatcccccaccctaaatgacacttctccaaattctcttttaaaatgcttcttgtattccaacttcacacctatcaacacattcataaatgatattcataattactctttgagcttttctgcaagggaacaactgaggggttacattttaacttgatcacataaattatctgttcatccaaaccgattaaccaagaggatttgagggtcactccactgagtctgtctgtgttgttgattttcgaatctttggttttaatttcctgaaccagttggtttttactgcagggcttcctgccattagctccagctccggaagaacgcatgcgccaattagagcatcaaagccctctccgcagagcttgtttccataaaatggagcggatcacaaacaataacagttctccagaaactgcctccctgctacagaactcaacccccaaacccagacgaactccacgctataccttaagccaccactaccattttcttggcttataattcttttggagtatgaatagtgggttctctatggactgttatgatttttaatgtaatggtactgtagttgagtttctggcactgaacaattgctgattttctaaacagttatattactatcaatctctgacatcatcaacaaagagaattcataggattcctcctcaaatatatggttttaaacattttaaaaaataatttacaaagccagaacttaaattcaattgtaatatatctcctcaaatacaagatgtgaatgaaataaaatgacttctttaaatatatatacatgctagttttaaaatctgtctggtaattaaagtaacttttttttccctgttagcatgagatatttacaataggacacaaagaaaaacacaggagagctatagattcattccagtacaccaaaacctaggccaatcttgtatcagaaaaacttaatctagaggcagcaggaatatgagtggcttccggtggcagttatctagagcagggagtgaggataagggttggctttttgttttgaggcatttggaagggtgtatgtatgtttaaagctaccaggagaaactttttgcaatgcttatatttatctttccatatccacatcatccagaatcaaaaattgctcacttttcttcttctccaagagaaaagcacaattaaagagataagggagcatatgtttggaaaacaaagacctgaaagggcacataaccctgagctttcaggatggtcttaaatcaggacgcaggtcaaagattcccaaattaattcaggaagtaatggtcacgcatttctcaaacgcagatgtcagaataacttaagttatttactgctgagccctttaaaggagacaaacttggagaatgtgcagttcttaaacttgtgcgttgtttagctcagaattaggctggggaggtgtaactttatggtagaggaaaagaaggaagaaggatggaggtataggagtacatgcaaatgtttctttttgccatgaaataattccattcacatctggctatattctctgcaaagatgaaactgcccaactgacataaaatacgaccaaacatctggccactaaatattatccattttccaagaaggaagttccttctagttagcaagtggattcgcttaccctctactagtgatgtgagcagggtaacgttggcagctttacgtctccctgcaggcagatttaatcctattttgtccagtttttctcttaaagatcttcctccatttttagacttcgccctgtttcacaaatatatgcgagaaagggatttagaaaacattgggttgctctgcaccacattaaaatcattttgaaagcttcctaaaatgtgctttcaaaaactgagaagcttggccccaagacatttaaaggagggaaacctaggaatagtacagaagttcataggagataaacgcctgttaaactgtaaagcaccccctacgttcagttattattgcaactcttgtggcaggttggaaggttttgatttcccaactctctaaagaagaaccacaaacaaacacagccccatctctagggtttgaggtattgagttcaactgattcctgtatattttctctgctgttacaatcacaccaatcccaatggggtctttaaaactgtctttgcaagatatgctgttaggttgttccgagtaaccaaagttatcatcactctcacgtttcttgctctggctctagccccaaagggaaattcgtttcgccaactgtttacgtgccatgtcaccagcctaactggaaatgtcaaaagctgatatcagccctaaaagtttcactgatttcagagacaatggaggcagttctaaacagatgtctaaatagaatcccataatcagaaagtggttaagataaattgtttaaataaaacagcaaattaattaatttcagattttattccctactcaagtgctctttaattgtgtggattagattatactcccctaggtaaacagtctccaatattggggatgggggaagggaaggaaaaagcagagggcaaggaaaagatctgtgtcagtgaaagactacaaagggaaagcaaaatgactgtgcaggaggaagaaaagactagaatggttgatgttaaacccttccaaaaaatgatctttataggctttgtgcgggatatagccactagaaaggaactgtgggtctatcaacacataagtaaatgaataacagtcaaaacaatgaagttctcagtattattaaagaagagaagaaacattatccgggtaagttcaacacaagccccacaactcacaacgtgcagtggaatcctaggggtaggaagcccacagcagggagaaaactgccctaagggaaggtgctttaccttgctgacccttataaaatcttatctactaaatgaatcactcaaacctcgcaggggtgaggtaagaatccctggctatgtatgtaacagatgcattccttggtagtgactacacacaatgcacgtaaacatgctcgcacgcagcctggcacacatcagggcctcagtaaattgggaatcatcatcatatgcaaacgcctatagtatgggggtctggagatgacagcgaccggaaagcatggcgtgcggactcaagaggacaaccattctcttcctttagttaaaagccattctattaaaaccctatacaaggcacgaccggttaccctcggagaccctactcagagaggtaaggcaaagcgaggagcctgagaggaacttttcctgggcttgcaaggtgtgcgcgaagagggaaaaggtggctgtacggcgccccgcggctgcagtggccgggattgagcccgcggcggagcgagctgcgcttgcgcgaggaggagggcggagcggaggactccgcgagcgcgcggcagcgaacgaagcgcgcaccagaactcgctcgcgggaaagcagcggagagcgcaggcgcgcgccgcatcgcccgctcccccgcccccagatcccgcccacttggctctacgctcttctccccgccccctttcctttcccgcgtagggagggccgcggcgcgaggcctgtttgcgtcgccgccaccgccccggcgcaagcgcagtggttcccccggccgcggggcggggcgggcggggccgtgccgggcctcacctccggagcactccgcccagcagcgacgcgttgagacactcgggtggtgagagccgccgctgcacttccgccaccgtgaccttgtacttcgaggtggagctgaggagcgagaggcgacccggaactgaacagaagacttcgttggggttcaccacgccgccgaagaggttgtccttgttaatagggatggcggagacggcattgctgttggacttggacagggacacggggcctgcggagacagaggggaggccgcgtgttgggcgtcgtggatcacccccaaatcctgcccgaccccggccctcatcccggccagggccggatcccaggctttgggccacagtccccgcttttccgtccggctctgaaattctgtggctctgctacttcccttcctcgggctcgagcccttccctacctcacccggcggccgggaggcggccctgccctcccccagccagcctggcctgcgtttctgccttgaccctttccccttcgccgtcaagggtgctctctagagatgggtggtgaaattggtgacccctgaggcgctgagcatccgagcggagtgggccccagatgaggtccaggaccacgggttcagggtgcaggggagggaattacatttgcaaaccgagagcaagttacttgtacttcaggggttttgctgggtggggttttagtgtcggggaaaaactgcttcaaagacccattattaaaatcagccgacaatttagatggctaaagcaccctgtaaacgagcgttttaattgaggcaccacgctgggaagtggtggattttgttgtccacaccacacgtcccgtctttttgataaataggccctttcctatgttcaattttgaaaacgtctcagttttggagatccattccaaggccagttttgaactgcggagtggggagggaagaacaggcctacagtggaatactagcaatgtgcccttttgttaagtaaatacttaacagtcctctgctaaagcgcctttattgggaaagtgggtatatatacttcctagttaaaaccataagctctttattgctggactcaccactgttagaaaaaaaaaaaatagaagacctgcagaaagtatactaatgcattacgtttctcagcaccagtgtaattcagatgcattcacaaccatttaagtacagtatgcattgtattttaaaattccatttggagacatcatatgcacacaatctcatcacagtgttccttatgcgttctttaatggggatatgctagaggtatagggaggtggggggctctaggttttggatagatcacttgtgacattaatagctctggggaggctaatagagacaataggagttaaacgaactcttgagagattactaataaaagagccaattatcatgtcgacttggaaagagcatctcttaagatttatcccttgcacatctaatttgacgtgacaaagacttcacagatgcaaaaatgaaactttaaactagctaacaatatactgattggggttagaaatgagaacagttttatatagcatcgtcctctggtggtgcctagaatcctgaaatgtaacattgccaccataaccaaaaaaaaagctgctaccaagagtgaatagcatttaattcagtaaactttatttctactcactaaacacaatacagattacaaatccatgcaaatcacttgacacttttctaacaatttctcctctgaacaagtatgctaatattcctcccatcttcaagatactaattttaaccaaaagctaaaattttgttaacctaattcacaaagttctaagacccttaaacagctaacaagaaactaaattgaagaacatgaatgtttttttcctctactaaagagtgcttcttatcatctgttcttacattaatgttaaattatttgtactattttagcattatacacttcttaaccttcatccaggcaatggattaaactatcaaactgtttcaaaattgaaatgccacttccaaatcagttcaactactgtacattttgtgtgtttgtccaaatatcattaaactaaattaaatggtcaaatcatgagtcagaacaaagctagcctgttggcattaccaacatactgaaggctgattatttaagcattgctgttctgtgcctatctatttgctaattctgagcctttaggaaatcctatttggaaaaaataaacacatctctgcaagttcttttaaatagcactctgcctgtaaggacatgcttggaatgcagaaggaaatggcttacctttcttaattacagtttgatctgggatgttaatacccgggtcttctacatgctgcaacaaaaggatacacatggatgtaagtgtatcatcaaaacaaaaggaaatgaatattccctgcaagatgggaggaggggaaggtgtagaatcaaaattccccctcccgtataatgacatttatatataaacatctcatcttggcttattggaatttggggctttgcaactcaagaggtttcactgcacacccatggccaatttctcctcctccagcaaataatccatgtttaaaaggggtggagatggggaataaaactttctttggaaattaaatcaagtgttggagcacctaatcattctcagtcagttcaacatttagaaatgtacctagctttagattggcgcctcagcggcttctgactttagcaattccagtgttcaggcagcgaaagccagggaaacacaatagaaatgacaggggcgggagtaacaggagagtgttggaaaagaaaaggtttaggtagtataataaagagcaaacacacacacctttatggaaaactccacataaatttttagaaagactactgcctaagcctgggtatgataggaatatgaaaatgaccaaaaccaaaaaacctttgagcttgctttcctgttgtccaacagcaggtttgttgttagtgtggggtgtttttctttttcttttcttttttttttttttttttacagatggatgggtatacgtgtgcgcactagagtcaaaacgtgattagaaagtaaaatgaagtcatgttttctaatgcagaaactgacaggcaatataatgtctggctgtgtttacaaattagcaccagggctgctgagatagaagattttgcaatcattaccaaacacaggcattaccatttaaaaaactattgcttccttctctagtctttgtccaacaataatactgattcgaacattttccattctgtcttggatttatgctcctgttaattgtgcctgatcgcaatgattccgggtggatggtactaagttgctttattacaggttttattatactcaatgctctcatttgtaacttgcctaaagtgcttctggatttaagtataattaaattgagaaatgttcagaaatgactactgctgcagttcttgtgttttaactatatggggaaatatgatccctttatgcatgcaccctaaacccataaagtaaatgtagtgtggcataatacttttatttgtgttatttctagaccttgtccatacagggaagactgttaagtttaaaaccccactgagatattaatgattaaataattttcaccatcgatttgattttcttaaatatttagcagttatacttactaaaggttaactgttgcagcaatgggaaaaaattgaaaacaacctttttcttgacccaaattcctttgaaagaatttttttcttaaaagatgggggagggagagggaaaaacagcaactgggtttccttgtttttgtttaatcttttagttagtttctcctactgaccaattttgccacaaagagtgagtatacaggtgttaagaattcaccttgaaatttttgcaaagtagagcaattctcattcacagtagttccaaaagcttgcaacattattttgcaattcaaatattttcaaagaacaagcaaggaaaagattcagagtgctttgggaaagggaactaaaataatcataactcccagttcatgtttaaattgctcttatataaattagtgctcctctcacttccaaaaaaatgcactgttaagtatcagtttctaaaaacatgtaagtatgaacacacatatacagacatacagtgctcactaaaccttatactggatcaagtgcccactttcctgccttccatgcaagggctgctaaacataaccaacaaatttcagtgactaactgggccaaatgagagatgtaataaattttctattttcctacggaacttaaataatgttttaaattcaccaagcaaggaggtaagttcatctgaccattttccttacaatctaatgtagtaatcattaaactgtcaacggacatactgctgcaatatttgatgcagtaatttgaaatagcattttagtaaaaatcacatccagatacatttcctctccaaagaaaagcagctttaacagaagcctttacagctttaataaaattattggcttgctctaattccatttcaggagggttgtgaggaaaccataaatatatagaattgaagcagaggtactggtttaagtttaattccagaaagtattttcaaattatcaatagcctggtttgcattgtaaatagtaaatgtgctaatgccatgcttatttagaaatcattttaaactgcatttattgataactaaattagaactcaaataatgtattacccaatagtctcgaaacatttaatttaatatggagtgtagcaggttctgataggcgttgggaacctagctaatgatttatgaggtcaccacttagcacccctagtaagaagaaggctgcattttaatgtccctctgcttggatttgctacttagtttttctttaatcaggatagggtgtacacataacttttaggtttcacttgtgcttataaaatccggttaaaatgatcttagtgtgtcttttacacttccttttacattttgaggacatttaatgagctcttttggttgcatttaacatcattcccaggacagggagaaatctccacgccagactcagcgatggaagtagatcttttagcaattgagacagtttactgtcgtcgagaggaagatattgttaatggtgacattcgtctgatttatctgtgttggtggaaatggtaatgcaggcattgtttgagggagctccagaaaccattgttctggggtagaactcgcaactactttgtgtggttcctcaaaacgtccctcactctccgcctccgaataaaatgtttttataaggaaatactagggagaacccgggcccaccgactgtatgttccaggtatcctttctggggtaggtaagtagggggctgtgttccctcccgcgctggttgcgcggcctcttaccgggacctcctcgatggcgtgaggtaaggagtggatcgagaggtctccgagtcctgagctgagcgcgtgtgggccgtgcaggaggtcctcgtgccgcctgtagtccctgcgaggatccaggcccgacagctggtgaggcagcccccggtgcgtgtgcaggagcccagactcctggctctgcctctggccgggccagcctgggtgctgcggctgcggctgggcgtgcagggggttcaggctgtaggggtcgttgacgtgggagtaaggatcttgcgactgggggtagataggctggtagggtggggggaagtatgggggctggaagtcggcattgggggtgtgggacagcggcggggcgctcgtgtagggagattgacctacagtgcccagctggggcaaccgtgccgtcccgttgctggtgccgtcgtgacggtcctagaagagagcgagaggaaaggtaaagaacaaggaatcaggcgtcgagctacaactatccacacaaaatccacttgacaagtctgcgtgggaaatcgcccgttcccgttggctggccgccgggaaaaaatcagctctaagttcttttcaggaaataccctcaagtgaaacagaccgaacaacgcagagaaactgtatatggagggggcacaagagactatttaggggtttctttcaaagagaggaaaagatagaaaagggtctcctggaacacagcccattaaactgcagcgtgaaatctctcttaagcaaaattaaaattcctcctaaatactaaacagcagaagcggccttttcttttcccccgatttgaacctgtctgccactgcgttattgtttattctcttccatttatttggagagaaaaaaatcataaacgttcaaagactgttaccgtttcatgactacttaaatagaaacatatttcgcagaggggctgtaacaaaaacacacgtttaaattaccagcttaaagaaggttttaactgcaggatcggggtctgtctttttcgcttcctctgttaggagcctttttctcgacagagtcgatttatggtttggatagggaaagggggacgtcaagtcaaggtttaaaatagaaagattcagccttattgggtttaaaagagagaggtgcaccccggggctgtggccccccccccccgccccttccaccccagccccaaagggcagaagaaacgcctgactttaggtttctctattgcaattcccttgcaaaacaagcgaagagagttgattccagagaccgcgaaccctcggcggttcggccgcaggtcccgagggtagggggcacaccgcgctgcacttttcctgcagacagtttaagcatcaaatgttgagaacatctcggggacaagtgaagactcaaggaaatcaagatgaacgtggggagaaacacgccttgggaagccgcggcgaggtaggtctgcgtgctcggagaggtcgagcgggggctggggtagggggtaatgcactcgatttagggatggaaaagagcgagagaaaggcggaaggtggggtgggggatgcaaatggagagggtgtcctgaaggaaagctgggcgtgaaacccgaggtttcgggcagctccacggcaccaggtttccagaatccaattcctaaagaaacagcaacgggggtggggatgggactcaccatggctgaaaaactgtgaactaacatctgcgaagagtctggggtaacgagtcagggtggaaaaaaacaagcaagcctggagcgcccggctgccccgccgcccgagcgcgccccacacaaaaggcgccgagagccccgcgccacccaggactccagtcacggcgccgacgctccccggagcgcgggagcccggctcggatccatccgaacttgaaccaccgattcgcgcggcgccttcagctggtcgaacccacggtctctatcctgccgcgactggttatgattcaaagttctttaaaaatgaaaaaccccaaaaaaggaaaaaggaaaaagtatgtgtgagtgtgtgggtgcgtgcgtgttccttaatccgtgtctccccctcttttcttagcggcggcttcgcttgagcttctaataaccgcgctgggcagcgttcctggagcctcctaatagcagatattcatgactattaatattacacgaatacttaataagggaagaatgcctggaaatcgagcgtgaagcggagaggcaactcgcgccggagccggctctcaatgcagtccattgacgggagtctcagtgtagcaaatcggagtggggagagggagcgcgagagacaaaaagcgagcgagagagggagcgggcgagcgcgcggggggccgcggcgcggcgtctggcgaatcacagggaaggggcaacattttaaaaggttgcagggcatgcaaaagtgaaagagaaagaggcagagagggagaccgaaggagagagcgcagagagggagaatgtgtctgcgtgcgtgtgtgagaaagaaagtgtgggcgagggagaggagccccgggtggggagaggggagggagggaaggagggagagcccgagaggaggaagggagggaaagagggagggaggaagggagggagggagggggagggggcccagccggagcgcacggagggggaggccgcgggggagggggaaggggagaggaagcgagcgaggacaatcagacctaaaaggctggggcagacctcgggatgcagcgggggtcgtgcgtagcgggtaggagctgcttgggaccgcgtccgggcgctcgtggggctctcggcgcggcaggcgcttcccggccctgtctggccgcgggctccgccgcttcgcagccgagtctgggactcgggactcggctgcccgctgctgcgcggctcctccatgacccggcgccctgcccgggaccggcccgctcgctgcactggtcctctcctcggcctcctcttgagctttcctcggacaggggcaccgtgcgctccccggccaccgtcgctctgccctcggctctctggggccggggattccggatcgggagccgggatgcgggccggggcgcgcacagacgctaggcggcccagcccgggcgccgctggcaccggctcgcggctcccggcaaaaacccgtccgactggctgggccactcccgcctgacgcccccccagatgacacgactagctctcccggcgtgctgcctttgccagtctacccgccaggttgtcagaacaagcggcacctcgcctcctgcgtgtccctacagagccccggcacaatcagactgccccaagccagctccgaaacccgaaatccccgctccggcgcttgcccaccacggccaaagttgtggaaacagctttgactttattctcctctctctctcatctttttttgcctcgcttacacacgcattcacacttgcccccacaggatccctctaggggtgcaagttcatcccccacctagccacccaccccatccagtcggcacctagagccgcacggaggttcggaccccgcccgccgagggcgcccacacctggagctgggtttcggcctctgcgaaagtgaaatgcccaagcctccggccaaagcccagaccagtacagtatgaattgtcctatgagactgaggggttcggcttcattcctacctgcccgcaaagctcgcccccagcctcgaaaacaaagcgactggtctgacgtggggtccctgcgcccctcctctagcgcgacaggacccccccagggaagagccagtacccgtgggatgtcaccccgtccccatctaccggggtggggggcctgaaaggagaacgatttaaaataatcttcagaaagaaaagggaggagggagcgggtgacacatcgttcacataaacccaatttctggtttcgagtgaagtcaagatctccgcccctgcgcctgcacacacacctcctgcctaacattctcagctgcaaatgccaaaaaagaaaaaaaaaaaaaacagcaaaagttgggactgccacctatttatttaggtaatctccagccctacacaccccaacccctctctcggactcattgctcattacagtgttggttgtaaccgttcccagcgcctcctgcgggtggacaggtcgcgctagggtctcccttgctgcctcaagaaggcgagctcaggggactctgcgttttaaaatgggttccaaagcggcgcgctctgtcggcccagcgggcttgcggcaccagaggtggtctgcagccgcgcaaggattcccacggtcgttctgggctggtgcagaagctggtgctcccgcacccagcggccagcaggctcggcgcagcacatctccccaccccacccccacacacccccgtggggtgcgtcgatcctgtagctcagagggagaagctacttagaacttcgtgaagcacagaggatctggagcgagccccgcagctgggatcagtggtcttaagttgaacccgcttacaggaagatgcagcccagctcacagcgaagtgtgggggggccgtctctaaagccgagaagggaaccgctttagaagtgggggtggggggaagaaagaatgaatgaatgaatgaatgaatgaatagaaagaagaaggaatattaaagatcggagaggaagttcaagagagaaaagagttttctctttcctttctgttcctggtgacttgggccctcaatctcgatgaagataacacgaggagtgcacaggcaagtgcccagttgccagcaattgcttcaaaagcccatgttcttcttttcccccattcttaggcacagccaaaattggtcagaaaggggagtaaagtgggacacgagcttcaaagtagggaaaccaaagaagggagcatccacgtcctctctctgcagcttctcccccgcgttcttcgggcgaatccgagggacgggcgctgcgctggggaaagtttgtcccacccgcgtttcgcagctggttgcaaggagaggaggaggagagggagggtcaagctcggagcctgtgaccgcacggatgatcgagccggcgtcgcgcttacctcgcagtcctcgtacttgatattatccgtcaatttccaaagcattttcatggatcggcgtgaacggatatgcccctctcggtctcgcacccaagtggagctactctctgggtgagcgcaaagtgctggctgccggcggtgagcgcaggaggaggaggaggagggagaggaggtggaggaggagaaggaggagggagaggaggagggcaaggaggaggaggaggaagaggagggcgaggaggaggaggagggcgaggagaagggcgaggaggaggagagaagggaaagagctcccgtgtgcgctcggagatctccctctaatggtagaaacttttcccttttccagctctttaccaacagcctaatcgcctcattagcatatcaacaatagtccaattgctcgccagtaccacaatctgccgccggccgctccgacacaggtataaaggcctctctacgccgcgaacttgcttctagagcgcactccagcctgcgaactgataaaaccttcctcgagctccgccgcgaggccctgccccaacaccccctctcttaccccaattccgccacattccccttcctttctttctccgcttccttttctccagagatgccttctgcaaagcccggcactgctcaaggtccaagcgccacgcctggggcccagcttctagcacttctcccttaaccctgctaccacgatccgagctgcccttttggccccgtgcaattttattagaaatcattatccctttcgcaattaaacataaccaccaaaccaagaccggcgaagtcactccaggattttttcccaacaagggatcgcctccgctcgaggcagccaccccctcgggccgcagcgccttgggagttttattggctttgagctttcccccaggttggagattctgccaagcggctccggtggctctgctggggtttgcaatcccttaattgcagcgtgtaaaataaaagttgtaccctgaagaggttacttgacagctccaggggttaaacaatttttctcctgtttgtgtgaagctagggccaactgacagttcaaattggtgttcaggctaaggtttcctgggtgcaacgtggacacgaatacagaactcctatggaactgcacacccgcttctgaagttgagcctaaaaacagacgtgtgtgtgcctgcaagtctagataccgtctcgtgcgtgcatcaaaataaatcaccgggaaccgacttttagctgtgttaatctgctctagttttcccaagattcccctttttaattaaagcagggagagttccttcatgatttggtgatgctactaacgcgggcgtgctcgcgaggcagagcccggctgccgcggaacctggaggcctgggagccacctactcgtccagactggtcagtccgggcttttggactcctcaccggggcctgctgggtcctctggggcttttatccctttcggttttgggatttttttttaagtaagaaaaaaaaaaaagaaaaggacctaatgtgacactaggaaatacagagtaattaattttcctggctgagcttcctcgtttgtcctccaaaagaaagttacctctgtcttttctctctgctatatgtacaaactccttaactacactaggtcccgcctcagagttgctctagtaaggacctttgattcatctgggcttgtttctcgaaaatctccaggcctcccatatttccaccgggcgttcctaaaaggggatgggaactgtggcagattggagcattccctcacaggtggaaggaaggcaggagctgggagaactccccattccacccaaggctgcagaaggggaattctccctccaaacacctcagcaaactccccaaacctagcagagtaggcagaaggctccaaaaagctagggagaagccggagctggcaaggggccttacagacccaggaagccctccccatgctctgggcctcccttgccctacctgaactgagcacaattcctcggctgaaccgggctggaggcttggcgccgccctccgtccagaaaatggtcgactttccagggctagaccctgcagggctgtcccagcctgtcgccagtgcagtggtttgaagtcaggatctgggctgccaggagcaccgacaccctcccagcagcggccatagcctgagcaggccaaaccctaggcctgagagcatgggtttttacactccgtagacgtcgccgcggtgtgcttaagggaactccaagtttcgctttcttgccctctgcgggcttggaaaggccgccctccatcctctgccaccccatttcaacccccgtttccacctccccgctgccccgcgcccaacagatctccggctccgcacccgctggggctgctaaactgttgttgtattcccgccgagggcgccattgaggtgcagattgggacctgccggctctggactgccgcccccggtgtaggcgctgatgaaaggcccgggcgagcgccagggtcgcctctggagccagccgagctgcatttatgccagcgtcattaccacgctaagtcgcttcattgcatgtcaatgctccggcggggccagaaccccgggacagcagcgccaggcctggggttggaggtcggagatccaggcctgacgtggggggcataaaaagggcgtcgcggggaagagggagtatttgtgtgagagacagagtcacaaagagaaagagacagtgaggggccagaacgactctcttttctccgattgtcaatgcccagtgggagccgggagcccaacaggcccagcccatcagattcggcccctccgggccccaaatccgctcgccccacccgagatccaggcctccagccacttgcctaactgtgagcccgcaagagccaggcccgcggctccctccttcctcctcctgcggcagtctcgcggctttcaaaccttagtcgaacccacagaaggcccagtcccaggccaaacctactcaacaggcaccttctcacggcctaggaattctgcagcgaaattcactggaatttgaggagaaaacccaaagactgctccgaaaggactcccccagtcttcagcctccaaataagagagttaggaagggcctttagcccacagggtcaggaagggaaaggtgtggattcccgggatttgtctctggtatgggatttgcatccttaaaccacgaggtttgtctaaacttgcggatgaaataccatttagtgaggcttaactagggagaagaatataaaagagctcactcttgataaaagtaataaatccaagggaaaaaagtacagaacgcaaaaggcctttctttctccaactccaggtagcttagtgaagactgcacttctcagaactttacttttaatggcctaaatctgaaacaagagaaagaactcgaccaggagtagcaaggcctcagatttttggggggaagttcagggcattagattcgaattgtcccctgggcttttgggcacacagaatctcaccctcaccaggcctcttggttggggcgaaaacagggcctcgcggttctgatgatgaaatcggcgacaggcagagccttttaccgccaccatcctggccagagccgctctgtttcccgaagggaaagtgtctggaagttggaaggagagagctggacaaatgcttccttggccagggtcggaatccggggctcaggaaggacaggagccaagccttggatgccttgtggtgtccgcggcctagcagggccaagttccacaggcgttggttttggcaaattcaccacccccctgcctcctcacccaccattctcacactccctcatccgtagcccaggcggcaaaaacccatttcaggaagtggagtgagttgctagctaaacttcgggcaaactttgtatctcctacagaaacacgctgcctccgcgacccagccatctggacccctttccattcttcacacatcctagatctcccgaaatctgggggtaccaagagagacaggtgcaccagaacctgtccaacactcaaccctggggtctagggcgaggccgcaggcgcagcaggctgaaaaccttcaccgccgcgcaccacaaccccaggccttctccctccccccttccgaattagtcatcctcccaagtttctacttgaggtgggaggggggtgggggaaacggccacagcacaaaccacaagtgacccaccaggccacctgtggagcgtgcgccggacttccccggcgccgggccccgcgggctgcgcgctttgcgcccagcaccgcagtcgctgcctgcgcccgtttttcctgtcttcgctgtctcctgggagctctcctgggcgctgccaggcgcgcctcacctacgactcccctgccctgggccacggcgcttcctctcctcctccccgctccggccccctcccctactccacccctgcccacctcaaccccagccaaggcaaaccccccgtacctgccagtcccccattttggcaagtatggacatcgcggctctgcgctcctggcgactggtccccgccgggcatgggctggagggctcggtcgggccagctccctggaatcgcttaggcaaatcctccttttttacctgctcaccaacatctcacctggtcataaagagctgggttgctacctgccgacgcatgcgcgctggcccaggaattcactccgccagctgcagtcccagcgccgcacagagctgacctgggaagtgatggatttatagccgcggcaatcttgccatcagctccagcttttcccaacagccccaacccgctttcccggtcagtccctggcccgggaaccgaagctgactgactgctggatgtgctgggtgcgatgcgagtgtgagtgtgttttcgcactccagtggtggggcatcgacaagctcgacccatggctagcctcccctcggaactttcgaactgggggagtctccactcccgggtgggggtcgggggttggggaagggctagactgctagaagcgtccagaccccatgatccccgcgcacctggacacagtggggacaggtcgccgtccccgcctccccacccgcccacgaggtgcagggcacggctggccttagcggatctgactctgccaaccccggggccacttcagcgttagattccacatgaaactgttgctcaataggtgaagacgttcatgattctgtgtcacttctggcttctaggtttagtctcctcccatcgtagagagaaagagagaaactctacacatacatacacacactcacacacactctctcttacacactcagacttagcacttctgtacaaaggtccacccccttcttcctactttcacagttcccttcccctctcccactcctctatggcttccagcgctttatcttttccatttagaactttttaaaggaagaatgggggcgttggtggctctgggatgggcaactgaggtttggtttagggtttgctttcccatgacagataaaatcactgaagtgatttcaccgctgcttctaattagaggggagctttaaaagaagccacgggatttggggctcccggagccgcacctggccaggagggaggtgagggtgaggagattggcctcgggccacactctcccagagacggtgccagtcccattccgcggctatgagatcgaattgtcctgggtctaggcctgggacgcctgggccaggcccagttaccctcccgggctgctgtcgccgggacttggagacgaacaaagaaccagttttaaatcgtcttctctgacatgtcaggcaaatatgtgtaaaaggtcagctccacgctgtggagcagagacctgtcccccaggcaccaaaacctcccctttctaaccgtgcccgagagcctccgacccctgggccctgtccaggcggctttgcacctctcggccttcccaggggtggggtggaggtgcctctccctggagtccccttatcggttccgcattttattcatccctgggctacaggactttcatcccaatgcccatcctttagttgatttaaaactttctgggacctgccttagaatcttggtcaaggctgggggtttctgtgggtagtttttttggtttgttt
